United States Patent Application Publication US 2019/0348154 A1 - sequence listing, part 6

SEQ ID NO: 17657 - DNA, 2274 bp, Escherichia coli
atggttgccggtagtaatggttcttcagccattaataatggtgttattaatattcgcccatttaaaaatgctttcgctccagaggggattaacaccgcaattgttgttagtaatgggggcatggcaacaaataaaggcacaataaatattactgccgatgcatcaactaatgataataatggcaaaacacgaggtgtaaatgttggagctggaggctcttttattaactcggccttcgggagcatcaatgtaggtattgcggaggataaaactgcgactcattcggctgtgggttctgttgcgattgaagtacaaaatggtgcaaacaaagtcgttaatgaaggtactatttttttgggcaggggggctcaggggaactacggaatcctggcaaaggatgccgggagtgttgatgtggtaaataaagggactatcactattgacggttatgacagtgatgcacctgcactgaatgttggcatgctggcaaataatagctccgggatgaaaaactccgggattatcaatgttaatggtctgaacagtaccgggctacaggtaatcaatgcagggcaattaaattctgacggtacgataaatgttggcggcgagggtatcagtagtggtttccgtaactatggtgcctgggtggaaggtgccagaagcaatgttaatgtatccggaaaaatcaatctttccggtactggtgctgtgggggtttttgccaaagatggcgggagtcttaccttgtcaggcaatggtgcagtgctatttggcagcagcgatcagataggcttttatgtctatggaaaggactctgccattcataatacaggaagcggtgttatggatgtgtccactgaaaactcaacattattccgtattgccagcggtgcgacattccagggaactgcagatgcttcttctgcacttacggcgtctggtaagaactcttatgcacttattgccacggggaaatcggatggcggtgtggcctcgacagtaacgtctggaggaatgaccatcaacctgacgggggagggggctacagcgactttaattgaagggggagcgcagggcacaattgaaagtaatgccattatcaatatggataatgccagtgcaatagccggtattgcggatggcaatggctatgatatttccggcaaactcattaatccgaaggacaagaccacactattaacggcgggggctcagttaagttccacccaggataaagtgaccgggtatatcgcccgtaatggggccactctaaataataccggtaatatcatctttactggaaagaatacagtgggcgtccgggttgaggagggtgctgttggtaccaacagcggaaatattacagttcaggatggtggtgtgggactaattgctaatgccacacaagatgttacaacgattaataactcgggaaatctcgttctcaaggggggagataacgctaaccgtacaacgggtataaaagcatctggtacaacaacaacggttaatatgaccgcgggtactatatctttgcagggacagggggcgattggcgttgaggccagcaataaagggactgttaaccttgatggctcggcagtaccgaactttgcttctgacggctctggtattaccgatcagattgcttttcgtattatcggagatggtgcaaccattaagacgaatattgcaccgggaactctgctggatgccagtggggaacgttctgtacttttccgtattgaagatggggcaaaacaggccggctctttgctgatgaaaacctccgggacaggcagccgtggtatctgggccacagggaaagggagcaatgtcctggctgaggctggcagtgatttccagatcctgggcgctcaggctcagggattatatgtaactggtggtgcgacagcgacgctgaaacagggggcatcagttaaccttgtaggggatggcgctgttgtcgcggaagttgacggaaatgaatacgctctggatggcagtattacacaaacgaatactggctcggttattaccaatgaggcagatatctcttcgccgctgaataatgccaagggctttattacgcgtaatcagggactgttgattaacagcggcaacattgatttcactgccggtaccgataatatcggcgtctgggttgataacggccgctttgaaaatacaggaagccgtattgcggtcaatggtgttgctttatttgttgaaggcgcacagtctcagattaccagcacgggaggggattga

SEQ ID NO: 17658 - DNA, 792 bp, Escherichia coli
gtggaggttgccgggcaacggtgcaaagttaactttgcggttaatacgctggggttctcccgccgcttccatgtcttcgccgcaccaaaacaggatgctgagcatacctacgaatcactggttcgcgccttccgctacttcggtggttgtgtgaaaacggtgctggttgataaccagaaggctgcggtgctgaagaataacaacgggaaagtcgtgttcaactccggattcctgttgctggccgaccactataacttcctgccacgggcatgccgtccacgcagggccagaacaaaaggtaaggttgagcggatggtgaaatacctcaaggagaacttcttcgttcggtaccgcaggttcgacagcttcactcatgttaatcaacaactggagcaatggatagccgatgtggctgacaaacgggaacttcgccagttcaaagaaacgccggaacagcgcttcgcgctggagcaggaacatctgcagccgttaccggatacggacttcgataccagttacttcgacatccgccatgtgtcccgggacagctatatcgaggttggtggtaatcgttacagcgttcccgaagcgctgtgtggtcagccggtatcgatacgaatatcgctggatgacgagttgcggatctacagtaatgagaaactggtggcctcacatcgcctctgttcggcatcgtctggctggcagacagtgccggagcatcacgccccgctctggcagcaggtcagtcaggtggaacatcgaccactgagtgcctatgaggagctgttgtga

SEQ ID NO: 17659 - DNA, 1224 bp, Escherichia coli
atgatcaaagagactgttacgatgagtcataaggaactccaccgacttcagattattcaggaacaagctgcggcacgcattggcatttctattcggcaggttaaacgtctggtgcaacggtatagaaatgaagggccttctggtctggtttcccaccgacgtggaaagcgtcctaataattccttttctactgaattcagagcaacagtaatttcactcctcaaaggccgttacgctgattttggacctacgtttgcgtgcgaaaaattgcgcgagatacacggtttatctttatccgttgaaactctcagaaagtggatgatagaagaggggttatggcgtgaacgccgtcgtaaaattgcccgtatatatcaacgccgcatgcgacgaccatcttacggtgaactgatccagattgatggctcacctcatgactggtttgaaaatcgaggccccagatgtacactgatcgttttcattgatgatgccaccagtgcgttgatggcgttgcgttttgtgcctgctgaaacaacccgggcttacatggaaaccctccggggttaccttaatgatcatggcgtaccgctcgctctctactctgatagacacagtatattcagggtaaataacccagagcgggaaggtgagctgacccagttcactcgtgcgataaagacactgggcatcgagccaatccatgccaacagcccgcaggcaaaagggcgggtagagcgcgccaatcagacactacaggacaggctggtcaaagaaatgcggcttcagaatatcagtgatattgaaacagcaaatgcatggttgccgacctttattgaagcctataacaaccggttcgctacgtcgcctcgtactactgataatgctcatcttgatgtgcaccattctgaagaggaactgggttatatcttcagcctacaggcgaagcgcgttctgtctaaaaatctcactttccagtacaaaagcagtgcgtttcaggtacgcagtgagggtcggggatatcgacttaggcattcggttgttactgtatgcgagaactttgacggtgaaattaacgttctgtatgacgggaaagcgctgggctgggaaaagtatgttgatggcccggagcctataccactggatgatgaaaagagtgtccatgaacgagtggataatgcccgtattgatttacgctcaaaatactatgttaaacctaaagctgactga

SEQ ID NO: 17660 - DNA, 183 bp, Escherichia coli
atgttaactggggcttttctctatctgccgttggtgtccatgcccgaggcagatagcctcaagcacccgcagtcattctacttaactaagatttccccgcaaaccgtttttgtccagcacagtaaatatccaactaaaccaatggagttcgctgtatttaccgccagtattcaatgcacatga

SEQ ID NO: 17661 - DNA, 180 bp, Escherichia coli
atgaaaaacgcattgcagtttttgtttgttgcgttctggttgttcgcatcatgtatgcccatcatcttcacagcaaggtatatggaaaaagttgatgttttgatattaatatttggatatataaatgccctttttttaggggtgttcatggcggtcatgtgcattgaatactggcggtaa

SEQ ID NO: 17662 - DNA, 228 bp, Escherichia coli
atggcgtgcagtgcattgattgaatcaggtttgtggtcccgcgatgctgtggaacgtcagatgagccatcaggagcgtaatggtgtacgtgctgcgtatatccataaagcagaacatctggaagaacggcgactgatgttgcaatggtgggccgattttctggatgcgaaccgggagaagggtatcagtccgtttgaatatgcaaagattaacaatccattaaaatag

SEQ ID NO: 17663 - DNA, 3516 bp, Escherichia coli; identical to SEQ ID NO: 4891

SEQ ID NO: 17664 - DNA, 219 bp, Escherichia coli
atgcagaaacgagaacccgtcatcatcgcgccagactataccgatgatgaactttatgagtggatgcgccagaaaattaatgcagcgcaggatctgaaatgggccaatgaagccaaggctaagcaggctgaaaatctgtccgctctggagcaggatatcaccaggctggaaaaagcagcggcattaagcattgccagaatgattacataccagcgttaa

SEQ ID NO: 17665 - DNA, 180 bp, Escherichia coli
atgcggcccagaatccaattaccccccatatggatttaccataacgtcgcattacgcgcaccgctaaaacgcgctgaacgcgattctgccgcgaacaccgcaaaaagagatgttttttcccggggtaaaccggaaaaacgcgtcaggatcgctttcagctcactgcatagctatgcatga

SEQ ID NO: 17666 - DNA, 1089 bp, Escherichia coli
atgactcaaaaagagtttgcagacgcccttggtctttcaaaatatggagacagaaccataagaagatgggagcgcggggaaacaaaacctactggggcggaactaaaagcagttatagactttccagacacaccaccttacccaaacaacgagaatggcagatatcgcatgatcgatttatttgctggaatcggtggaaccagacttggatttcatcaaactaacgctgtaaatgttgttttttccagcgaatgggataagtttgctcaaaagacatatcatgcaaattatggtgatttccctgatggggacataacaaaaatcgatgaaaaagatattcctgatcatgaaattcttgtcggtgggtttccttgtgtagcattctctcaagcaggcctcaaaaaaggatttaatgatacaagaggaactttgttttttgatatagcaaggataataaaggaaaaaaaacctcatgcttttttacttgaaaatgtaaaaaacttgctaggacatgataaaggtagaactttttcaataataaaaaacacacttgaagaattgaattacactgtgtattacaatatcttcgctgcaaaagactttggtgttccacaaaatagagagcgcatatacattgtaggctttaataaagaaaaagtaagaaatcatgaacattttacttttccaaccccattaaaaacaaaaacaagagttggagatattcttgaaaagagcgtagacaataaatatacgctatcagatgcgctctggaatggacaccaacgcaggaaatttgtaaatgcagcagccggtaaaggctttgggtatggtttatttaatgaaaatagcccatatactaataccataagtgcgaggtactataaagatggtagcgaaatattaatagagcaaaaaggaagtaacccaagaaaaataactccgcgggaagcgtcaagacttcaagggtttcctagtgattttattatccctgtatcggatacacaggcttataagcaatttgggaattcagtcgcagtccctgttatcaatgcaatagcagaaaaaatcatatcgaccttagattcataa

SEQ ID NO: 17667 - DNA, 918 bp, Escherichia coli
atgcaaagattaagtcctggtgaatttaaaactctaatttctaaagagagaaaatcgcattttattacgccatttgctttggtttataaaacattttgtgatttagggtatgatcaaaaaaatagtgattattttttgaataatccaagtgaatatataattgcaatgagaaaaaactgttggaaagaatttgaaccatttgaaaaagaattcacaacaagaatgttatcatatcttattgatgaagaaagaataaaagatatgagtccttatgatgccattcgtgattttacgatggaataccctacacacatatatgatttggcactgtctaacactcaatccagacgtagcagggcaggaaaagagtttgagtctattcttgagctattaatgatgggggcaggaattcctgttgatgtgcagggggctattgggaagtcattttttcaaaaaaaccaaataggtaaacttgtagatcttgttatgccaggtgtagtccagtacacatctaacaaaagaaatacaatgttgatttccgctaaaacaacgctgagggagcgatggcaagaagtacctgaagaggttaatagaacaggaattagagaaatgtatctagctacactagatgattcttttagcgaggagacaataaatatattgtacgaggctaatgtggtcgttgtaacgacgatagaaaataaaaatttcaaatataaaaataataatagggtgctaacctttgaagatatgcttcagtcagcaatggaattatcaagaaagtggaataatgtaagttacacagactctgaaaaagaggaaattcaacggtcaatattaaaacaaatagaaaaatatagtgatttcccttatgttgttaattattatagaaataggcttagtgctctttttgactaa

SEQ ID NO: 17668 - DNA, 339 bp, Escherichia coli
atgaatatttcaataaaaaacaatgacttaaaaactattgctcggtttgacggtaaaaccttaagagatgccttttcgagaaaaatagcgacttttgatggcaagattttaagggatgctagcttaaaaaaaatagcgacttttgatggcaaggttttaagggatgcctctttaaaaaaagtggcgacttttgatggcaaggttttaagggatgcctctttaaaaaaagtagcaacctttgacggtcagaatttaagagatgctagttcaaaaattatcctgagtgccgatgctgaggttgggattgttgttatggcctttgtagctgagttgatttga

SEQ ID NO: 17669 - DNA, 183 bp, Escherichia coli
atgtttattatcaacatcaacattaacgtaaccaagagctcttcatcttgttctggagacggtcagatgaagaaaaaaagagaggttggctctctggaggcactgaaaaaaacacagtttttgttttctatgtgcttgattatgtttaaagtaatagattacgtatcgaaactttttaactaa

SEQ ID NO: 17670 - DNA, 1140 bp, Escherichia coli
atgaataaacccaggtttaatggaactcctgttgcatctttggattctttatctgcgatgttaggcatagaaagaaaaagattggactggatagtcaagtctgtatcgatgtcgtacaagcagtttaaggttgaaacagggaagaataaaaaagaaaggcaaatttttgaacccaagagatctttgaaaggaattcaaaaaaaaataaataaagaaatttttgagaaaattgattaccctcattatttgcatggggcgttaagtggtcgcgattatatatctaatgccgctgttcatactaggaaaagaacagttatatgtcttgatatcaccaatttttatcccagcattagtaaaaaagatgtttgttctatttttaaaaatttaatgcgtttttctcctgaggtttctttgtgcttaacggaacttgtgacgttgaataataaggttcctcagggtgggtgctgttctagttatattgcaaatcttttattttttaatagtgagtataatctctataatagattgaagtctatggggctttcatattcaaggcttttagatgatattactatatcctctgataaggatctttcatcagaggaaaaaacaaaagtaataaaactcgttcacggaatggtgaatcagtacagactttcaataaatgaaagtaagacaacgatagagcactcaaaagattcgtcttctaaacttagtgtcactgggttgtgggtaaagcatggcgttcctaagttaacaaaagaaaatagacgttatatcaggtacttagtttatatatgtaaaaaacaaggtgcttatgaacgtcatacgaaagagtaccatgatttatggaatagatgctctggcaaggttgctcaaatgtcgaggcttgggcatgtccaggcggttgaattgagggcgattctttctgagataatgccagtttatgatgattacaagatatctaaattaaagttgatggctaagcattatctaaataaatttacgccgcctttaactgatgagcagataaggaaaatagataggatgctctatgattttgatatagtagggcggactaataagaatcttgcaaaactatatagacgtaagcttgtggcattacttccagataggtga

SEQ ID NO: 17671 - DNA, 204 bp, Escherichia coli
atggaaaatggatttgttaatttttatgaccatgttaaagggtatggctttataaggcgtgagcgtggacgtgatgttttctttcggtatgatgattttttgtttttagggcatgatgtcgatatatgtaaaggtattttagttaggtttaaattagaaaaaacagataaagggtttaaagctgtagcgattcaaaaggtataa

SEQ ID NO: 17672 - DNA, 681 bp, Escherichia coli
atggcaacgacgaacgcattcagtctggcgtcaccgccactggcacgcatccgcctttacggggatttacaacgatttggccgccgcctcagcctgtatgtgaacacggcagcggaagccattcgcgccctgtcgatgcagatgccgggctttcgccgtcagatgaacgaaggctggtaccagatacgtattgccggtgatgacacggcaccggaggcggtgtacgcccgtcttcacgaacagctgggtgagggaacggtcatccacattgtgccgcgactggccggggccggaaagggtggactgcagattgtgctgggggcggcagccatcgtgggctctttcttcacggccggtgcctcgatggtgttatggggtacagccctgagtgccggcggtttttctgccaccacgatgctgttttcactgggggccagcatgatactgggcggtgtggcccagatgctggccccgaaggcaaaaacaccggattaccgcgcaacggataacggcagacagaacacgtacttttcctcgctggataacatgattgcccaggggaacccgatgccggtgccttacggggaaatgctggttggctcccgccgtatatccctggacatcagcacccgtgatgaaggcgggggcggaaaggtcgtggttatcgggcggcaggggtaa

SEQ ID NO: 17673 - DNA, 528 bp, Escherichia coli
atgaaccgtaaaagtcttgctgctattgcaatggtgctggcaacatcatgtggatatgccgccacaataaaagtccccatgaaccttgttaatgccgatggtaaagaggtgagcgccggaacaataactatccaggagaccagctatggtctcctgttcacaccagatctgcactctttacctcagggcattcatggatttcatgtgcacgaaaagggaagttgcgcgccggctctgaaagatggagtatctgttgcggcattagcagctggcggtcactttgacccgaaacagactggaaaacatcttggtccctggtctccggatggtcacctgggcgatctcccggctctgtacgtgactcatgacggaaaagcaaactatccggttctcgcaccaaaactgaaagaattaacagaaataagcggacggtctcttatgatccacattggcggtgacaactatcatgaccatccagatccactcggcggcggcggtgcaagaatgggctgtggtatcatcccataa

SEQ ID NO: 17674 - DNA, 366 bp, Escherichia coli
atggtggatggcaaacctgtcgttccgggcatgaagttgtcgaaggaaaaatgcgaccaggttaacgccattgagcgtgataaagcgctggcgtgggtggagaaaaacatcagagtgccgctgaccgaaccccagaaagcggggatcgcgtcattctgtccgtacaacattggtcccggtaagtgtttcccgtcgacgttttacagacgaattaatgcaggtgatcgaaaaggtgcctgcgaagcgattcgctggtggattaaggacggtggcagagactgccgtattcgctcaaataactgttacggtcaggtatcccgtcgtgaccaggagagcgcgctggcgtgctggggtatcgacagataa

SEQ ID NO: 17675 - DNA, 330 bp, Escherichia coli
atgaaaacctttcgctggaaagtgaaaccggatatggaggtgaactcgcagccatcggtgcgtgaagtgcgttttggtgacgggtactcacagcgtatggcggcagggctgaatgctgacctgaaaacatacagggtgacgctttccgtgacccgggaggaggcccggcatctggaagcgtttctggcagagcacggtggctggaaggcatttttgtggaagccaccctatgcataccggcagataaaggtgacctgtgccgggtggtctgcgcgggtcgggatgttgcgcgttgagttcagcgcggagtttaagcaggtggtgaactga

SEQ ID NO: 17676 - DNA, 141 bp, Escherichia coli; identical to SEQ ID NO: 7044

SEQ ID NO: 17677 - DNA, 309 bp, Escherichia coli
atgcagatgcgtcagcgtgatgttgctgcgctcgatgcaaaatacacgaaggagttagctgatgcgaaagctgaaaatgaaactcttcgcgctgacgttgccgctggtcgtaagcgcctgcgtatcaacgccacctgtccaggtcccgtgcgtgaagccaccggcaccgcccgcgtggataatgcaaccggcccccaactggcagacaccgttacacgggattatttcaccctcagagagcggctgatgacgatgcagaagcaactggaaggggcgcaggaatatatccgtactcagtgcctgaaataa

SEQ ID NO: 17678 - DNA, 132 bp, Escherichia coli
atgaaccgcgtactgtgcgtggtcatcattgccctgctggtggcctgtggtgcgcttagtctggggctgaatcattaccgtgaaacgccattacctacaaagcccagcgcgacaaaaatgtcagagaactga

SEQ ID NO: 17679 - DNA, 330 bp, Escherichia coli; identical to SEQ ID NO: 15901

SEQ ID NO: 17680 - DNA, 174 bp, Escherichia coli
atgttccaggaattgccagtgaaattttgcgcgggcgcgacgttcatcaccggcttcaatggcagtggccaccgcaacagcgctatcttcttttatggcctgttcgtcaggaatagcagcgcaaataaagaccttactcattttgttttaacctcattacagatttcagggtga

SEQ ID NO: 17681 - DNA, 807 bp, Escherichia coli
atgcgctaccggaatagccgtcaggtcacgggagttgtgaaaaatgtcactgtcagccagtcctgcggtaagtggtacatcagtattcagacagaaagtgaagtatcaactccggttcacccttcagcatcaatggtcgggctggatgctggcgtggctaaactcgccacgctgtcagatggcacagtctttgagcctgtaaacagttttcagaaaaaacagaagacgctggcgagacttcagcgacagttaagccgcaaggtcgaattcagcaataactggcagaagcagaaacgcaaaatacagcgactgcattcccgtatcgcaaatatccgcagggactaccttcacaaagtcacaacgaccgtcagcaaaaaccacgcaatgatagtcattgaggatttgaaggtcagcaacatgtcaaagtcagcagcgggtacggtcagccagccgggacgcaatgtccgggcaaaatcaggtttaaaccgttcggtactggatcagggctggtatgaaatgcgccgccagcttgagtacaagcagctctggcgtggcggtcaggtgcttgctgttccgccagcgtacacaagccagcgttgcgcgtgctgtggtcatacagcgaaagaaaatcgcctgtcacaaagtaaattcagatgccagatatgtggatatacagcgaacgccgatgtaaacggcgctcgtaacattttagcggcggggcacgccgttcttgcctgtggagggatggtgcagtcaggccgcccgttgaagcaggaacccaccgaaatgattcaggcgacagcctga

SEQ ID NO: 17682 - DNA, 189 bp, Escherichia coli
atgaggcgcttcgcaggcgcatgtcgtttcgttttcaatcgtgctctggcacgtcagaatgagaatcatgaggccggtaataaatacatcccttacgggaaaatggcttcctggctggttgagtggaaaactcaccggaaatgcagtggcttaaagatgctccgtcacagccattgcaacagtcactga

SEQ ID NO: 17683 - DNA, 1329 bp, Escherichia coli
atgattggggccatttttgttttattagtggcctggttattcctgtcacaatggattcgcattaccgtttttgtggttgccattctgctatggctgaacgtacttaccctggcgggaccaagtttctccttgtggccagccggtcaaccaacgaccactgtaacaacgacgggtggtaacgcagcggcaaccgttgcggcgacgggtggcgcaccggtagtgggtgatatgcccgcacaaactgcaccgccaacaacggcgaaccttaacgcctggctgaataatttctataacgcggaggcgaaacgtaaatcaatcttcccgtcttcgctgcccgctgatgctcagccatttgaactactggtgattaatatctgttcgctttcctggtcggatatagaagccgccgggttgatgtcgcatccgctgtggtcgcatttcgatattgagttcaagaactttaactccgccacctcctacagtggcccggcagcgatccgtttactgcgcgccagctgcgggcagacttcgcacactaatctgtatcaaccggcaaataacgactgctatctgtttgataacctgtcgaaactgggctttacccagcacctgatgatgggacataacggccagttcggcggttttttgaaagaagttcgcgaaaatggcggcatgcagaccgaattgatggatcaaacaaatctgccggttattttgctgggctttgatggttcgccggtttatgacgataccgccgtgcttaaccgctggctggacgttaccgaaaaagataaaaacagccgtagtgccacgttctacaacacgcttccactgcatgacggcaaccattatccgggcgtcagcaaaacagcggattacaaagcgcgagcgcagaaattctttgatgagctggacgccttctttactgaactggagaaatcgggtcgtaaagtgatggtggtagtggtaccggaacacggcggcgcgctgaagggcgacagaatgcaggtatctggcctacgtgatatccctagcccgtctatcacagacgtccccgttggtgtgaaattcttcggcatgaaggcaccacatcagggggcaccgattgtcatcgaccaaccgagcagcttcctggctatctccgatctggtggttcgcgttcttgatggcaagattttctccgaagacaatgttgactggaaaaaactcaccagtgggttgccacaaacagcaccggtctccgagaactcaaatgcagtagttattcaataccaggataaaccgtacgttcgcctgaacggcggcgactgggtgccttacccgcaataa

SEQ ID NO: 17684 - DNA, 819 bp, Escherichia coli
atgtgtcaggtatttggtgtatccaggagcggttattacaactgggtacagcatgaaccctcagacagaaaacaaagtgatgagcggctaaaactggagattaaggtggcacatatccgcactcgcgaaacatatggaacccggcggctccagacggagctggcagagaatggcatcatcgttggtcgtgaccgactggcacgtcttcgtaaggagctaaggctacgctgtaagcagaaacgcaagttcagagcgactacgaacccgaaccacaatctgccagttgcgccaaatctgctgaaccagacgttcactcctacagcaccaaatcaggtctgggtggcggacctgacgtatgttgccacacaggagggatggttgtacctcgctggcatcaaagatgtttatacgtgcgaaattgtcggctacgccatgggagagcgcatgacaaaagagctgacaggtaaagccctgtttatggcgctcaggagccagcgcccacctgccgggctaatccaccactctgatcgaggttcacagtactgcgcatacgattaccgggtcatacaggagcagtttggtctgaaaacatcaatgtcgcgtaaaggtaactgttacgacaacgctccgatggaaagcttctggggaacgctgaaaaatgagagcctgagccactatcgttttaataaccgggatgaagccatctcagtaatacgggaatacattgagattttctacaatcgtcagcgtcgtcactctcgtctggggaatatctccccggcagccttcagggaaaaatatcatcagatggctgcttaa

SEQ ID NO: 17685 - DNA, 798 bp, Escherichia coli
ttgccagtacacctcatctcgctcggtggtcgcaccattgttgatgccacagggtctgagtctatcggacgagatgcgcaggcattacgagaagtcgcattaaaaacaggtctgaatattgttgcttcctccggtccctacctggaaaaatttgaaagccagagaattcataaaacggttgatgaactggcggcaacgatcgataaagaattgaatcaagggattggcgatacggatattcgtgccggaatgatcggtgaaataggtgtctcaccgacatttaccgaagccgagcataacagcttgcgggctgcctcgctggcacagattaacaatcctcatgtggcgatgaatattcacatgccgggctggcttcgtcgcggtgatgaagtactcgacattgtgttaggtgaaatgggcgtctcgccaaataaagtctctctcgcacactcggatccgtcaggaaaagacgtggcgtatcagcggaaaatgcttgataagggtgtctggctggaattcgacatgattggcctagacattaccttcccgaaagagggaatagcgccaggggtgcaggagactgccgatgccgtcgctcatctcattgagttgggatacgccgatcagcttgttctcagccacgatgtcttccttaaacaaatgtgggctaaaaatggcggtaatggctggggatttgttccagatgtttttctggcctatctggcggagcgcggcgtcgataaaacgatcctcaaaaaactctgtatcgataatcccggacgattattgaccgcataa

SEQ ID NO: 17686 - DNA, 273 bp, Escherichia coli; identical to SEQ ID NO: 7046

SEQ ID NO: 17687 - DNA, 345 bp, Escherichia coli
atgactcaaaactatgaactgattgtgaaagggatccgcaattttgagaataaagttacggtaactttagcgttacgggacaaaaaacgctttgacggtgaaatttttgacctggacatctcgctggaccgtgttgaaggtgccgcgctggagttttatgaggcagcagccagaaggagcatcagacaggtcttcctggatgttgctgccgggttatgtgaaggggatgagcagtcgccggaaaagcgccccgtaattttagaggcgcaggatgtgttgataacctacagaggaaaactaccgggaataattacgggttctctgaagagtccgccgaaatggtaa

SEQ ID NO: 17688 - DNA, 663 bp, Escherichia coli
atggacttcctggagcatctgcttcatgaagaaaaactggcacgtcatcaacgtaaacaggcgatgtatacccgaatggcagccttcccggcggtgaaaacgttcgaagagtatgacttcacattcgccaccggagcaccgcagaagcaactccagtcgttacgctcactcagcttcatagaacgtaatgaaaatatcgtattactggggccatcaggtgtggggaaaacccatctggcaatagcgatgggctatgaagcagtccgtgcaggtatcaaagttcgcttcacaacagcagcagatctgttacttcagttatctacggcacaacgtcagggccgttataaaacgacgcttcagcgtggagtaatggccccccgcctgctcatcattgatgaaataggctatctgccgttcagtcaggaagaagcaaagctgttcttccaggtcatcgctaaacgttacgaaaagagcgcaatgatcctgacatccaatctgccgttcgggcagtgggatcaaacgttcgccggtgatgcagcactgacctcagcgatgctggaccgtatcttacaccactcacatgtcgttcaaatcaaaggagaaagctatcgactcagacagaaacgaaaggccggggttatagcagaagctaatcctgagtaa

SEQ ID NO: 17689 - DNA, 648 bp, Escherichia coli
atgtcatgccggaggcattgcgtcgttttgaggaaatggtggaagaagcggcacgcaacgccgaagccgcctctcagagcgcagcggcggcaaagaaatccgaaactgcagcggcatcatcgaagaacgcggcgaaaacctcagaaacgaatgcagctaatagtgcacaggcggcagcgacctcacagactgcatcagaaaactccgcgacagcagccaaaaaatcagaaaccaacgcgaaaaatagcgagacagccgcaaagacgagtgaaactaacgcaaagtccagccagacggcagcgaagaccagcgaaacgaatgccaaagccagtgaaactgcggcaaaaaacagccaggttgcagcagcccaaagcgagagtgccgcagctggttctgcaagtgcggcggcttcttctgcctctgcatcagccaacagtcaaaaagctgcaaaaaccagtgaaaccaacgcaaaggcgagcgagactgcggcggctaactcagcgaaagcatcggcagcaagccagacggctgcaaaagcaagtgaagacgcagccagagagtatgcaagccaggctgcggagccgtataaacaagttttgcagccgcttcccgatgtgtggataccgtttaacgattcactggatatga

SEQ ID NO: 17690 - DNA, 555 bp, Escherichia coli
atgctgaccggggaggtcgaacaaaaagttaccgcagacatgatgattgagtttatcggtcaggatggggctaaaacgtgtgaggaactggcgggtaagttcggtgtcagtactcgcaaggttgcttccacgctggcggtggtaaccgcaacggggcggctggcacgcgttaatcagaacggtaaatttcgttactgcatgccgggcgataatttaccagcagagccgaaagccgcgctggtaacggaaagtgatggtaaggcctttcctcagccagcaggtgctgcgttaccagtccgggaagccgcaacacaggaagaaattaaaacagaaactgtggcggacattgtgcagccgttgccatcgtttaccgaaacgcaagcagatgagctgatttttccgtcccttcgcagggcaaacctggcgctgcgcagggcgaaaagtgatgttcagaagtgggagcgagtctgcgccgcgctgcgggagctgaacaagcaccgggatattgttcgacagattactgattcttcccgccgtgttgtatcggaaaagtga

SEQ ID NO: 17691 - DNA, 222 bp, Escherichia coli
atgaagaatgaaatactggaatttctgaacaggcataatggagggaaaaccgcagaaattgcggaggcgctggcggtaacggattatcaggcacgctattacctgttattactggaaaaagaaggtgtggttcagcgctctccattaaggcgaggcatggcaacatactggcttctgaaaggagagaagcaggcggggcagagctgttcttccacaacttaa

SEQ ID NO: 17692 - DNA, 171 bp, Escherichia coli
gtgctgaccggaagtgatgacggtcgccacagcaatacctctctggcatggggggctggcgtgcagtttaacccgaccgaatccgtggccattgatattgcttatgaaggttccggcagtggcgactggcgcactgacggtttcatcgtgggtgtcggttataaattctga

SEQ ID NO: 17693 - DNA, 189 bp, Escherichia coli
atggaaacgttattaccaaacgttaatacgtctgaaggttgttttgatattggtgttctgctcagtaaccgggagtttacggaagatgccattaagatgagaaaatatgaaccttatcttctcaatgataattccatactttccagaattgcccttcttgaacttggtattatcggagaacagcagtga

SEQ ID NO: 17694 - DNA, 174 bp, Escherichia coli
atgccagcgggtatcgctgtagtgcgttttttgctcatcctcagcattggcataactgaaggacgtaatcagccccagcgcgtccgtaaactcataacggtatttcacgttaatcccgttcagattatcgctgcctggcatatcagtgtgggtctgaagatacccggcgcttag

SEQ ID NO: 17695 - DNA, 708 bp, Escherichia coli
atgtccctgaaactggctttcgaagcctttcgggtcttcatcagaaccgaacgcctgtcagtccgcgccgggacctttctggttcatatggcatgggtattctttgtcgcaatgttgctctggtgtggcggctttttcagccaggcatgcgcagcacaacctccgcaggctgcgctgcagtatcgcgatgatgtgatccgtaatgcccggcttgaatggggactgtctgcgccggtggccgatttcgccgcgcaactgcatcaggaaagcggctggcgacctgatgcgatctcgccggctggcgctcagggactggcgcagttcatgcctgccactgccgactggataagccagttgataccgatgctgagcagtcgtgagccgtttaatccggcatgggctatccgggcgctggtcagctatgaccgctggctgtggcagcgtgtcagcgccgccagtgactgcgagcgtatggccatgacactgtcgggctataacggtggtctgggctgggtacaacgggacaggcggcttgcatcacagaaaggtctggacagcacccgctggttcggacatgtcgccacggtgaatgccggacgcaatgcggccagctggcgggagaaccgccattatccgcagcgcatcctgcgcgaactggcaccgcgatatctcacatggggaggcagcagttgtgtggcatctggttaa

SEQ ID NO: 17696 - DNA, 462 bp, Escherichia coli
atgattatcttcaccttacgccgtattttgttattgattgtgaccttgttcctgctgaccttcgttggcttcagcttgagctatttcaccccacatgcgccgttacaaggcgcgtcactgtggaatgcctgggtgttctggtttaatggcctgatccactgggattttggtgtttccagcattaacggtcaaccgattgccgaacagttaaaagaggtcttcccggcaacgatggaactgtgcatcctcgccttcggttttgcgctgattgttggcatccccgtggggatgattgccgggattacgcgccataagtggcaggataacttgatcaacgccatcgccttactgggcttttcaatcccggtgttctggctggcgcttctgttgacgctgttttgttcactcacgctaggttggttgcccgtttcagggcgtttcgatctctgctctacgaagtga

SEQ ID NO: 17697 - DNA, 1164 bp, Escherichia coli
atggctagagtctctctttcatgggcattgattcttggtcttttagccggtatcggcccgatgtgtaccgatctttatttgccggctttgccggagatgtctgagcaactggcggcaaccacgaccataacgcaattaaccctgaccgcatcactgattggtcttggcgtcggacaactgttatttggccctctgagcgacaaaatagggcgtaaacgtccgttaatcttgtcgttgctattgtttattgtttcttccattttatgcgcgacaacgaacaatatttactggctggtggtctggcgttttattcaagggatcgcgggggcgggtggttcggtgctctctcgttctattgctcgtgacaaatatcagggagtaacgttgacccagttttttgcgctgttaatgacggtgaatggcctggcaccggtgttgtcgccagtgctgggcgggtacattgttagcacttttgactggcgcactttattctgggtaatggctgaaattagcaccgtactgttgctgggctgtctgttatttattcatgagaccttgccagaaaataaaaggggctcatcattgctattaaccggacgaagcgtggtgcagaaccgccgttttatgcgcttttgcctgattcaaagttttatgctggccggtttgtttgcatatatcggctcttcgtcgttcgtgttgcagaaggaatttggctttagtccaatgcaatttagcctggtgtttggccttaacggcaccggacttatcattgcttcatggatcttctcgcgcctggcgcgacggattaacgcgatgacattgttgcgaggtggcctgatagcggcaattttgtgtgcattgctcacggtcttatgcgcatggatacaattgcccattccggcactggtggcattatttttcaccatcgcattttgtagcggcatcggcactgttggcggggcagaggctatgagtgcagtagggacgcaggaatctggaacggcgtctgcgttgatggggatgagcatgtttgtcttcggcggtatagccgcgccattgtcgggaattggcggagaaacactgttaaaaatgagtctggcaattacggtgtgttatacgctggcattgctggttgctctcaccagaatcgacaaccaaaagtaa

SEQ ID NO: 17698 - DNA, 846 bp, Escherichia coli
atgtctgatatcacagcctcccgtccggaagttgtcaacgggcatacggacgttatctgctcaaccagtatccgccacattctggctgtacgaaagagttcactgctgcaaatcgacacacttatccggcaactggctgaaatctcagcaatgacagaaagtattggcggtaaaaccgcactggactgggcgatgaaacaggattttcgctgtggctgctggctcatggagaaacctgaaacggcaatgaaagccatcacacacaatcttgatcgcgaactctggcgtgatctgatgcaacgttccgggatgctgtcattaatggatgcgcaggcccgtgatacatggtaccggtcactggagtacgataattttccggaaatcagtgaagcgaacattctgagcacatttgaacaactgcaccagaataaggatgaggtgtttgagcgaggggtgatcaacgtcttcagagggctgagctggaattacaaaaccaattgcccctgcaaatttagcagtaaaattatcgtcaacaacctggtgaggtgggaccggtgggggtttcatcttatcaccgggcaacaggccgatcgacttgccgacctggaaagaatgctgcatctgttcagcggcaaaccgatccccgacaaccgggaaaacatcactattcgtctggatgatcacattcagtctgttcagggtaaagagagctatgaagatgagatgttcagcatcagatactttaagaagggctccgcgcacatcacgttcagaaaaccggaactggttgatcggctaaatgacatcattgcgaagcattatccggggcaactatcagccatctga

SEQ ID NO: 17699 - DNA, 489 bp, Escherichia coli
atgaaactggccctgacgctggaagccgacagcattaacgtgcaggcactgaacatggggcgcattgtcgttgacgtcgatggtgttaatcttgctgaactgattaacgtggcctgcgacaatggctactcccttcgtgttgttgatgaatctgaccggaccgcaactgacagcatgcccccctccgctgccctgagcggtatacgctgcagcaccgcacatatcacggaaacagacaacgcctggttgtactcgctgtcacaccagaccagtgacttcggcgaatcagaatggattcattttaccggtagcggatatctgttacgtaccgatgcgtggtcatacccggttctgcaacttaaacgtctgggcctgtcaaaaacattccgtcgtctggttgtcacactcatccggcgttatggcgtcagtctcattcacctggatgccagcgctgaatgcctgccgggtttacccaccttcaactggtaa

SEQ ID NO: 17700 - DNA, 1929 bp, Escherichia coli
gtggccctggttatttgcctgatcaccttctttgttgtctcctggattctggggcatcaggggaaacagcagagtgaaaatgaggtgaccggcgggcgtcagctgacggataacccgaaagaagtggcccggatgctgaaaaaagacggcaaggactccgatatccggattggcgacctgccgattatccgggattccgaaatccagaacttctgtctgcacggcacggtcggggccggtaagtcggaggttatccgtcgtctggccaactacgcccgtcagcgcggtgatatggtggtgatttatgaccgttcaggggaatttgttaaaagttactatgatccctccatcgataaaatcctgaatccgctggatgcccgctgtgccgcatgggatttgtggaaggagtgcctgacacagccggattttgataataccgcgaacacgctgatccctatgggtacaaaagaggacccgttctggcagggttcaggacgtaccatttttgcggaagcggcgtacctgatgcgtaatgaccccaaccgcagctacagcaaactggtggacacactgctttccatcaaaattgaaaaactgcgtaccttcctgcgtaattcaccggcagccaacctggtggaagagaaaattgagaaaacggcgatttccatccgtgctgtgctgaccaactacgtgaaagccatccgttacctgcaggggattgagcataacggtgagtcttttaccatccgtgactggatgcgtggtgtccgggaagatcagaaaaacggctggctgtttatttcgtcgaacgccgacacccatgcctccctgaagccggtgatctccatgtggctgtccattgccattcgtggtctgctggcaatgggagaaaaccgtaaccgtcgtgtgtggtttttctgtgacgagttacccacgttacacaaactgccggacctggtggagatcctgccggaagcccgtaagttcggtggctgttatgtgtttggtatccagtcctatgcccagctggaagatatctacggtgagaaagcggcggccacgctgtttgacgtcatgaacacccgtgcctttttccgttctcccagccataagattgcagagttcgctgccggtgaaattggtgagaaagagcacctgaaagccagcgagcagtattcctacggtgctgacccggtacgtgacggggtatcgaccggtaaggatatggagcgtcagacgctggtcagttattccgacattcagtctctgccggatctgacctgctatgtcactctgcccggaccgtatccggcagtcaaactctctctgaaatatcaggcacgaccgaaggtcgctccggagtttattccgcgtgacatcaacccggaaatggagaaccgtctgagtgccgtacttgctgcaagggaagcagaaggtcgccagatggccagcctcttcgaaccggaggttgcctccggagaaggcgtgactcaggctgaacagccacaacagccacaacagccacaacagccacaacagccacaacagccacaacagccacaacagccacaacagccacaacagccacaacagccacaacagccacaacagccacaacagccacaacagccacaacagccacaacagccagtgtcttctgtcatcaatgataagaagtcagatgcaggtgtgagtgttccggcaggggggatcgagcaggagctgaaaatgaaaccggaagaagagatggaacagcaactgccacccgggatcagtgaatccggtgaagtggtggatatggccgcttatgaggcatggcaacaggaaaatcatccggacatccagcagcagatgcagcgtcgtgaagaggtgaacattaatgtgcaccgggagcgtggggaggatgttgagccgggagatgatttctga

SEQ ID NO: 17701 - DNA, 381 bp, Escherichia coli
atgatcaaaattaagtcagctaaaaattggcagatttattactcagcattctggtaccggttgattgacgggaaatatacgcatcttcaggcgaacaccctgacgaattccggtaccgggcgaatctacggcgatgctgttggtgtcagcgctgccacatttaataatctggaagaaaatggcgtggcggcgacgctggccgggcgtgagcgtgtggacttaggggtacagaccctgaataaccggacgcacagcctgatttacagtgcaggtgatatgcatactggtggcatgctggatgcgaatggtgccgccacggggaaagccggtgtactgaataatcacagtgccactattgaagccgccggatattggtggtag

SEQ ID NO: 17702 - DNA, 219 bp, Escherichia coli
atgtcagaagatgttccattaccgaaagtcaatcagcgatacaaagacgatcatggtgcgcttgtcaccgtgaccagtgttgaggaaatctgggtggtgtttatgcgggacggttatccgcattactgtcttatatcactggcgctgacaatatccttccatgaaaatatacttctgataaatgactccggtttagtggcaaccaagtgcaaacactaa

SEQ ID NO: 17703 - DNA, 831 bp, Escherichia coli
gtgctgacctcgaagtatgcagagcacaccccgctgtattgccagtcagaaatatacggccggcaaggtgtggagctgagccgttcactgctgtcgggctgggtggatgcatgctgccggctgctgtctccgctggaagaggcgcttcatggctatgtcatgactgacggcaaactccatgccgatgataccccggtccaggtactgctgccgggtaataagaagacgaagaccgggcggttgtgggcgtatgttcgtgatgaccgcaatgccgggtcagcgttggcacctgcagtgtggttcgcttacagcccggacagaaaaggcatccatccgcagactcatcttgcttgcttcagcggtgtgctgcaagcggatgcgtacgccgggttcaacgagctgtatcgcaatggtgggataacggaagctgcctgctgggctcatgcccgccgaaagatccacgatgtgcacgtccgcatcccgtcagcactgacggaagaagccctagagcagatcggtcagttgtacgccatagaggcagagataaggggaatgccggcagagcagcggcttgctgaacgtcagcgaaaaacgaaaccgctgttgaaatccctggaaagctggttgcgtgaaaagatgaagaccctgttcttcggctctggccatggtggtgagcggggagcgctactgtacagcctgatcgggacgtgcaaactgaatgacgtggatccagaaagctaccttcgccatgtgcctggcgtcatagcagactggccggtcaaccgggtcagcgaactgcttccgtggcgcatagcactgccagctgaataa

SEQ ID NO: 17704 - DNA, 222 bp, Escherichia coli; identical to SEQ ID NO: 6137

SEQ ID NO: 17705 - DNA, 213 bp, Escherichia coli; identical to SEQ ID NO: 5358

SEQ ID NO: 17706 - DNA, 348 bp, Escherichia coli
atgatcccgttaccttccgggacaaagatctggctggtcgctggcatcaccgatatgagaaatggcttcaacggcctggctgcgaaagtacaaacggcgctgaaagacgatcccatgtcaggtcacgtttttatcttccgtgggcgtaatggcagtcaggtaaagctcctctggtccaccggtgacggactgtgcctcctgaccaaacggctggagcgtgggcgcttcgcctggccgtcagcccgtgatggcaaagtgttccttacgcaggcgcagctggcgatgctgctggaaggtatcgactggcgacagcccaagcggctgctgacctccctgaccatgctgtaa

SEQ ID NO: 17707 - DNA, 369 bp, Escherichia coli
gtgtcagacacactttccgggacaacgcatcccgatgacaatgacgaccatccctggtggggactaccctgcacagtgacgccctgtttcggcgcccgtctggtgcaggagggtaaccggttgcattaccttgccgaccgtgccggtatcagaggccggttcagagatgcggatgcgtaccctctggaccaggcctttccgctgctgatgaaacaactgaaattaatgctcaccagtggtgaactgaatccccgccatcagcataccgtcacactgtatgcgaaggggctgacctgtgaagccgacaccctcggctcctgtggttacgtttatctggctgtttatccgacacctgaaacgaaaaagtaa

SEQ ID NO: 17708 - DNA, 213 bp, Escherichia coli; identical to SEQ ID NO: 5358

SEQ ID NO: 17709 - DNA, 387 bp, Escherichia coli
atgaccgccctgaatgctgagacggacgctgttattttcaccgcttacactggtctgatggctgcgggagccagccagtatccggtcatagtccattgtctgtgtcagcatggaggcatacagggggacttcagcacgataagtattttcactgcgcaggtaccagtcttcatcgctgtcacggttcagggtgtagttaaaggcgccggcctgaagcgggcgactcagggcaaacgcaccttcttctgtggtggcgccattctgtgcatccacaacccggataccctgtccggaggttgccaccccaaggttactgtttccgacatttgtaaacgcaagccaggttttgccggttgcctgaccaccattaattaccagctggtctga

SEQ ID NO: 17710 - DNA, 237 bp, Escherichia coli
atggttaaactggctttacaaccaagggattctgttgcctgtattgcccgggagcacgatatcaatgataatcttctgttcaaatggctcaggctctggctgatcaaagggcgtatatcacggcgtcttccggtaacgaactcttctggcattggcgttgaattattacctgtggagatgacgctggatgagcggccttaccccgtttttacgcgaggtaattatgaagatcaatga

SEQ ID NO: 17711 - DNA, 279 bp, Escherichia coli; identical to SEQ ID NO: 14406

SEQ ID NO: 17712 - DNA, 369 bp, Escherichia coli
gtgtcagacacactccccgggacaacgcatcccgacgataacaacgaccgcccctggtgggggctaccctgcaccgtgacgccctgtttcggtgcacgtctggtgcaggagggtaaccggttgcattaccttgcagaccgcgccggtatcagaggccggttcagcgacgcggattcgtaccacctggaccaggcctttccgctgctgatgaaacaactggagctcatgctcaccagcggtgaactcagcccccgccatcagcataccgtgacactgtatgcaaaagggctgacctgcgaagccgacaccctcggcagttgtggctacgtttatatggctgtttatccgacgcccgaaacgaaaaagtaa

SEQ ID NO: 17713 - DNA, 195 bp, Escherichia coli
atgcgtattcaccgtcagcatccggcatcccgtctttttccgttctgtaccggtaaataccgctggcacggcggtgctgaggcgtataccggtcgtgaagtgcaggatattcccggcgttcttgccgtgtttgccgaacgccgtaaggacagttttggtccgtatgtccggctgatgagcgtcaccctgaactga

SEQ ID NO: 17714 - DNA, 540 bp, Escherichia coli; identical to SEQ ID NO: 16163

SEQ ID NO: 17715 - DNA, 339 bp, Escherichia coli; identical to SEQ ID NO: 13019

SEQ ID NO: 17716 - DNA, 408 bp, Escherichia coli
atgacgacgttcctgtcactcagccaggaggtactgttatccctgctcagtttctgcaccgcgtgcagcatccacggcgttcagacccgcgagcatggtcacacgtcacgcagtccgctggactcgctggagagcgctatcggattccacatgcgcgactggtggcagccgacgaaagcaaacttcttcggacacctgcaaaagccgcagattatcgatgccctgaatgatgccggactgtccggtgctgcgcgggacgcggagaaaatgaagaaaggcgatgccgctgaacatgcagagttccacatgaaagacaaccgctgggtgcctggctggatgtgtacaccacgtccacaggcagagacggaaaccacggagtaccgtgacgaccaggcagaagccgcctga

SEQ ID NO: 17717 - DNA, 369 bp, Escherichia coli
atgctggttatctggtccccggaagagattcaggcactggctgacggtatggaaatttctctgaccgatcatgaaatcaggaccgtcctggcgcgcatggaggacatcccggaagaccagcggactgaatccggtatttcttccgccgcggtgatggagattatcagcaacgtgagcgaaaaccgccaggtgaccgtccctgctgaactgctggcgtccctgattcagaccgctgaacaggcactgtggaaacgtgagtgggccgcccgtgataacggcctcgccgtcccggaatgcgttacccgccgtcaggcggtggttaatcaggcccgcaccctgctgaaaaacaacacacacgaaaacaactga

SEQ ID NO: 17718 - DNA, 369 bp, Escherichia coli
atgctggttatctggtccccggaagaaattcaggccctctctgacggaatggatattgccctgaccgatcatgaaatcaggactgtcctggcgcgcctggaggacatcccggaagaccagcggactgaatccggtatttcttccggcgtggcgatggagatcatcaataacgtgagcgaaaaccgccaggtgactgtccctgctgaactgctggcgtccctgattcagaccgctgaacaggcattgtggaaacgtgaatgggccgcccgggatcatggcctcgccgtcccggaatgcgtcacccgccgtcaggcggtggttaatcaggtccgcatcctgctgaaaaacaacacacacgaaaacgactga

SEQ ID NO: 17719 - DNA, 273 bp, Escherichia coli
atggaatcagccagttcgctgacggactccgcagaatacggcaccgtgcgcacattcagtggtgacttaatcagcgaggccagcggcacgctcacttcctccgtctgcgccagcagggcagacaggactgtttcctgcgtttttgcaggtttacggctggatttacgctccgtttttgccttagactctgtaactgacatagttagtacctcccaaaacggtaataatgattgtctgccggacgtgtccccgtccggcacctctcttacttaa

SEQ ID NO: 17720 - DNA, 423 bp, Escherichia coli
atgtactgtactgttaaagaaattatccgcgaagtgctggatacagacgtgccggacagtgaatgcgtttttgccgtggtgctgacccgtggggatgtgcgtcacatagcccaggactggagtctgacagacgatgagctggaaaccgtcatgcagcggctggacgatgcctttgaatatggtgcggatgtcagcgttgttcacggcgttgttcgtgaactgatggaagaaaagcgcgccagccgtcaggtgacagtcccggcggtgatgctggaaaaagtgatggcgctggcaggcagtgaaatgaagcgcctgtatgccgtcgggagtgagaacgggggcgacggtgacgcattcgtcagggaggaacgcgaagcaatggacgttgtgttacaggcgctggacggggagacgatgtcatga

SEQ ID NO: 17721 - DNA, 303 bp, Escherichia coli; identical to SEQ ID NO: 5063

SEQ ID NO: 17722 - DNA, 222 bp, Escherichia coli; identical to SEQ ID NO: 8358

SEQ ID NO: 17723 - DNA, 363 bp, Escherichia coli
atgccacgcgatttctgccgaagaagcgacggagcccagccagtaaaagtggtggtgaatacccgccatgatgcactttatttcagccgttcgccgattccgtatccgcgtaatgctgaaaaagcacgctatctgaaacacgtcggtatttacgcttatcgtcgcgatgtgctgcaaaactacagccagctaccggagtccatgccggagcaggcggaatcactggagcagctacggttaatgaacgcgggaatcaacattcgcacgtttgaggttgctgcaaccggtccgggcgttgacacccctgcatgtcttgcaaaagtacgcgctctgatggcacaggaactggctgaaaacgcatga

SEQ ID NO: 17724 - DNA, 1476 bp, Escherichia coli
atgcttagaaaaataatcaggggtagcggattcactcagtcagaagaaaaactgatagagttcgctgatgatgctttttttggtctttggtcttatcctaatgtttatagcgatgagggttactctaaaaataaaattgggaaagaagttagtgacttattagttatttttgataaagatataataattttttccgataaagctattacatacaataaaaacaaagatcctaaggttgcatggcagagatggtttaaaaaatcagtcatacagtcttgcacacagttatttggcgcagagaagtttataaaagatcatcccgaaagactttttgttgacaaagaatgctcagttaacctccccattaaaatagataattcatttaattttcatttggtggccgtcactaataatatttcagatccggcgatctcgtactttgacaaaatagaaaaaggcagctctgctactttagttaacatatttcctttaaacgcccatcagtgtctagaaaatccattttgtgtcggagacgtttatcctgataagacttttgtccatatacttgatgagactgccctaaaactactgttaaccgagttaaacacagcaactgatttcattggctaccttaacgaaaaagagagggttgtaagagaaagaacattattggtcagcgctggggaagaagagactcttgctgcttacattatgggtgataaaaccataatatcaaaagaaattattggaaacgatcaagggatgaccataccggaaggtgaatggaaaaactataaaaccactttcaattatcaatatcagctctcaatgaaaaagggtagcgttttctgggataacctaatccacaacttctcgacaagtatattgtcagctaacgttggtttttttagtgaaattgaattttctacacatgaattaggtgttagagaattagccaaagaaagtaggcaatctagatattacctttcaaagaactttaaagagaaattaaaaacaactcagcctcatctaagaacgtcaagaatggtcgaatcaatcgatgagcctggaaagttttacttattccttttttttcctaacgatagcaagttgagttactctgattacagaattcaacgtatatcttatataaatgcttatgctgaggttgcctttaataaatacagacatattaaaaaattaattactattgcaacagagccgcaaaatacagaaggaagatctgaagacctaatatatagcatatccccagagaaatttaccaaagagcaaaatgaaaaagccaaaagattatcaagagaatacaaaatactaagtgattttttacctactaaaacgacaaagagcgataactttaaatcagttatatcaaaaggtgaaaaaatagggcggaatacaccttgtccatgtggctccggtgttaaatttaaaaagtgccatggtgcgaataattag

SEQ ID NO: 17725 - DNA, 906 bp, Escherichia coli
atgaagatgggcgaatttccacacagcaccggcgcccggcaagatgggccgattcccacactacagcggcgcccggcaagatgggcggatttccacacggcagcggcgcccggcaagatgggcggatttccacacggcagcggcgcccggcaaggtgggcggattctcacgcggcagcggcgcccggcaagatgggcggatttccacacggcagcggcgcccggcaaggtgggcggattctcacgcggcagcggcgcccggcaaggtgggccgattcccacgcggcagcggcgcccggcaaggtgggccgattcccacgcggcagcggcgcccggcaaggtgggcggatttccacacggcagcctcgcccggcaaggtgggcggattcccacgcggcagcctcgcccggcaaggtgggcggattcccccacggcaccggcgcgcggcaaggtgggccgattcccacacggcaccggcgcccggcaaggtgggccgattcccacacggcaccggcgcgcggcaaggtgggccgattcccacacggcagcggcgcccggcaaggtgggcggattcccacacggcagcggcgcccggcaaggtgggcggattcccacacgacagcggcgcccggcaaggtgggcggattcccacacggcagcggcgcccggcaaggtgggcggatttccacacgacagcggcgcccggcaaggtgggcggattcccacacggcagcggcgcccggcaaggtgggcggattcccacacgacagcggcgcccggcaaggtgggcggattcccacacggcagcggcgcccggcaaggtgggcggatttccacacggcagcggcgcggggccagtgggattcaggagaataggtgttttaccgaatgccctgacgaggcgtaa

SEQ ID NO: 17726 - DNA, 546 bp, Escherichia coli
atgtggtcgaaaatctttaaaagcgaacccccggacgtcacccctccggggccgttctgctgtgctgcgcatcgagccgctacgcgtctcgccccgctcacgcgggcagctgccactgacgcctccggcctgcggcctccgcgctccgcttggcaaccccttcccctgctgccgctcatttccccttcagcctcctatcatgattcgtctcctgcattatccgtggattgtgcagctcagtggggcgctggccgtgacggtgcggtgtcccccgtaaccggccgcgcggcggccgctaactcgcagtacggcgccgcgacccgcaggcgggccgccgtacccgcgcgcaggcgcgcggcgcccactgcgcacccccgtgggggacgtgcggcagctgcgtggcggcgggctgggttatggcttagcagggaggggggttggcctgttgctccggtcagtcccgcagtttccggcgatttgcggccggtgtccggtggagtccggcgcggtcgccttccatgccctgacgggcataaagacaggtaa

SEQ ID NO: 17727 - DNA, 435 bp, Escherichia coli
atgaatccgtctgatgccattgaggcaattgaaaaaccgctctcctccctgccttacccgatttcccgtcacatcctggaacatctgcgcaaactcacccgtcacgaacccgtgcctggcattatgggtaaaagcggggccggtaaatcctcactctgtaatgcactgtttcagggggaggtcaccccggtcagtgcactcatgacagtgcttcccggacatgccgccatccctctgatgacacgcctgcaggacgaactgcgcacggagtctgtccgcactcagacccgtgaacagtttaccggtgcggtggaccggatatttgacacggcggagagtgtctgcattgcctctgttgcacgcacggttctgcgcgccgtccgtgactcggtggtctctgttgcccgcgcggtatggaactggattttcttctga

SEQ ID NO: 17728 - DNA, 369 bp, Escherichia coli; identical to SEQ ID NO: 4841

SEQ ID NO: 17729 - DNA, 378 bp, Escherichia coli; identical to SEQ ID NO: 7637

SEQ ID NO: 17730 - DNA, 2382 bp, Escherichia coli
atgaaaacattaaaaaactggaaactacaaaatcagtcagcccatcatatagagctattagttgatggtcagcattctctttgcctgtatatactcgaagaaaatatgttccgggttctattaaaacggaagggggttttgtcgctggaccgaacctggagcattgctccggaaaaggatgtcccgtgggaagggcgtcatcgcgaagatattagcggtttttcactgccgacctggaacatggagcagaatgatgaattactgacaatcacgaccagttcattacgcgtaattattcacaagcctttatggcttgaatggcattataaggataatgctggtcagtggcaggaacttgttaatgatcgccctaccagtgcttatctgataaacgctcatggtgatggtgttgcacactatcaaagtcgacgtaatgacgagcgtttttatggacttggtgataaatccggggatctgcaacgcacaggaaaacgctatgaaatgcggaacctggacgcaatgggatataatgcagtaagtacagaccctctttataaacatattccatttacaattactcaccgtagcgatattagctttggattattttatgataacctcagcaatagttggctggatttaggtaatgaaatagataattatcatacaacttaccgccgttggcaggctgaggcgggagatattgattattatcttttcactggcagatgtgtacttgatatcaccaaagcctttgttcgtttgacggggaaaacactcttcggtccaaaatggagtcttgggtacagcggttccacgatgcactatacagatgcaccggatgctcagaatcaattgatgcagtttattcgtctttgtaaggaacatgctattccatgtgattctttccagctatcttctggttatacttctattaatggtaaacgctacgtattcaactggaattacgacaaagttccacaccctaaaatgatgagtcaggagtttcataatgcagggatacacctggccgctaatataaaaccatgtttattgcaggatcatcctcgctataacgaagtagcagaacaagagctctttattcgtgactctgaatacaacgtcccggaacgctccagcttctgggatgatgagggttctcatctggactttacgaacccacaaacagtcgcatggtggcaggaaggtgtaaccacacaactacttgaaatgggaattgattccacctggaatgataacaatgagtttgaagtatgggatggggaagcgcgctgtcatggttttggcaaagaaatcgccattaaacacattcggccagtaatgcctcttttaatgtgcagagcatctatggaagcacagcaaaaatttgcaccgaacaaacgaccatatttgatttcccgctctggatgcgccggattgcagcgttatgttcagacatggagtggggacaaccgaactaactgggatacccttcgatacaacacccgcatggggctgggaatgagcctctcaggattgtataacattggtcatgatgtcggtggtttttctggtgataagcctgatccagaattatttgttcgttgggttcagaacggtgttatgcacccccgatttacgatccactcgtggaatgatgatcatactgtcaatgaaccatggatgtatccggaagtaacacccgcgattcgtagtgcaattgagttacgttatcgtcttatgccttatttatatacattattgtggcaggcacatgccgatgatgagccaatattacgtccaaccttccttgatcatgagcacgatgttcagacatttgaagaatgtgatgattttatgctgggacgcgatattctggttgcaagtgtcgtggaagcagggcaacgacaacgacgagtatggttacccgacaacaaaacaggatggtacgacttttacaatggcgaatggttctgtggtggtcaatggataacaatcgacgcgccactggaaaaactaccattattagtacgtgcaggtgcaggtattcctcttagtgaacgtataacatacgtgagtgaagcggaagataatcatcgtaaattgaaattattcccaattaaaggaacgggtaaatccaccggacttctgtttgaagatgatggcgaaacttggggatatactgaaggtaatgctctgtggcttgaatgggagctggactgcacagccactacaattgagttaagaataaacactcatggagattatcgccctgcatgggaaacattgaaagtgataattcctcagggagaaagtcgtcaactactgattaacggcattgaggcttatgaatggaatatgaacctatcctgtaatgattaa

SEQ ID NO: 17731 - DNA, 1302 bp, Escherichia coli
atgagtcaggatataaataataatatagctgtcagcaaacaccgtcgaataataagacaactacggtggtggatgttaatcctttttctaatgggtgtcactgtcaattatattaccagaaactcattaggtattttggcaccagagttaaaagacagccttggaattacaactgaacaatactcctggattgttggtggatttcagcttgcatataccctttttcagccactttgtggatggctaattgatgttattgggctcaagattggatttatgatttgtgcttcattatggggaattgcttgtcttctgcatgcaggagcaggaagctggatacagcttgcgttgcttcgttttttcatgggaggtgctgaggcttctgcgacacctgcaaatgcaaaaattataggtgagtggtttccaaaatctgaacgtcctgttgctgctggctgggcgggtgtcggtttttctatcggtgcaatgcttgcaccaccaattatttactttgcacatgcgtcatttggttggcagggtgcatttatgtttacaggtgcacttgcaattctttgggttttcctttggtgggcgtgttataacacaccagaagagcacccaaacttaagtaaaaatgagctcaactttatccgacaggataacgaagctcctccggtaaaaatgccttttctgaccgcgttaaaaacagttagtaaaaataaacgcttttatggaatcgctatccctgcatttatggcagagccagcatgggctgtaatgagcttttgggtgccattatatcttgcaaaagcatatggcatggaccttaaacaaatagctctgtttgcatggttaccatttctttgcgctgatttcggaagtattgccagcggatatctgacaaaactctatacccgtctgtttgggttaagcagagtaaattctgttattgcgtcctctgtaagcggagcatttctaatggtttcgcttgctgtgattgcttttatcgacaatccatatattgctattgtacttatctccattggtggttttggtcatcagataatttcctgcatgttaagtgccctggtcgttgaatcttttgataaggggcagatggccactgttaatggaatgcgtggttcagccgcatggattgccagctttttgttctcactgattattggcgttactgctgacaaaataggctttaacccgctatttatcgccatgggattttttgatcttattggtgctttttttctggttacttttattgcagaacgtcgcaaaaaacgcacctga

SEQ ID NO: 17732 - DNA, 1314 bp, Escherichia coli
atggctgcgatcgctgccctcgtggactcgtcgcctgacgcactgaatacgctgaacgagctggctgcggcgttgggcaacgacccgaattttgcgaccaccatgactagcgcgcttgcgggtaagcaaccgaaagatgccaccctgacggcgctggccgggcttgctactgcggcagacaggtttccgtattttacggggaatgatgttgccagtctggcaaccctgacaaaagttgggcgggatattcttgcgaaatcgaccgttgccgccgttatcgaatacctcggtttacaggaaacggtaaacaaggctggtaacgccgttcagcgttccggcgataaaatgaccggagaactgaaaattggcacggtgaatgcgctgcgaattttcaatgatgccttcggtcttattttccgtcgttcagaagattttcttcatttcattccgacggctgaaggacaaggcgaaaacggtgatatcggcccattaaggccattcgctataaatctgagaacaggtgctatatctgtcagccacggggccaaaattgatggtgggctggcgcttggtacagataacgcactgggcggtaattccattactctcggagataacgacactggtattaaacagggcggcgacggtgtccttttattctattcaaatggacaactggcatttgggcttcaacccgcatctgctgatttttataagcgggttgcatatattcatcagggaataattcctgatggaagtggcgcatttgcagaccagttgaataatgccaccgcgccttttgttcagacgcagtttgcctggaatcccactcctggtggtctttacgtgccgatagttaagggcttgtccattcgcaatggacagggctatcccggcgcggtcagctttgggtatttactgacagaacagtatggatttccggttccatgtattcatatgcgtggcgatggcggtaatgatgctttatggcagtttaacccgaacgataaatcctttatttcaccgggtgctcttattgcgggtggcgtccgttataacaccgatggaaatatatttggtgggtgctgggggtcaaacttaaatgattacctgaatagttcttttatcagaaatgtgcgtctgggaggcagacgttctgacacattatatcgcggaggactttgcgaaccaggtaatggtcatgtgacaacaggattgcaaattattggtgaggttgatggagatgactggatggtgtcacgaccactacaaaaatacatttctggtaactggtataacgttgaacaggcatag

SEQ ID NO: 17733 - DNA, 786 bp, Escherichia coli
gtggcttttgatggttcctccgatatcacattaaaagcaagtcatgttggtgcgtttgccttagggaaaacaggaagcaccgttgcgaatgataaagcagttggatggaactggagtagcggagcctataacgcaactattagtggtgcatcaacgttaattattcatttttatatgggagaaggaagttgtcctgcagctcagtttcggattaattataaaaatggcggtattttttatcgttcagcccgtgatggttatggttttgaagccgactggtccgaattttacaccaccaccagaaagccttcagcaggagatgttggtgcactgccgttatctggtggtcaactgaatggtgcactgggtatcggaacatccagtgctcttggcggtaattcgattgtattgggtgataatgacacgggctttaaacaaaatggcgatggtaatctggatgtttatgctaataacgtccatgttatgcgctttgtctccggaagcattcaaagtaataaaaccataaatattacagggcgtgttaacccctcggattacggtaactttgattcccgttatgtgaaagatgttcgacttggttcacagcaatattatggagtgaacaactggcaaacatggaatttccagtgcccttcaggtcatgtattgtctggtattaatgttcaggatacagggtctaactctgccgataatatagcgggtgtttattacagacccgttcaaaagtatataaatggcacctggtataatgtagcgagcgtttaa

SEQ ID NO: 17734 - DNA, 237 bp, Escherichia coli; identical to SEQ ID NO: 6072

SEQ ID NO: 17735 - DNA, 381 bp, Escherichia coli; identical to SEQ ID NO: 8099

SEQ ID NO: 17736 - DNA, 822 bp, Escherichia coli
atgaaactggaagatttaccgaaatactactccccaaaatcccctggcctgaccgatgcatcggcctcaacgtcaaaagatgcgctgagtatcactgatgtgatggccgcgcagggcatgacacagaatcgggctgagatgggtttttctgcgttcctggggaaaatgggcatcagtatgaatgacagggcgcgggcaacagaattactggcagattatgcactcagtcggtgcgatcgtgtggcggcgttgagaaaacttccggcagaaataaaaccggtagtgatgcgcattatggcttcgtacgcttttgaggattatgcccgcagcgtagcgagtaaaaagcagtgcccttgttgctatggggaaaaatttattgaaagcgtagtttttacaaacaaggtccagtatccggatggtaagccgccggtatgggcaaagtgtacgaaaggtgtgtattcgtcttactgggaagaatggaaaaaaattcgggaggtggtgaaagtttcttgtcctgaatgtaaagggaagggggagatttccaccgcctgtaaggattgccgtgggcgtggtgtcgccattcatcgtgaagagtcggtaaaacgtggtatgcctgttatcagagactgccagcgttgtggtggtcgtggctatgaaagactaccatcaacggaggcatttaatgctatatgcgaggtgacaaaccagataacacgcgcgtcatgggaaaaaacagttaagaaattctatgatgcgctggtgacccggtttgatattgaagaagcatgggctgagcggcagttaaaaaaggtaactaggtaa

SEQ ID NO: 17737 - DNA, 642 bp, Escherichia coli
atggcagcgacgcacacactccctctggcgtcaccgggcatggcgcgcatctgcctttacggggatttacaacgatttggccgccgcatcgaccttcgtgtgaaaacgggggctgaagccatccgggcgctggccacacagctcccggcgtttcgtcagaaactgagcgacggctggtatcaggtacggattgccgggcgtgatacaggtgaaacggaattatcagcccgtcttaatgaaccgctggcaaatggtgctgtgatccatatcgtgccgcgtctggcaggagccaaaagtggcggtgtgtttcaggctgtgctgggggcggctgttatggcggttgctatatggatgccgggggtaggaattatggcgagtaatctgctgttttctctcggtgccagtatgacgcttggcggtgttgcacagatgctggcccctaaacccagaaccccccgcacacagacaacggataacggcaaacagaacacctatttttcttcactggataatatggttgcccagggcaatgttctgcccgttctgtacggtgaaatgcgcgtgggatcacgtgtggtatctcaggagatcagcacagcagatgaaggtgatggtggtcaggttgtggtgattggtcgctga

SEQ ID NO: 17738 - DNA, 276 bp, Escherichia coli
gtggcttctgtttctatcagctgtccctcctgttcagctactgacggggtggtgcgtaacggcaaaagcaccgccggacatcagcgctatctctgctctcactgccgtaaaacatggcaactgcagttcacttacaccgcttctcaacccggtacgcaccagaaaatcattgatatggccatgaatggcgttggatgccgggtaactgcccgcattatgggcgttggcctcaacacgattttacgtcacttaaaaaactcaggccgcagtcggtaa

SEQ ID NO: 17739 - DNA, 216 bp, Escherichia coli; identical to SEQ ID NO: 7765

SEQ ID NO: 17740 - DNA, 381 bp, Escherichia coli
atgtcggacacactccccggaacaacgcttcccgacgacaacaaagacctcccctggtgggggctgccctgcaccgtgacaccttgttttggcgcccgtctggtgcaggagggtaaccggttgcattaccttgccgaccgcgccggtatcaggggccggttcagcaatgcggatgcataccatctggaccaggcttttccactgctgatgaaacaactggaactcatgctcaccagcggtgaactgaatccccgccatcagcataccgtcacgctgtatgcgaaagggctgacctgcgatgccgacactctcgggtcctgtggttacgtttatctggctgtttatcctgcgaccgaaacggaaagtaaccctccggaatag

SEQ ID NO: 17741 - DNA, 279 bp, Escherichia coli; identical to SEQ ID NO: 14406

SEQ ID NO: 17742 - DNA, 246 bp, Escherichia coli; identical to SEQ ID NO: 4533

SEQ ID NO: 17743 - DNA, 171 bp, Escherichia coli
gtgctgaccggaagtgatgacgatcgccacagcaacacgtctctggcgtggggagctggcgtgcagtttaacccgaccgaatccgtggccattgatattgcttatgaaggctccggcagtggcgactggcgcactgacggtttcatcgtgggtgtcggttataagttctga

SEQ ID NO: 17744 - DNA, 549 bp, Escherichia coli
atgatcttcatgactacagagcgactcattattcgcgcattcaaaaataaagatgcatctgcacttttcgattatctgtcttcacctcgcacaccttgttttcaggacgaaaaactcaactccctggaagatgcgataaaagaaatagacagcagaatccttgataacagccagtttgccgtttgccttaaagagactgatgaattaattggtcatctctttgctgataataagggggagtctgacagaaatacctggtcagttggctggcattttaacaagaggtatgaaggtaaaggctatgctacagaatctgtcactgcgttatttcaatatttgttttttgaaaaagaagccagacgtctttatgcatatgttgaagactataattttgcctctcagaaactatgtgctcgtctccatatgcgacaggagggatgttttaaagagtttgtctcgttcacacatgataatggtgtagaaaaatatgatgatacatttattttcgctctactcaagaaagagtgggagcagttattgggtaactag

SEQ ID NO: 17745 - DNA, 165 bp, Escherichia coli
atggaatttaatataaaattactgtttgttattacgtctatggttcttaactttaacgcagcagcgaaagaaaaaatatcactgcttgcaccctatgatgaatggtatttcaatttttttaccctaattccctaccagcagaagttacctatgtggagttattag

SEQ ID NO: 17746 - DNA, 228 bp, Escherichia coli
atgcataaaataccctttgatgttcttgttcattctgaaaacgcattaatccgcgcaaaggaaatggacgcattactacttaagttaattgatgtgccggaaagtggcgaagatcattcatcattaatgtttgccgctgttcagacattattgacacctgttattgatgaactcaataaggctatggcaattcacgagaataataaagcgccccacaccggagaataa

SEQ ID NO: 17747 - DNA, 300 bp, Escherichia coli
atgaaacttaaatattctggcttaactgccagtggcaaaactcgcactaaattcatgcgcggtgatatttaccgcgaccagtacggcggcacggtaatgattaagggcgtggaggaacggcgcgtaacctaccgtcgtgaaggctacgaatatgattgcgtgatgcctgtttatcagttcgatcgtgatttttctctggtgcaggccgtaccgcgtaacgtgcccaccagcagggagaaagcacgcgccaatattcaggaaataaaaaagatgcttaacgtattcaggggtaaaaaatga

SEQ ID NO: 17748 - DNA, 1749 bp, Escherichia coli
atgaaactggcaccgaacgtaaaaaaacagccacgcggaataaaacacaaagacacagaggtaattattttcgcgggtagtgatgcctggtcgcacgcgaaacaatggcaggagcaggatggccccgcatccggcgataatgtgccgcctgtgtggcttgggccaaatcagcttgccgaacttgatgcactgaaaattgttccggatggaaaaaaacgcgtaaggctgtaccaggccggagaactggatttggtggagaccaaaaagattggtcagaagctggcggcggcagatattcaggacgcaaatttttaccccgaaggaatgcacgtccagaagtgtgaaaactggcggcgctatctgaatgctgagcgtgaaaatattgccgcagggcttaccatgccggagcagaaaaatacgcaactggcacaaatggcagacagtgagcgcgcacagatgcttgctggtcgatttgatggcgtttgtgtgcatccggaaagtgaaatcgttcacgtatggcgcggcggggtatggtgtccggtcagcacaatggaacttagccgcgaaatggtggcgatctattcagagcacagggccactttcagcaagcgcgtaatcaataacgccgtggaagcgttaaaagttattgccgaaccaatgggcgagccgtccggtgatttgctgccgtttgccaatggtgcgcttgacctgagaacaggggaattttcctctcaccagccggataactggatcaccacacacaacggcattgagtacacgccgccagtaccaggtgagaatatccgcgacaacgcgccaaactttcataaatggcttgatcacgctgccggaaaagacccgggcaagatgatgcgcatatgtgccgcgctatacatgattatggcgaaccggtacgactggcagatgtttattgaggccaccggagacggcgggagcggcaagagcactttcacgcacatagccagccttctggcagggaaacagaacaccgtaagcgctgagatgacatcactcgatgatgctggtgggcgtgcgcaggttgtcggaagtcggcttattgtcctggcagaccagccgaaatatacaggcgaaggcacgggcatcaagaaaatcacgggcggcgaccctgtggagattaacccgaaatatgaaaagcgattcacgaccataatcagggctgtggtactggcgaccaacaacaacccgatgatattcacggaacgggccggaggcgtgtcacgtcgtcgcgtgattttccagttcgacaacattgtaagggaggacgaaaaagacaaggatttgccggagaaggtcgcggctgaaatccccgtaattatacgccgcttgctggctaattttgccgaccctgaaaaggcacgggctttactcctggaacagcgcgacggtgatgaagcactggcgataaagcaacagacggatccggttattgagttttgccagttcctgaattttctggaggaagcacgcggcctgatgatgggtggcggtggcgattccgtgaagtacacgaccagaaacagcctttaccgcgtctatctggcgtttatggcatacgcaggaagaagcaagccgctaaacgtggctgagttcagcaaggccatgaagccagcggcaaaagtttacggacatgaatatattacgcggaaagttaagggagtaacgcagaccaacgcaattacaacggatgattgtgacgcgtttttataa

SEQ ID NO: 17749 - DNA, 315 bp, Escherichia coli
atgtgcatacatcaaaatcacttaacaaacatgccgaccgaaaacatgaatcaggggcgacaaatgaccaaaatgcgcagagacagaacagaaccgaaatatcgcgcgttagacatgacagagcacgctttaaaggtggcaatcagaacgatagaccgccacgcgggggaaggatacgcgaaagcacatcccgaactgataagcgcattcatgaccacggcggcggcaaactttgccacgctgacagaacgggagattgccgaagcggaacaggtaacaaccatcaacgttaaaaccggagaggtggaattatga

SEQ ID NO: 17750 - DNA, 426 bp, Escherichia coli
atgacggcacagatagccgcttacgggcggctggtggacgacccgcaggtaaaacagaccagcaagggcacaccgatgacgctggcgcgtatggcggtatctttgccatgcagccaggcacaggacggacaggcgacgttatggttatcggtcatcgcatttggcaaacaggccgacttcctggctaaacatcaaaaaggcgatgttgccagcgtatccggcacgatgcaggtaagccagtggaccggacagaacggagaaacgcggcagggctggcaggttatcgcagacagcgtgatcagtgcgcgaacagcgcgaccgggcggcaaaaaaggccagcaggggcaggccactgacgcactgaacagggcaaaacagcagacgggtcagcacgatgatccgtacggggacaacataccgttttag

SEQ ID NO: 17751 - DNA, 243 bp, Escherichia coli
gtgacatttgaagaagtccagcaacataaaaagtttcatgattttgatgatctggaaaccatgacagcaaaaaaatatcgccgtctgctttcttccgatgcgttgtttgttgtggatcatcatgattttctgcgtagctcactgaccggggaaattttcgcaaccaaccgtgagcaggtggaagcgatgatcgaatatctgtggaaaataaggcgcagaatgcgagatcccgtgaaacggtaa

SEQ ID NO: 17752 - DNA, 507 bp, Escherichia coli
atgaatttaagcgcaatggtataccctgatactttcataattaatggcgaatcattcagaggtaaaagaaacgcaaaagaaaacaaggtattaattccatatacaaatgaaccggaagtaactattggtcaacacattatccagcgtgtcggtaaaaacgagataaatctaaaaattatagatatgaagttgcttcccaatggaacccgcagacagggaaccaatcatccaaatatgttgactctctatattgaaaatatcacgggaaatgaacatatgacgccaactaaaagtaatacatttaacattggttcaattagtggtgatcaagtgcagataggtgagcataaccatatgctggtaaacatcagcatcactgaactggttgaaaaagtcgctaaatcgggggatgtacaagccaaatcagtattaaagcagttactggaaaacagtaccgttgccagcattgttggggctggcgcaagtgccctaataggcttactgtaa

SEQ ID NO: 17753 - DNA, 1170 bp, Escherichia coli
atgaagaaattaatcgaactccgccagcaaaaaaacgccctgaaaaaccagatgcgatccctgctggaaaaagccgacagtgaaaaccgtagtctgaacgctgaagaaggcaaacagtttgatgaactgcgtgcaaaagctgatgccctcgacacagaaatttcccgcctcgagtctgtggctgatgaagaacgcagcaagccaggaacgggcatccagaaattatcatctgatgaattgcgtaactacatcgtaaccggagatgtgcgatcactgtccaccagcactgacagcggcagggatggcggatataccgtaattcctgagcttgatcgcgaagtcatgcgccagctacaggatgacagtgttatgcgcgtgatcgcgaccgtgaagaccgcaaaatcaaatgagtttcagaaactggtttccactggcggcgcaactgtaggacgaggcacagaaggcagcgcacgcagtgaaaccaacaccccgaaaattgaacgcgtaaccatcaagttgaatccgatctacgcctacccgaaaaccacgcaggaaatcctggatttttcagaggtggatattctgggctggttatcctccgaaattgccgacacgttcgccagcaccgaagaggatgattttgttaatggcgacggtaacggcaagccgaaaggcttcatggcttacacccgtgcggcgaccagtgacaaaacccgcgcttttggcaccattgaaaaaatagtagcggcaagtggaaccgccattacagcggacgaactgatcgacattctctacaagctgaaagcgaaataccgcaaaaatgccgtatgggtgatgaactcgggcacggcagggacactacagaagctgaaaaatgagaacggcgattatatctggcgcgacagccttaaagaaggtgcgccggatatgttgcttggtcgtcctgtttactgcctggagtccatgccggacatcggcgcaggaaaagcaccgctagcggttggcgatttcagtcgtggttatttcatcgttgatcatgtaacagggattcgcacccgaccggacaacattactgaacccggattctacaaggtccacacggataaatatctgggcggtggtgtggtggattcaaacgccatcaaaattctggaaatgaaagctggctag

SEQ ID NO: 17754 - DNA, 561 bp, Escherichia coli
atgaaaaacaccgattttgaaatccgcacatctgaactgaccgccagcaataaaaagctggtggggtatgccgttcgctggaacagcctttcagaaattatctgggacgaattccgcgaacagttcacgccgggggcttttgctgactatctggcgacgggtaatgatgtgcgctgcctgtatgagcatgactatacccaactgctggggcgcaccaaatccggcactctggtactgactgaggataacaccgggttacgttttgaactgacaccgccggatacccagcttggaaaagatgtgcttacgctggtggagcgtggcgacattacaggaatgagctttggttttcgcgcattatgcgaggagtggagtatcgcgcaaaaaccgtatctgcgtaccgtaaccgccgctgaactccgtgaaatcacaataacgtcgatgcctgcttatccagaatctggcgtggagattgcccaccgttcgttgtttgcacagcaccctgaattacgtccgacaggaaataatcttcatcgctggtctgagctggcggggttgtga

SEQ ID NO: 17755 - DNA, 1215 bp, Escherichia coli
atgtggtggccttttagtcgtaaaaaaagcgagcagcgtaacctgtccattgatgattttctggcgctgtccggcgtaccgaataccggatccggagaatatgtttctgccgggacggctgaatcattgcctgcagtgatgaatgcggtttctgtcatcgctgaggcggtggccacgatgccgtgttatctgtatctggtacgtaatgacaagggcagggaggcgcgggaatggctggacagtcacccggtagatattctgctgaatgagcagcctaattcgtgccagacaccttaccagtttaaacgcacaatgatgcgtcactgcctgctgaacggtaacgcctatgcggttattgagtgggggcaggacgggcagccaaaatcacttcatccttatgcgccggggtgtgttgtaccggaacgcacaggcgcacacaaataccgctataccatcaccgaaccctgtacaggaacggtgcgcacgtatttacaggaagaagttctgcatctccgctatgcctcggatgatggctttctggggcgttcccccgtcacgatttgccgtgaggcgctggggcttggccttgctcaacagcgtcacggagccagcattatgaaagatggcatgatggcggcagggattatcacgtcaggcgaatggctggacggcgtgaaaggtaaacaggcattggatgctctggaacgctacaagggggcgaaaaatgccggaaaaacgccaatccttgaagggggcatggattacaggcaactgggaatgagtaaccaggatgcggaatggctggcctcccgtcgcttctccattgaagacatcgcccgcatgttcaacgtatcgcctatttttctgcaggaatacagcaacagcacctacagcaatttcagcgaggcaagccgcgcgtttctgaccatgacaatgcgcccgtggctggcgaacttcgaacagcaaatcaaggccgctttgctggtggcttctcccgtacctggtacccgttatctggttgagtttgattcagccgatttattacgcgccacacccaccgaacgttatgccacgtatgagaaagggattaagaacgggatcatgaatccgaacgaagcccgtgagcgtgagggtatgccgccgcgtgaaggtggtgatgagttcagccaggcatggaaacagactgtggaaattaaagggagaaaagatgagtga

SEQ ID NO: 17756 - DNA, 303 bp, Escherichia coli
atgagtgaagccaaaattacacctgatgaagtcagggcacatcttcgacttgatgatgatttatccggtgaaggcgaacttctgaaaatgtataccgatgcggcgctggaagcctgccagaagcatatcgggaaacgttttgaagacgggctggaatttaccccggcaatgcgtgttggttgcctgatgtacatcgctttcctgtacgagaaccgggaagcggtttcaccagtggagcactcggaactgcctatggctatttctgcgctctggtcagtttatcgtgacgtaggggtgtactga

SEQ ID NO: 17757 - DNA, 441 bp, Escherichia coli
atgccgtggcaaccattaaggcgatgcactgagcctggctgtaataagcgcgtgaagtccggcaagtgtgaagagcacaggcgggctgcatggcgtgcagaggatgccagacggggacaccgccgcgcgcgcgggtattcccgacagtgggacaaataccgcgccctgtacctgagcaaaaacccgttatgcgtgagttgtctggctaaggggatttatacgccagctcttgtggtggatcacatcattcccatcaatggcggcggtgatgttctcttctggcctgagtggaaccaccaggcattgtgccagacgtgccacaaccgtaagacgacacgggaagatcccgccacgaaagcgaaccgtaaggcgggcatgtatcgcgatcaggaagaacgggcggcacaccgtaacgactggatgtatggcgatgatgactga

SEQ ID NO: 17758 - DNA, 294 bp, Escherichia coli
atgacgagaatgagcgaaaccgaactactaaaaataatccgccgtgttaccggagccagccagacagcagacaaacaggaggccacgcagccggacagcgtgatagccgaaaattacgcgcgtgtggtggctgaggtgatgcgccgtgacggtattgagcttaacggcgtggatatgcgcaacatacgaaccagagtccttgagttgctggcataccgtcgccgttctcaacaacggagggagagcgcgaaaaatacttatcagtggaagaagccggaacggttgcggcggtaa

SEQ ID NO: 17759 - DNA, 594 bp, Escherichia coli
atgaaacctgttatttcccttatcgaagcactgaacgccgttaaaaataatcttgcctccctgaatgagcagaaagaaaagctctcccgccgaattggagagattaacagtgaaataaccacattacaggatatgccattatcgcttaatgattactgttcctttattcctgaatatattgagcgattcgggcaggaagaatatcagtcattcaagcttgctctttgcaacggttccggcagtgaagggaacgccgaacgctggggtaatctggaaaatgagaatggtgatatttctggtctgttccgtctggtgggactgagcgggaatgtccccctggctgatgtcgggatgacggttatgcgtaagttatgctttttcttcccggatgtggtcgccacccgcctgaccgaagcgctcaaaaaggataaaagcgtggcgtggggcaatgacaaccttccgtcactggcagaccgccgtaagaccgtagctgcgctggtcaacgaacgcaccaagctggaaatcgaactgaaatccgtcagcgaggaaattgccgggattaccgaaatcagcaatctttccatgaccgaatga

SEQ ID NO: 17760 - DNA, 615 bp, Escherichia coli
atgaaagatatcgatattggcaactggaaaactatcgagatattccgggcgggaacgcatatcacgatggctgggcaggaaattgccttttccgacgaggatatcgacaacatggcggcagcctataacggctatcatcgtgcgggttatggtgcgccgctgtgtattggacatccggccagcaacagcccatcttatggtgaaacaactgggctgataagtaaaaacggcaggcttttcgcgctggttaagcctgatgaaaccctgctgggactggtacgcgcagggcgttacaggaaagtgtctgcggcattttatagacccggcgaagcgaacaacccggcaggaatcggtgcctggtatcttcagcatatcggttttctcggctcacagcctccagcagtaaagggactggcgcaggtagaatttatggaaagctgttacccggtttgcttttatcacaatgaatcacacgttcatttttcagagtttgacggcatagcagacagtcagagggcagcacagcaccttttaataaaggacgtaagtgcagcctgcaatgtctcctattctgaagcgctcgccctcaccacgcctttcatctggagttattaa

SEQ ID NO: 17761 - DNA, 528 bp, Escherichia coli
atgattacaagagaaggattgtatgcttcatccgatactttgggggcaatgggcgatgctatagaagtgtttctgatcaacaaagggtattcacggcaacagtcctgcagtgcggctaatcatattgtgttgggtatctctgataaccttggtggctgccaggggtatatggctgaacaccgagaaagagcacctaaggcagttcgcttcctacaggagctgactgaatctattgagcagacattaggaaccataccttacctctgttcgcaagccgaaaaactttctcctgccatcactgaatgtctcaggaatacatttttcagggggaatatatatatccctatgggcgcatcaaaaaacactttcgacaggaactcaaaaatactggctgatttttatcagggtatctctatttttgaactatcaaaaaaatacaagcgttccattcagtgtatttatcagattatagccgccgaacgcaagaaaaataaaatacagcgcgatgcgaaatatggggtaatttaa

SEQ ID NO: 17762 - DNA, 279 bp, Escherichia coli
atgaaagctactgctaatttcatagcctgtcctcatgagtctcagggaacgtcttacgatgttttgtttgttaatgctgatgccccgagtacagaaatatgggaagccgcctttagccgtcttgaggccgttcgtcgcctgaatgatgaactttctgttgccgttgatgataaatcaacacagacgcccttagcacttgttaacagtatcctgctatctgatgcaatggcaatgattaacctgataggtaatcgtcttgatcaggagagtaaggaatag

SEQ ID NO: 17763 - DNA, 480 bp, Escherichia coli
atggctaacgacaagtctaacgattcagttgcaacaaaccaagtggatactatccgcttacctttaatcaaggcacagagcgaagctatcaatcctccatgtataggagagtggtatattgaaattaacagcggtatgaatgcaattgttaaagaatgcaacggtaatactgtggtgttttcctatgagcaatatccgcaggcaaatcatagcttcccgcttaatgcatttgttaatatatttgaacgtcgtgatataccgcaacagcagttacaaaatattgaccataaaaaaacatactgccgagaattatttcgagtggccttgcgttattccggaacaactgagcttgatatactgactaaatcgattgaagaattcattgcctgttcactggcagataaatacagtccaggactgaatgccgcaagttatgaaatttataataaatttataattaaccggaggactgcaaaatga

SEQ ID NO: 17764 - DNA, 192 bp, Escherichia coli
atgtcaactatcttgagagataaaagccaaaaaggggcagggaaagcccccatgtttaacgttagaatatcgccagatttgaaagaacagtttgaaatacaagcaaaaaaagaaggtgttagcttgggaaactggctcaaggaacttggcagggcggaactaaaacgtaaggggatcgagccgaaagggtga

SEQ ID NO: 17765 - DNA, 252 bp, Escherichia coli
atgccagcgctggcacatttgaagtctggtaacatcaataatctaatgacacctgatgtaattttgaaccctgaactggaatcaaccccaaatttaatggcaacagctatcagccagattactgatgaacgtgacctgctgaaccaattacttgaccaagcacagatggccgatgcattcgagcaattttcccgaacggttcggacttctaaactggcttttgtgaaggaaaacaagggctttgttgaataa

SEQ ID NO: 17766 - DNA, 345 bp, Escherichia coli
atgactcaaaactatgaactgattgtgaaagggatccgcaattttgagaatacagttacggtaactttagcgttacgggacaaaaaacgctttgacggtgaaattttagacctggacatctcgctggaccgtgttgaaggtgccgcgctggagttttatgaggcagcagccagaaggagcatcagacaggtcttcctggatgttgctgccgggttatgtgaaggggatgagcagtcaccggaaaagcgccccataattttagaggcgcagggtgtgtggataacctacaaaggaaaactgccgggaagaattactggttcactgaagactccgccgaaatggtaa

SEQ ID NO: 17767 - DNA, 525 bp, Escherichia coli
atgaataaacttaataaaaataaatggcgaacaaatgtctgtgtccgcattttcaaaataatccttcccgcaacaatattaatttcagcaaccacagctaacgcagcagtctgtagcccggatgtcagctcatcattaaaacaagcgcaatataacgcaatgaagcaggatgcggctcagttagagccggtagcgaagaatttcatggataacatcaatcagtcacttgagacgattggttgtacggacgcttggcctgtgggaaacctcggcatcagcctgccatctgtggattcaataattaaaaaaacgaaggaagcagcaataagtaaagcctgttcgattgcgagagaaaaagtcactcaactgaccggaagtatatccgagagcatttctattgatatgcccgtgattgggaatatcgcaaatggaagtgtttctacaggaactggctcttcatcaggatcgggagcaaccgtcaatggaaccgatgtctggagcagcatcagtaattcaatgaagtaa

SEQ ID NO: 17768 - DNA, 666 bp, Escherichia coli
atgacacagatagattttaaatcccttagcagtttatcaccctttcagctaacacagtatattgatgaccatcattttactactgaacagaaagtgcagatattcgaacattaccacagcacacataaagatattaccaatatctattcaagaaaagaaaacatcaaatccatcaagaaagatgttgattatgttcatatgttcacgaaaaacttccagcagctcgcagaacttgatatctcaaagaatgagttaaaagttatcgcaaggatcttaaatatcatggagtttggaaactgctttcatatctcacaggcaaagctatgccgagagttagatattaaaaagtcaaatatgtcccttgtctttaaaaaactcaaaaagaaagggatcattattgataaagaaggagatctctttatgaactccaacatattccttaaaggacaagctcattctattaacgcaaaacagcgacctaatgtcaaaaaggcacagggatttgttgttgatgaaaaggaaagatttgagaacgtttatacttttagaacagatacggatgaaaataatgacgtagacagcaatagccagctatctacggatgatgaagtcttgtctctacaacgccctaagatacccgaatgtctatttaatgaagtagaataa

SEQ ID NO: 17769 - DNA, 192 bp, Escherichia coli
atgggaaaaataaaatattggctaatagcaggatttattatacttctttcgattgtttacattacgaccattcaaagggactctcagttttctaagttgaaatcagcaggcgaaaaaggagatgtagaagctcaatatgccttgggtcttatgtatttatatagagaaatactggatattgactatcagtaa

SEQ ID NO: 17770 - DNA, 351 bp, Escherichia coli
atgagctttgaagctaaaaaggaacactccattgccattatggaaagcaagaagatgtggcgttgtaattatgcccctcccttgctacgcctcgcatggaaagctggattcaagataccaccgctaccttttgcctcattctggcaaataaccttgctgatgggggtatggtttggtccggcatgggggatctgtatgtggttttttacttggaaggacgaagggatgcaaccgggcgcagcatttgtcttaagcatagtcgcaggtatttgctttggtgttcttatggctgcgtatcattggtggcgaaaggtagttaacaatctcccagactgggacagtctggagtaa

SEQ ID NO: 17771 - DNA, 243 bp, Escherichia coli
atgattgatgaattccatgttatgtatatgtacaaaaaaatccaagttgaagcggctactaccgacatcaaaacactggaacagtttttgaagaagttccgccaagttgtcgcggagcgccgggaagaatactatcgggagattggtgagaaaaaagcacgtaagttgagaatgaaaaaagcacaaagattacttgagaaaatgacatgtgatcgtgtttcaccagaggatctcaaggaatga

SEQ ID NO: 17772 - DNA, 351 bp, Escherichia coli
atgaaagagattatatttaataaaagagaaaaagaaaaaaacgaacttattgctaacatcttacaaggatactgtgatgagatctatgctatttatgaaaaacatcctgaaacagcaatcgatatcttgaatggtgggtttctctctggcgtcatatatgatattttgataactcgtgagatgaagaaatactctatcaaaaatgatatatctgatatcgatagaagagatttaaaagccacaatattatattggcatcaagaacacattattgaacttgttatgagaaatctaaagcaagataaaaatcaagatcctatttattggaagttaaagttcacagtgatttga

SEQ ID NO: 17773 - DNA, 519 bp, Escherichia coli; identical to SEQ ID NO: 12485

SEQ ID NO: 17774 - DNA, 537 bp, Escherichia coli
atgagcataagaatagaagaatcaaatagcacaaaaagaattatatgtttatttatactttttcttgttttccctgattttttgttttatacattaggggttgtttttttaagagctaaaaatatttgcaaagataattttctaataatagtagcgttattcatattgttgtgttttaactgtttgttaagtatgctatttaatattgaacaggctttaacatttaaagttgtactttcaatatatagcatcttaataatggcatacgtctcctcttgttatgcacagacgttgtggttatgttctgaagaaatacttaagagatccgtcttttatttgttcgcatttctttgccttattggcattataagtattcttttacagaagactgagattatacatgataaaagtatgattctttttcctgaaccatcagcatttgcattggtttttatacctatcttttcattttgtttatactatacaagaggggggggctactattgctctatatattatctttgggtattgcgttag

SEQ ID NO: 17775 - DNA, 1227 bp, Escherichia coli
atgttacagttcagctttgtatcaaatgacgttgttatgacttacgacggtgacagcggagaacaaataatttgggtttgggagagtttaaataaatttcaaacagtatgcatttcacgcatttttaactttcaactacaggacttgagaaacccaccgtcaaccgttcaggattttaatgattacgaatattcctttaattttggcacgcttaataatgaatacataacagttccgggacggattctaagcattaatcgagatgtccttatacataagtccatcaagcttgaaaggaaagtatttgcgtcagaacgcaacgtctccatttttggtcggctttcaaaactactcgatcacactaatcccatcatcatcggaggggataagccggaagctataccaaaaagcgtattccaggagttgcaaagtaaattccccaacacaggggaactggatcgctatgctaatgcaagggttcacgctattctcgcaggttatcttgatggtatgaaagatgctcgcgaacggtatgaacattacctaaacagaaaaacagtgatcagaaaaaccgacaaactggatttagaagttttaaataagctcgaaattgagaaatatacactcataagagacattatccaggatgcgttgaataacaaaactaacttgtctgaaaatgactggcagagcctgatgatacccttcatcacattactttttccaaaatatatcaaggtcctcgagaatgttaaaattttcgactattactctaatccttcggctaaaaaaaatcggtttatagacattgcactggtggatgcaaacggcaaccttgatatcatcgaagtcaaaaagccgtttgatgataagatccttcgcaagacgccctatcgcgacaactatattcctacatcagaacttagcggcggtattatgcaggctgaaaagtatatttttcatttatctaaatggggtgttaagggtgaaaaagagcttacgaatgcctacaagaattctctgccagcgggaatgtgtattcgtatatctaacccaaaagccatcatcattgtcgggcgcgatcagatagcgaacggtaacatgaccgacggtcagttgcttgattttgagataatcaaacgtaagtacgccaatatgatagacatattgacgtacgacgacctgttgcgtcgacttaataatacgattgaagcattgaaaggttga

SEQ ID NO: 17776 - DNA, 1068 bp, Escherichia coli
atgataaatctgactccaggaattcaagttagcagatatacaatattgagggagattggtgaaggcggtatgcaaaaagtttatttggcaatggataatattctctcgaggcatgtggctctcaaaactcccaaaaataaatctgctgaaaaaaggtttcatagaagtgcaatattagcatcaagggttaatcatcctaatgtggctaaaaccttagattacttcattgatgatgagggtagagagtttttaacggaggaatttattgatggagttgacttggataaggctattttagacacttattcaagtgttgatccatatttaactgctaaaatatttcataatttagctaaagctctgtctgcttcgcatcatgttgacgtcatacaccgggacctcaaaccttcaaatataatggtaggcggtggtatcaatgctacagagataaaaattacggatttcggcatttcaaagatggccggagatgaaattgatgaggctgcaagaaatggtcaagattcaattagttcttcgcaaacggctatcggggctttgccatatatggcaccggaaatcatacagagtcaaggtaaggtttcgaaacctacagatatttgggcattgggtgcgatgatgttcaggattcttactggaaaatacccttttggtattggttatatggctataccaaatatactttctggcacgcatgttccttaccctgactttatattttcaaatagacagtatgcgccattggcaaatgaaataattaaacttatagaagattgtttaaaattggaaccttctgaacgcccaacagcagatgaattagtgatgcgttgtggtgaactatgctacccagtaagtacaagggtttttggggtcatcggtgatactagagtgaagtatggattcatccgtgtgcctcatcttccgaacgtctttttccactatgatagtgtctatggccaaaaaccttttactaatgaaaaggttatattttctaagcatcgtggcggtggacatgatcgcgcgcatccggttgtgaaagctaagaaatga

SEQ ID NO: 17777 - DNA, 1065 bp, Escherichia coli
atgactaattttactctccctgcaagatataagaggactgaagaagaggcttcgggaggatttggttgcgtgatcaaatgcttggatactcacctcgaaagatttgtcgctataaagtccataagtaatcctgatgattctcctcgaatgatggatgagttatcagcattgatgaaattaagatcaaaacatgtagtagagctttatgatgttattaattatcaaggtaaaggaattgctatagtcgaagagtatgttgacggaccttcattattggaagtagaggatcgcatattaaattctgaagatctgattaaaattttgtggcaaatatcttcgggtatttctgagatacattctcatgatattattcatagggatatcaagcctgggaacatgaaaattgattctgagggagtagtgaagatttatgacttcggactatctagaaatgttgatgaagctaatacaataggttttaaaggaaccccaacatatgctgcacctgaattatttttacatcaagtagcgtttacaaaatccatagatacatatgcttttgctgtaacggccatgtttttggctaagaccccactaccaccggaaatgagagttttaccaaaaaaattattgtctaatccttttgataattctaatatacagttaccaactcaggtaaaagaattgcttttccaatgtttagatacgaatccttgtgagagacctgatatggctgatgtgtgtcagactctaaaaaaattcgttctctacaactctcatagagcattgttaatctctgataacactcctcccgtcatcatttcttcaacaaataaatctgcggcttttaataattcaggggtcgggactattgaggtgaaatattctggttcagagttttatatatcgagtttaagtggtgaggtgtatgtgaataatatagctgcaaagcaatataatattttgcctgattcatgtgttattattctgggagagacttctcggccaagaaaagagcgggtcttcattacatttgacctttcccatccggaggtggtgttatga

SEQ ID NO: 17778 - DNA, 1077 bp, Escherichia coli
atgctacctgcagctattgctacagacataggtttagttaggaaagagaaccaagaccgggtagctgtattaaaatttcgtccttttagtaagaataaggacatgattgtcatcgctttagcagatggtatgggggggatggaagggggagcgaatgctgcttcattgaccgtatcatctttttttaccgagataattaaacactcaggcttgccaattagacaatgtcttgaaatcgccgttttaaaagcaaatgaatcggttttgaaagtatataatgggaacggtggggctacgttatctgccttagctgtagatgactccgataacattacagcaataaatgtcggggatagtcgcatatattccattaatgctgaacacataaaacaaattagtgaggatgatacattagctgtattggcaaagaaatataatgagcatcttggtagtgactcaggtgttattgattctaggttaggtggcgagttagtacagtttataggtcttgatggtgttcttgagatacattttcacgatattcggctcgtacctggggtggttgcattaacttcagatggtgctcataccattgacagtaataatttgagaaaattatatgctcactccaataatactggagtgttcgctaaaagagttatagatctagctagttggtttggtggatttgataatgcgtcgattgcggtagttgagatttcgaacatcctaagtgctttggatgtatcatctggggatgtaattaatttatgggatccttttggtgagatgaaagtaattagcgtgcaacctgcgccgttagatatacctaactcagctacggttgaaaatgttattgatagaaaagttactgagttagaatgcagtaatgaaatttctaacaaaaaaaatgtatcgaaaaggaaatcacgtacaaagaaaaaaaatagtaatataaagagtgatgagggaaggaatgttatcgaagctaacaataatgataagttagataatatttcacagttagatatttcattctctgagaaaaactccactaaaggagataaagatgactaa

SEQ ID NO: 17779 - DNA, 3801 bp, Escherichia coli; identical to SEQ ID NO: 5400

SEQ ID NO: 17780 - DNA, 3765 bp, Escherichia coli
atgaatatgcggattatctctctacgcaaggagtatttatctttactcccgtcaatgattgcatctcttttctctgctaacggtgccgcagcggtcattgattcatgccagggatatgatatcaaagcgagctgtcaggccagcaggcaaagcctttcgggtaatatacaggactggagcatcgcggatggacaatggttgattttttcgggtatggtcaataatgccagcggtggcgcagtatttttgcagcacagtgctgaatttacgatatcaccacaaaatgaaacagggatgaccctgtttgctgataactcggttagtggcgaatataataatggcggggctatctttgctaaagaaaactcaacgataaatcttgcgaatgttattttcgacagtaatgttgcaggaggctatggcggagcaatctattctgccggtaccaatgataccggtgccgccgatttacgagtcactaacgccgtatttcacaataacatcgctaatgacggcaaaggcggtgcaatttataccatcaataatgacgtctatttaagtgatgatgcttttaataataaccaggcatatacatcaacaagttatagtgatggggatggcggcgccattgatgttacggataatagtacggataagacacatctttcaggaaaaacgataattaataatacctcctttaccaataactatgcagaaggttatggcggagcaatttataccagcagcaccacatccccgtatcttattgatatttctgttgatgataattatgaccaaaacaatggtgtgatgattgatgaaaataacagcgcctcgggatatgaccattcggcgacggcagcggcggggggctttatgtatatcggtcatagtgtggctgaatttaacattgccgccgataaaacgctggtaataggcaataccagcaacgatggcgcgattgattctcttgccggaacgggagtcatcgtgaaagagggagcgggagagttagtcctcaatgccgacaataatgcgtttaccggcgagatgagtatccagaatggcgaggtgacgttggggcgcagcgatgagttaatgaatgtcggcgacacgcactgtcagagcgatccgcaggattgctttggtctgatggtcggcagcactgttcattctgagtatcaggcagaactgaatgttggcaatacacaacaaacgtttgtgcactcattaaccggttttgctaatggcattttgaatatcgacgcaggcggcaatgttaccgtaaaccagggcggtttttccggctcgattcagggtgaaggacagttgacggtagcgcaagatggcagctatctcctgacaggggcgcagtcgatggcattaaccggcgatattgtggtggaagataacgccgtattgtcgctggcggggaatcaggccgatttacgggcaatgcagagcgatccgcaatcgatcgtgctaaatggcggagtattggatctctctgatttcaccacctgggatggcgatagctcatacaatgacggtctgcaaatcagcggcagcggggggacagtgattggcagtaatgatgtcgttgatatcagcagtggcgatgatttacatattggcggcagtgatgccagccagaatggcgtttatgtcgtcattaatgcgggggatcagcgcgtaacgctggcgaataacaacggttatctcggtaatacgcaaatcgcctccggtacgcttgaagtcagcgataattcgcaattgggggacacaagttacaaccgttcagtgatcttcacagatccccaacaacacagtgaaatggatgtgacgactgatgttgacactcgctcggctacaacaggtcagggcaggaatattgaaatgcgcgctgatggcgaaatacacgttgaggatggcgtagatacgcaatggggcgggttgatggcggatagtaccgggcaacaactggatagcgtaagcacgttgactaaaagtggcggcgggacgctggagttgaccgccagcggcactgcgacgtctgcggtacgtgtggaagacggaacgctaaaaggtgaagcggagaatattattccttatgtttcttcactgtgggtgggggaagacggtgtttttgaaaccgggcaaaatcaggatattcgctcaatcgatgccacctctggcggcgatatcgacataaccgatggtactgtgttgcgattgatgcagcaggatacgaaccaggcgctggatgcctcgctgtttagcggcgacggtacgctggtgaatgccaccgatggcgtgacgttgacaggtgagcttaataccaaccttgaaactgacagcctgacttatctttccgacgtgacggttaatggcaatctgaccaatacgtccggtgctgtcagtctgcaaaatggcatcgctggcgacacgctgacggtaaatggtgattataccggcggcggtacgctactgctcgacagcgaattaaacggcgatgactcggcaagcgaccagttggtgttgaacggtaatactgctggcaataccacggttgtgattaatcccattacagggattggtgagccgacatctacaggtattaaagtggttgatttcgcagctgatcccacgcagtttcaaaacaatgcgcagttcagtctggcaggaagcggctacgtcaatatgggggcgtatgactacacgctggtggaagataacaacgactggtatctgcgatcacaagaagtcaatccgacgccgccgcctgatccagacccgactccagatcctgatcccacgccggatcccgacccaacccccgaccctgaacctacgcctgcttaccagccggtgttgaatgccaaagttggtggatattttaataacctacgtgcggcaaatcaggcatttgtgatggagcgacgcgatcacgcaggtggcgatggtcagacgctgaatttacgcgttatcggcgggcgttatcattacacggcggcagggcagttggctcagcatgaagacacttctacggtgcagcttagcggcaacctgtttagcgggcactggggtgatgatggcgagtggatgcttgggattgttggtggctacagcgataaccagggcgacagccgctcgaatatgaccggaactcgcgccgataaccagaaccgcggttatgccgttgggctgacctcaagctggtatcagtacggtaatcagaagcagggggcctggttggatagctggctgcaatatgcgtggtttaacaatgatgtttccgaacaagacgatggagtggatcattaccactcgtcggggattatcgcctcgctggaagccggttatcagtggttaccggggcgtggtgtggtgattgaaccgcaggcgcaggtgatttatcagggcgtgcagcaggatgattttaccgccgctaaccatgcgcgcgtgtcacaatcgcagggtgatgatattcagatgcggttgggtttacacagcgaatggcgtactgctgttggtgtcacgccaacgttagatctgaattattatcacgatccccatgcgacggaaattgaagaggatggcagcactatcagtgacgatgcggtgaagcaacggggtgaaataaaagtgggaataacgggcaatatcagtcagcgagtttcgctgcgcggcagcgtggcgtggcagaaagggagtgatgattttgcccagatggcagggtttttgtcgatgacagtgaaatggtaa

SEQ ID NO: 17781 - DNA, 177 bp, Escherichia coli; identical to SEQ ID NO: 7518

SEQ ID NO: 17782 - DNA, 525 bp, Escherichia coli
atgaccaaatatggaaagctggaagctcatttgctaactcgtaactaccgccatgatgtgcatccatatagacagtggatcgatgaaagcgaaggagttgttacgttccctctatacaggtttgatgggatgttggccgggtatcagacatacagaccaggcgctcctaagcagcatagcaatccgaagatggcccggtatttcacacgagcgcacggcagacagctactatggggaacctatcttcctttaaaagatggaccgatatggataactgagtcgatttttaaaagtgcagcagtgcacaacgcgggcggaaattcgtgggcgctgttaggttcgactttctcagcaggattacgtcgtcaactggcaatgctgccgtatgactttcgcgtaataggtgacaatgatgcggctggtgaatcacttgtgaagtctttcggaaaaggttttgtggccccggatcttgacgagctacaaccaaatgaagtgtctcatttgatttttagccatagccaataa

SEQ ID NO: 17783 - DNA, 189 bp, Escherichia coli
atgagacaactttacaccattgttatcgcatttgtttttggttttggcggcatttgcgtcggtgagagtgctggctataaccgtggattaagtgaaggagttgctatcagcaagggggataagtgggattgtgcttactcatacgtgactggattccttatgtgtgatcgaaccccaaaatataagtag

SEQ ID NO: 17784 - DNA, 522 bp, Escherichia coli
atgaccacctttaccaaagaacaactaattgatcatattaatgatcgcaaagatgtccgtcagagaatgttggataccgcaacgatttcttctggattccgagaatatcttgaaagagagcttgccaccgatcagattgccctagcgtcgctggaagctgaacctgttctgtatcagtcctgcactcgccccacctggaatagcggtgttccgtggacggaatggaaagaacgtagtcgtgagggctacgaaaacgatttgcgctttacagacacgcctgaccatgccggttggataaacaaatgtcgaaaactatataccactccgccagcgccactgctacctgacggactggttaaagccgtgcgcttctatgaacaggttaagcgtgaaaatacgccagtcgaaaccggagcatggaaagacgcggttgactgggtgcttaaagaggctttccaggctgtatcagtgttggaaagcagtagagaacacgaagttattagccagcaggagaaggcatga

SEQ ID NO: 17785 - DNA, 198 bp, Escherichia coli
atggataaaaatacccctgcttactggagtttatcacttgataccgaatgcccaaaatgcggtcacaatttcgatctgctttgtgatgctgatttttgggagttttctggagcgaaacaggcgtgtgaagaaatagaaggttacgaaacatgctgtccagaatgcaaccatgaatttaaaacagattttgtgtattga

SEQ ID NO: 17786 - DNA, 324 bp, Escherichia coli
atggccacatcgcattatgcaatcacccaggaaaaagtatttcgcttgctcgaacgtctggaggcgctcgccacggaggaagatatatccccggagatgctggttgagtgcagccgtgtgatattgcgtcgcaagaacgacatcgcgcggctgacatctggcgcaccatccgtatcagccagtccaacgctttattgcagcttctgcaacaaatcccagcacaccgttaaaaagttaattgccggggacaacgttttcatctgcaacgagtgcgtgaaagattgcaacaacattatccaggaagatcaaagggaatcagcatga

SEQ ID NO: 17787 - DNA, 612 bp, Escherichia coli
gtgagcaagattgactatcaggcactgcgtgaggcggcagagcgtgcaattccggcaatggaacgcctgttaatgttgccagttgatgatgatctgataagcgaacaggaacttaaagatagcggtgttgatattgatgcgctcaacgccttcaaatttctggccggaccagaaaccgtgctggcgctactggatgagagcaacgcattagaggaaacgcgtatcaacgatgtttgtcgtattgcagaactaacaaaacaactggagttggcaaaatcaaaactcaacgagcagcgtgagtattacgagggcgttatctcggatggaagtaagcgcattgcagaactggaagcacgggaaataaaaccagccaaaggtgaagttcttgtcgttgtttctggttttactgattgcggaaaaagcgccattgccggggaaatagaaatcgcgatgaaggctattggtgtaccggttcagtggactaatggcgatgcggaaaagcgcatgacaggagctgactggctgacagcgattgagatgtacaaaccaacagtgcgcatcgtggaagttaatgtgccacgcgcccctggcattcgcatcaaaggagagtga

SEQ ID NO: 17788 - DNA, 552 bp, Escherichia coli
atgagagagaaaatcaagaacccggtcgtcgtattgtataaacgggaaaccagcgattcttatgcggtatccatcactgatggaagccagaacatgcacgatggtctgctaatggcctccgtatctcctgatgattcggactaccctttcgccactttcgctatggttggttactacatggctgccgaaattgagaagttgcgggcgcagagagatgcattagcggcggagaatgtggcattgcgatctaaggctgcggaactggcacatgaagcgtcaaaaatttactcggcatataacgccactatcacagagcctgacggggattttatggacatgcagacattgcatgaaatgcagtgcatagaaactccagccaccgatgcttttctggctgaagtacgtgcgcagggcgtggatatggctcgtaacgcgatgattgattttgttgatggtgaagttgggccaaacaagaacgttccggggctgattagaggcgcagagatatgcgtaagtattgctgaactgcttcgtaaaggagtcatccagtga

SEQ ID NO: 17789 - DNA, 300 bp, Escherichia coli
atgaatatatacgatttttttaaaaaacctaacacatgtgtcagaaaagggtatagaccgtcagtcatcgattgctggtcgctatcagcaaataatctcaacaatgtattcaaaatgcattgggagtttctttgtgaagcgcgcggcgttctcgacatgacagtcagagaagcaattatctggattctttggtttccggtaagaacatttatgactctgacgtacccatttaccttctggatttggggaaccgtcctttatttcatattaaaaggagaagtaaaacatggcagcaattaa

SEQ ID NO: 17790 - DNA, 348 bp, Escherichia coli
atggaggagtatttattcatacctgatgacgaagcagatttcgattcggagatccccactgacgaaagaggtcctgtttggcagacgtcaaaaagggatattaatggcttccgtgcttcaaacggaaattgcttcaatccttgcaacaacccggcggacgcaaagcctattatcgtagagaacagaattggcattattcctgcgccagaaaatggattatggaaggcagcgcatagaaagattggtaacgataatactccataccatatgactcaaaatgtaaatccactccgcgccgccatgattgtctttctgatgatgaaagaaagtgagagttgtaccgattaa

SEQ ID NO: 17791 - DNA, 390 bp, Escherichia coli
atgcttttaattcaacctgggttcggtttaaagataaaaaaaggacatatgttcggtttcaaagaatcgaaacgaaaaattctgtccattagattgccgtttatcaccattcattggttaaacagagagtcaaccgattattggtataaatgtgctctggccgcatttaacgaccctgactggtttatagaaaaccaccatgctgttcgtcaggcaaagagaaaagctaatacgacatacatgaaggcgtatcgaaaagcatggaaagaacaccgcgatcgataccaaaaagacatggagaaacttgaattggaaaatatggatctacgaaggaagctcggtgaagcacggcgagatattgaagcatataaacgtcttgtatcggagtga

SEQ ID NO: 17792 - DNA, 741 bp, Escherichia coli
atgaaaagaaaaattgaagaaccaaaaacaacccttaataaacatggggaaaaaattcaaacacatccagcgttcggtcttgtgaaaacaagccgtgttagcacaactggcattcgcctatttgattcagaactggaacatagagactatattgaaataggcgtttacgaggcagaactgtccttagacaatgaacgaacccggccacaaagaagtagcaatagacggcctttagttgaaattagacttagccaggcacaatgggctgctatggttagcagttttggtgtgggcgaaggtgtgccatgcactatttcatataaaaccattggcgactcaattagagttcatgatattgccgagcaaaaaagtattcggcaaaaattcaacgatcaaataaaggcagctacgaatagtgagattgatcgacttaatcagcaagtttcagagctaggtgagcttgtgaaaaaaggaagagctggaaaacgtgaccttgaagaactatatagaaaacttgcatctgctgtagctaaccttcctgaaaatctgtgctttgctaccgaattaatgcaggagcaaatggatgaaattgtctcatctggaaaggcggagattgaggcgtatgttgcaggcactgttatgcgtaaaggattagcagcattaggtacagaatcatgcattaacgatgatcctacagtctctatcaccaaaatggaaagcggtaaagaattactgccataa

SEQ ID NO: 17793 - DNA, 825 bp, Escherichia coli
atgcccaaccacattacaaacgaaatccgagtcataggtggtacaaataaacaacgcttagatttcatacgtgccataattaacaaaaaaggtctaattgactttaataccatttgcagacgtccgaaaagtatagaaatggaagaaaacaatcatatcaggcgcatggcctctgcaatggcgggcgaaacagtttacgactacatgttcggtgaattaaagactccagaacaggtcgaattagctatgcgtgaatctggaatgacacgcaaggaaattcgcaaaatcaaagagcaggctcttatgcggcttgagaattatcgtcgctatggctattactcatggtttgactggtcgcgagctaattggggaacaaaatggaatgcctacaacatcgaaatgcccgtaaaacgtatccctacacgtattaagtacggccataatttccgccatacacacgttcgagcatatgcaaaacgaatctataaaaaacgtcttgcaagacatgccgcaactggtggtgagttggtgattcgctttgaaacagcctggtctatgccaaaaccaatttatcaagcgatggctagaaagttcccgcaccttgagtttgtaatacgttatgcagacgaagacttcggcaataactgcggattcattttacttcgcaacggcaaatgggaatatgactacattgcaccggcgaataacgaacaatcgtcagaagaaaaaatcaaatggcgcaagttcgcctttgagttatgttgtcctggcattactccacaagaatacggtctaaatgaagaatacgaatacgccggatattaa

SEQ ID NO: 17794 - DNA, 180 bp, Escherichia coli
atgatgctcggctggatgattgcatttttagcggttggttttttaatcggtattgtggtgatgtccagttgcatcaatgactacattaaaagcggtgttatagaacgacgcggtcgtatttatcgcattgtagaaataacccacacagtgaaggagattaaggatgatcgtattaagtaa

SEQ ID NO: 17795 - DNA, 258 bp, Escherichia coli
atgatggttgaagagattcgtaaaggagaatctctgtatttcgaagatatgaccgcgctcattaaggaggttgaagaacggaataaacaagccagaactataaaacgaaaacgtgacagcgtaacgattaatagcatggttaagaagagcgccacatcacaaacagcgatcactgacgtgtatgcggcgttgcttgaagaaacaacaaaagaaacacatgagcaaatcgatcaacatatggaggcaaaacaacaatga

SEQ ID NO: 17796 - DNA, 783 bp, Escherichia coli
atgaaagacgaaattcagaaattagcctgcgacatcattgataaaactggtttagaaatcagcgagagcaatcgactagacatcattgaaaaagcggtaaaaacagcaatggatcatatcgccactcgtttggttgagatcccgctaccagggctaccttatctgaaagttgagttacacgtatggggtgaaccttcttgtgtagggcgttctgcattagttgtttttattagcaaagaaaacccgctcagtcttaaagtgcaggttggtgcatggatggatggcaaagtgatctacacaaataccgttttttgtgcgccaaacgacagtattattgaagaggctattcaggaatcacttctaactatgcatagcttagttttgctggaagacaagcaaaactacgaagagtacttacggtcgataaaaggtgagagaacattgtcacttaaagccgatttcgttaccccgacaaacctgttggaagtcttgcttaataaaggggctaatgatgccgtaaatgtaatcagagagagtgagtatgcgtctctttgcgacatgtgcaaaagccagttggatctggtgcatatcgttattgatgctgggaaggcatgtgatggcgtaatggcggaatttgctgggaaaatggtcaggattgctaacgaattaccgatgatagagcaagaggctaaatcatacgccaccaatcatgtcacagagcttcttgtcccctatcgcttagaaagcaatcagcgcaagatgattagctggggaagttggtaa

SEQ ID NO: 17797 - DNA, 744 bp, Escherichia coli
atggcaccttctttaattgatgagaattacagcaaacagttgaatgaaatgtcgtcgttggctgacggcaaggccattttacaaaccttccatttcgcaacacattatggtgacgtcgttcgttttgtagaaaagtgcgtcagtagtagtgagtatgacacctttcttgaagtttatctcttgccatcttacaacccagaatttcaactagatgagattgagcgagtcatggatgacgagggcgctaactcgttcgaagcagctgaacatataattaaaatcgggatcgtagatgcaacccccgatgagccacagatgatcggtcggtttgcttataaggatttttcctttataggcggtgatggcagtgactatataggtaaacaaattagaggtgcatatcttgaacctccctacaatgcagctcgtataggatctacagcatactcattcatattggataagtatggccatcttatttgtgacaattttcagacagttttaggcgcatctatgtggtctggtactatgcgcaaatttggagatgtcatgatctacgatacggtgaataagtgtatcgtagataaacttggtgatagagcgaaaggcatcaatacaggcttccagccctgggatatagggaacttatctacaactaggctagcaaatgagtggggagatagggaactgtgttacgaaaaaggctctcgaactaatatagtccatataatatctcgtcaataa

SEQ ID NO: 17798 - DNA, 423 bp, Escherichia coli
atgctaaattatcatgacaatacgcgttctatgcagacgatccgcaccaatactgcggttatcgacagcttccctatgcgtattcacaacagtgaagacgcagtagaagtgcgtcgtatgttgtgccgtgagtcagctgaccgccagcacttcatcgtcacttttaaaagtgatattgcgaaagcagaagaaatttctaacagcacttctcttgttactccgttggctgaagtcgttgtgcgcaacaacaagttgcgttttgtcctcaagccacaagaacagtatcccgaaatcgctgatgttaaagaatctatcgttcctaaaattgagtccgccgttgtacaatacatgaaaaatatgttcaacgaactcaaggaaagcgttttaccagaacgccaaaaagaacaatggcaccttctttaa

SEQ ID NO: 17799 - DNA, 201 bp, Escherichia coli
atgcttctactgttcatcatgagttgcacaataagtggttgcgtgattaagcctcaacccgctggtgtgcttttctgcgatgcggctacaccgctatacatcagccgtgatgatctcatgaccgaagagactgaaagagaggtgctttttcacaatatgataggggagcgattgtgtggatggggcagaaaagtaccataa

SEQ ID NO: 17800 - DNA, 252 bp, Escherichia coli
atgctaggcagcctgatgacaaagctaaaagttgctttgattacgctggctgccgttcttttcgttctggtcggcgcttacacgatgggcggaaatgcagcacgacgagcaatggaagagaaggcaaaacaggaagacaggaaacgacttcaaagcacattggacgtcaaaaatgaaacacttgatgagttacggagcaaggatgcttctactgttcatcatgagttgcacaataagtggttgcgtgattaa

SEQ ID NO: 17801 - DNA, 231 bp, Escherichia coli
atgaaaagattatttctaacaatagctgttgttctctctcttactggctgccagaaattgccgacacccatatgttatggtgaggctatcattggtggacaggagacagtcatacccatatatgctgttaaaaaagtgaacgactataccttatacaaagcgggtagcatctataactggcgatgggttggagtaggtgccttctcatcagtccgttgcaatgttgaatga

SEQ ID NO: 17802 - DNA, 609 bp, Escherichia coli
atgtacggaagcaagatatatcgatctgacgggaaggtctggatgtctccttctttgtctcctatcgtttttcagagaaagcaggttgtttctttatccggcgggacagagtttaacacccaaatatctccagatcgttcaccgatgatttttgttgcctattcgaaagctgtttcattaatagccaacagaatagtgcgtaacaaccaggtgatttacagtttcggaggtcagggtagcgactctagtgccacgatatacgtattttcgaaaggtatagccaaaaaagaaacttggggcatgagttttttcaatgcacaaggggaggaaatctataatacggcaaatatcccactttcatttacctttcttaataatacggagtggaacagctctggagggcatgtttttgattacccaccagcgataatcccaacatatgcgaatgtgttcgctgttccagtaccgggcggagccatgacaatggtttatggatatgcggcatatggaaatactgttagctcgatattcgtaaaccaacttaatggcggccatagttttagtgtaaatggcagagtgccggtaataaatagaaatctgtataactga

SEQ ID NO: 17803 - DNA, 255 bp, Escherichia coli
atgagctatggtgcacaggtttggtcgccatcaagacaggagatggtcgatgcgttggcccctgtttattacctcgattattttactccctctggttctggaagtagaacatatgagattgaggcgggattgggaatcgactattacataatggacgtaactaatgggaaatacacaagtcttacggtttctggaaataccatttcatggtctggagctagtggtaatttaaacatattggtttttcaaaaataa

SEQ ID NO: 17804 - DNA, 3657 bp, Escherichia coli
atgtggtacagggaaggtactatcacatttacacagggtagcaatactctcgttggtgttggaacagcctggaacgtaacagctaatggtgtgttgccgggcatgatcgtcattggtcccgacaataagctgtatgagatcaagcgcgtaaccagtgatacgaacattgttctctcagaaccttataccggcgaaactcagtctgaagttccgtgccgaatcattacgacctatgaaggtgacttaacgcagtttagcgcgcgctttactgcactaatgtcgcgtatgtcggctgattccaagtccatgcgcagttggttgactgctcttgatgaggtgacaatcgagcgtgaagacggtacagaagtgaccgttaagccgctaatgcagatcgtcaacgagcacaacgaaaacgttgagtggtataaaaataacaccgacgcgattgatgctgctggcgacaaagctcgtgaggcggcggccagtgctgccgcagcagcagaaagcgccaataccgctggagaaaaagcttctcaagcgtctcaaagtgcatccgctgcggcatcttcacaaagtgctgcgagtgcgagtgcaactgctgcgaaaaaatctgaaacgaacgcagaatcagcatatgtagcggcagcagaatcagcgtctgtagcgtcgactaaagcatcggaggcagccacatctgcgtccagtgcctctgcatctaaggatgcagctaaagcatcagaggccaacgcttcatcgagtgcaaacgcggcggcatcatttgcaacagaagctgaaaattcgtctaaggcagcaaaagcgtcagagacaaacgcaaaagcatctgaaacggctgccggtcagagtgcatcgtctgcaaacagttcgaaatctgcggcagaagcgtcagcaagcgcagcctcagcaagtgcggatagtgcttcatcaagtgcaacagcggcaggaaaatctgcggaaagtgcatcgtcatcagcgacaacagctaccacaaaagcgacagaggcgacgagtcaggctacagctgctaaaaattcagcatcggcagcaaaaacctctgaaacaaatgcaaaggcctcagaagacaatgctgcttcctctaaggcggctgctgctgaatctgcaagttctgcgtctgcatcagccacctcggcatccgcttcaaaagatgaggcgaccaagcaggcatcagctgcgaaggggagtgcttcaacggcatccacgaaagcaacagaggcggcaggcagtgcgacggctgcatctcagagcaaagctgctgctgaatccgctgcgacccgtgcagaagctgctgctgatcgtgctgaagagattgccggtgcagttgcgatggaagacgcaagccttacaactaaaggtgttgtgaaacttagtagtgcgacagatagcaccagtgaatcactggctgcaactccaaaggcagttaaagctgcgaatgacaatgcgaatagccgattggcgaagaaccagaatggtgctgatataccaggtaaggataccttcacgaaaaatattggcgctggtcgagcatttggaggctctgtaagcacaacagcaggaaactggactacggcacagtttgtcgaatggttggactctcaaggggcctttaatcatccgtactggatgtgtaaaggctcatggtcgtatggcaacaacaaaatcattactgatactggttgtggcgatattcatcttgccggtgcagtaattgaggtaatggggataaagtccgcaatgacgatccgcgttaccacaccaacaacatctagcggtggtggtactgctaacgctcaatttacttatattaaccacgggacagattattctccaggctggcgacgagactacaatacaaaatacaaacctacgccatcggatataggtgcattatcaacatcaggagggacggtttcaggtccgttgtctgttactggtgggttaactggttcattgaatggcaatgcgagtaccgccacgaaattgcagactgtaagaactatcggcggcgtggccttcgatggatctgcgaacataaatttgcctggtgtaaacacggcaggtaatcagagcactactggtaatgccgcaaccgctacaaaacttcaaacggcaagaacgattggtggcgtttcatttaacggaactgccaacatcgacttgcccggagttaacaaagctggcaaccaaagcaccacaggtaatgctgctacagctactaaattgcagacagcaagaaccatcggtggtgttagcttcgatggcactgcgaatattaatttgcctggtgttaatgctgccggtaatcagaacactaccggtaacgcggctacagcgaccaagttgcaaactgcgagaactattaacggggtgtcgtttaacggctctgcgaatatttcgataccaacaattacgtccagaggacgcgttactgcgctcacaggcacaacgcaaggcgctactactggattgcagatgtacgaggcatataacaacggctatccttcgacttacgggaatgtgcttcatcttaagggggcaacagccgttggtgaaggcgagttgctcataggttggagcggtacaagtggcgctcatgcacctgtacatgtacgttcgcgacgagatacagatacagctagttggtcagagtgggcgcaagtttatacgtccaaagactcaattccaggtgtcaatgccaccggtaatcagaacactactggcaatgcagcatcagcaacgaagttgcaaactgccagaacaattggaggtgtatcgtttaatggtaccgccaatattaacttgccgggcgtcaatatagcgggtaatcagaatacgactggtaacgctgcttcagccacgaagttacaaacggctcgtactattggtggtgttagttttaacggtacagccaatattaacttacctggtgtgaatacgaccggtaatcagaacactactggtaatgctgcaaccgccacaaaattgcagacagcaaggaaaattgctggtgtggcgtttgatggctctgccgatataactttgactgcggctaaccttaatgcttatacgaaaacagaggtaacaaaccttctaagttcctatgcaagcagatcatcactgacaggctatagtggcaacctggatattattgctgaaacactggttgtcaaatcaggcggtagtggagggtttgctatatgggatattggcacaactactagcggtgccaatatgtacattgatccaaacccaggtatcaatacagtttggcgttcaacatcttcaaggcgctataaaaaggatattgaaacattacaagatcgatatgctgatgaacttttgtcattaagacctgtttggtatcgttcaatttgtcgaggtgaccgaaaggattgggggtattacggccttattgctgaagaggttggtgagattgccccgcaatatgtccattggcgtgaaccaacaaataatgattctccagaagatatttcctcaaatggtatggtcgctgaaggagtgatgtatgagcgtttggttgtaccactcattcatcatattcagcaattgaccaaaagggttgaggagcttgaaacgaagttaaattcacctaaagaataa

SEQ ID NO: 17805 - DNA, 279 bp, Escherichia coli
atgagcgaaaagaaaacaacttattgtcaggtggcattgtctgataaggccaatgacaaacttggaaagtttcaaatgaaactaaaagaaaaaaacatcaaaatgtctaaggctgaagttatcaataccatcctggaggcgatgacgatggctgagtttgataaagtttcctctgccgttggagtctctgctaaggctcgtgagaaaatcatgcgcatctatgaaaactctaatatgacaaaggaagacctagaacaaattctaagcaaactgccataa

SEQ ID NO: 17806 - DNA, 543 bp, Escherichia coli
atgggtgtacttgacattgatagtaattacttaagtgcaaggcgaataaaggaatgtgttcatatctattgtaaatcaaagcagtcttgtttagaaaagcaggcgtacctaacatcttctcaaaaaggagagcacaaactcatcaaatataaactaaaggcttcgcgcaaagatcgttatgagcactatatatacgtaaaggatattgaaggcaccaagacaaattgcggtattatcttttatccctatgatatatcaaaactgttctccattatgaaatcctgtgtcggcgtagctccaggtaaattagagttgcattcaaacttatacgattacccaaatgctcaaaaacagataaacgatagcacttcgccctatggattttcgtttctctttaagaatcatctcgcagtgaaagatttcatcgaaaaatacaatgagggaataatatcaggcgaattaaatttcaacaaaatctgcggaggtataaagagggacgacctcttaatagatatttacaatagaacccaagttaacgtgtaa

SEQ ID NO: 17807 - DNA, 141 bp, Escherichia coli
atgctggtggccttaaatgaccatcctgtttcccgcaggctaaaaacaccgacctcttacctccaggcaaccgacaaacccacctgttcccgtccggctaccgcaactttccactttgacgccttattcgtacaacgataa

SEQ ID NO: 17808 - DNA, 282 bp, Escherichia coli
atgactgatttcaccattaccaccaaagcacaaaatgtattcctcgaatcatggctggacttgccggaaacagaacagcaagaaatggatcatgtggattatgacgagcaggtaagcacgcgattcttccactttgagggctgcgtttacgacattgctgacttcatgcgagatgaccgcttccctgaatggcacgccagttatccactaaacgccttcgccatgctgatgatccgtgtggatgattcaggggataccatcgacatcgctctactccactaa

SEQ ID NO: 17809 - DNA, 693 bp, Escherichia coli
atgtcgattgttgataaagctcatatgtttgccgttggagtgtatggtggtgtaggtaagaagcgtagatatacgggggaagactacgttacacacccagtttctgtgcgtgagattgttgcttggcacggaggcactgtcgaaatgcaggctgctgcattattaaatggtgttattgaagacccccatgtcactatcgaaatggtacgcgagtatttcgggaatcgtgtagctgagatggtactggcgctggcaaacgttgccaaaccagacgacggtgatagtcttgcgagattcattattaatgttcgcgaattgcaaaagacgttggatatgcagacgcgaatgattaaattggccgacctgttggacaaccttactgctattaagctgtgtgcacctagcttctcacctatctattttgctgaaacagagcttatgctggaaatggtctttaacggcagggcaattggccctgatgctggtgttttagactatttagagagtaaaggcattgaacacgaattattggtaaacgtacgagcggtagtcaataaaggcatatctgacttgaagccagagtaccgaacgcaatatgaatcctacaaggagatgatttggcacaaatggcgtcaatcagaatatcagcatagtgcgaacgcaatctcccatcagccggatgccggtgcttaa

SEQ ID NO: 17810 - DNA, 1104 bp, Escherichia coli
atgaataaattagtgctagtcggacatcctggctcaaagtatcagatagttgaacattttttgaaagaaattggcatgaactcaccaaattattctacaagtaataaaatttccccagaatatatcaccgcttcattatgtcaattttatcaaacaccagaagttaatgatgtagtagatgagagagaattctcagctgttcaagtctcaaccatgtgggatagcatggttcttgaactaatgatgaacaatctaaataacaaactttgggggtgggcagatccatctataatattttttcttgatttttggaaaaatatagataaaagcataaaattcatcatgatatatgatcaccctaaatataatttaatgcgttcagtaaataatgcccctctctctttaaatataaataatagtgtagataactggattgcatataataaaagattgcttgatttttttttggagaataaagaacgatgtgtgttgattaattttgaggcgtttcaaagcaataagaaaaatattataaagccattgagtaatattataaaaatagataatctaatgtctgcgcattacaaaaattcaatattgtttgatgtggttgagaataatgattatacaaaatcaaatgaaattgccctgcttgaaaaatatacaactttattttctttaagtgcaaatgagactgaaattacatttaatgatacaaaggttagtgagtacttagtatctgaattaataaaagaaagaaccgaggttctgaagctttataatgagttacaagcctatgcaaacctaccttatatagaaacatcgaaagataacgtttcggctgaggctgcattatgggaggtagtcgaagagagaaattctatcttcaatattgtatctcatttggtgcaagagtcaaaaaagaaggatgcagatattgaattgactaaatctatatttaagaaaagacaatttttattattgaacaggattaatgagctaaaaaaagaaaaggaagaggtaattaaactttcaaaaataaatcacaacgatgttgtgagacaagaaaaatatccagatgatattgaaaaaaaaaataaatga

SEQ ID NO: 17811 - DNA, 174 bp, Escherichia coli
atgggtaatctgccagtgagaagtcgtggtttatataaaggtaaaaaacgcagcgccggtatgaatgaattacgtcatccgggaagcacacagatgacgcgcactggtcaggtgcatcgtggtggcgaacaccggctgaacacggggccaccggactggcagaccgtggaataa

SEQ ID NO: 17812 - DNA, 1158 bp, Escherichia coli
atgagcaaagcacccgtagtaatagatcttttttgcggatgtggtggttttggacttggagccaagttagcaggctttgatgtcatagccgctgttgatatagatgctactttgcagtcagcttatgcccgcaattttccaaatactaaaattataaatggcgatatttcattattgggagaatctgaatggaactcaataatattgtcaaagaaaattgatggaataataggtggccccccttgtcaaggctacagccgaatggggcattctgacgttaatgatccacgccgttcacttctgagacatttttttagaacagttaatataataaaacctaaattttttgttatggaaaatgttgaaggcttaatggatgagaaaaacgtatatgaattaaaatcagcactaaagatattggatgctgattatcaagtcctagaccctatgatcattgacgcttctgactttggtgcaccaacgagaagacgcagggttgtggttataggttttattcctgaagagtttgaatgtggattaaatagtgagacgctcaaagctggtaattatgagagaaatactgtcaggaatgcgataagtgatcttcccgcaccactaatgaaatcaaaaaacaatgatataactgatttcggttggcacaagtatagagatgtaaatgtagaaaatttatcaaaatatgcaaaagaaatgagatctcttccacctaaaggcatgggatggaaaaatgccatagataaaatgaagataggtgaaataagtggtttttttaatacacttcattctccaaaagttaaagcaagatattcttcgatattaccgggaatggttgatcctgttagtaaatcgaaatgccttttgtgggatggattatgtccaacattgagggctggaactggaagtgataagggaagtcatcaggctgtacgtcctttacatccagaagaaggaagagtaattactgttcgagaagccgcccgtcttcagggatttccagattggtttgttttccatcatactaaatggcacagctttagaatgattgggaacagtgtatccccattaatgtcaaaacatatcatgggggaaatttatgatgcattaaataatattgaaacgaatgctattaaggtaggctag

SEQ ID NO: 17813 - DNA, 1752 bp, Escherichia coli
atggaaaataatataatagaacgtttgtcaatagacaccggtgttagcgccacttttttggaagaagctctgacaaaagatgtgacgaccttagaagcaatatttgatttggttgataactctatcgatgcggcgagagactggttaatagcaaataaatgtaatagaggaaaagataatttacctctaacttatgatggattctatgtttgcataaggatagatgaagatagtattcgagttcttgataattgcgctggtattgatagagaaactcttaccaaaagagcattatatacgaataaaccatctcagcacgagtatggcattggattatatggaataggtttaaaacgctcattgctaaaaatgggtactgatttttctttttatgttgatgatggtattgaaggtttcaagtcgaggtttaataatcgagggatcggaggtggtaaggaagacccggtctatgctgatgttattcctacaaagaacagaaggaagtcactatttaacgtttccaatttaaaaaacgaaataaaaaatgatcttcataataatagatggttcactaatgccgtaagtgaattttctttgaggtatgctatatatgtacggaaaggatttaaaatagttcttcatcatgttaagaataatgttagagaaccgattaaaagtgtagctcctagcttaagaacaaaatgtgaatttccaccaacacaagaagtaataaaatttgatggagtagatgttattatcgaaacagggattcataatgaatatacattccccggtgaagataattatagtcttgcaaataatagaaaattaacagattattttggtatatacttttcctgcaatgacagagttatagtatctgcgagtacagagaagtcgcatggctggaaaacgaagtggcactcagaatataacggttatgtttgttgggtaaaatttgtatcaaaagacgcggctttgctaccttggaatacagctaaaactggattacgtactgatagttctctttttcttgctgtgagagatcgcttacagcctattgctgataattatagatcgatcataaaacaacgatattataacaagaaaaaagatacacctcaaaacccagtgaaaggtgataataaaggcattcccggtggcgaaggaggcgataaagtaactaatgctggtgctaacaccggacctgctgcagtaagaccaataaagccaattaaacccgttaggcccaaagctcggcctgtcactgatctaccgcgaaacagagatatctttgttgattgggggcgaaacacagtcgatgttccgaagtatcgcaataaggaatatcatatttttgtagaattgtgcaatttgagttcattagatgaacctataagctgcattgtcatgctgagagtttttttggagacaacttcgaaggaaacaatgaaatgcatgaatgctaactggaataaatcacttgcgaaaaatacagcttttatcgcacaatatctaaataaaaataattttattaccgatagtgtcaaacttttagttgaaaggtatggcaggactgatgaagaaaccctgctatccattaataatatacaatctcttgttcattctgttgattttaatactgacaaaactcttgtaaatagatactgggatgacttagaaccatttttatcaggttgttggcgtttcatcaaagaaatagatgataaaaaaaattcgatggctaactaa

SEQ ID NO: 17814 - DNA, 1035 bp, Escherichia coli
atggactttttcttgccagtaatcagtaaggatttgtttcatgaaaatttcagaagggtgctattaaagaatgatcaactggcccaagctctttttaatcaatgggcaaacggatttgtggacagagataacaaaataataaaagaatttcaaacatcattcaactcaacattttgggaagtctatctttatgcagtgttgaaaaattatggcttagatgttaactttaatttctctacaccggatttctgtatctctgattcagactttgtcattgaagctacaacggcaaatgcggcaagggataaaacacctgagtgggaaaaaaattatacaccagaagagatggtaaagttaaaccgatttggagagttgaatagagaagctattataaggctcagtagtgctataacgcaaaaagacagaaaatataatagcagttattcaaagttggatcatgtcaaaggtaaagcatttgttttggccgtagcaccatttgaacagccatattttaacttgcagtatgatcgtgcaatcagagctgtgctatatagtgattacgtaaacgaagatgcttatttagataatccagagctatatcctgaagggcctccaaatcaacatttagattatattactaaagataatggtacagaagtgccgctcggttttttttgtgataatcagtacgaaaatattagcgccatcatttttaattgcaacgcaacttggggtaaggttgttgcattagcgaataaaaataatccaaatggtcaaatcagctcagtttgggcagttccaccagaaggtaaaccaaaggggataatatgtaagccttcagaatataatgaaaacattctggacggcttgatgatatttcataatccctatgcaaaaaatccactttctccacatgtttttagatctgatcgagtagttcaattcatccccgatcataaaaccatgatgctacaagtggaaaactataataactgcctacactccagaagtgtaattgtcgccaattttatataa

SEQ ID NO: 17815 - DNA, 312 bp, Escherichia coli
atgaatacggatgataaaggtagaaagccgagatcagaaaaaaccattaagcaaaaaatagcatcagctcaaatgcgtctgaatcgccttaagagtaaagaaaaatctctatccaagagcgcagagacacgcttaaagatcattttgggtgcagaagtggctaaagctgttggctgcaaagtagaagaagtggataaagagttaatattaggattgatattacaatcctcgaatattagcattgaagataaagcaagggtaaaattaagaggaaaaagatttcttgaggatatggttgggaggcagaaatga

SEQ ID NO: 17816 - DNA, 294 bp, Escherichia coli; identical to SEQ ID NO: 5215

SEQ ID NO: 17817 - DNA, 561 bp, Escherichia coli; identical to SEQ ID NO: 6100

SEQ ID NO: 17818 - DNA, 429 bp, Escherichia coli; identical to SEQ ID NO: 7597

SEQ ID NO: 17819 - DNA, 573 bp, Escherichia coli; identical to SEQ ID NO: 7168

SEQ ID NO: 17820 - DNA, 207 bp, Escherichia coli; identical to SEQ ID NO: 7169

SEQ ID NO: 17821 - DNA, 408 bp, Escherichia coli
atgtctgatgctttaaagatcatcaacaatattcgtactctccgtgctcaggctcgtgaactgacactcgaaaccttggaagagatgttagaaaaactcactatcgttgtagaagaacgtcgtgaagaagaggcctcatttctaaagcagcaggaagagaaacaggccaagctggaagcattccgtcagaagttactggaagatggcatagacccggcagagttgctttcaactgttaactcatcttcttccaagaccggagcgaaacgcgccccacgtccagctaagtataaatacatcgataccgatggttctgaaaagacatggacaggtcagggccgaactcctcgtgctatcgctgctgcgctcgaagccggtaaggcgctggaagatttcgagatcaaataa

SEQ ID NO: 17822 - DNA, 330 bp, Escherichia coli; identical to SEQ ID NO: 8147

SEQ ID NO: 17823 - DNA, 645 bp, Escherichia coli; identical to SEQ ID NO: 7672

SEQ ID NO: 17824 - DNA, 198 bp, Escherichia coli; identical to SEQ ID NO: 6538

SEQ ID NO: 17825 - DNA, 330 bp, Escherichia coli
gtgatcatccagccgaatgatgatattttcccggctgtcggggatcggtttgccgctgaacagatgcagcattctttccaggtcagcgagtcgatctgcctgttgcccggtgataagatgcaatccccatcggtcccatctcaccagattgttgacgataattttattgccaaatttacaggggcaattggttttgtaattccagctcagccctctgaagaggttgatcacacctcgctcaaacacgtcatccttattctggtgcagttgttcaaacgtactcaggatattcgcctcgctgatttccggaaagttatcgtactccagtga

SEQ ID NO: 17826 - DNA, 312 bp, Escherichia coli
atgagagttgagcagaataatttcagggacatgttctccgtttatctctccggcccgccgcagacgcagcatgtgttttgtgtatccccggcggcccgggtcgcgcacacgggtctggcaggcgaagaacggctgaaagccttcccgctgcaggctttccagtacggtgatggtgggaatgtacgtatagttctggcttcgggacgtgtgtttatcttccccgaaaatccccggcacatagtgcatcagttcttcgtgtgtcagcggacggtcacggcgtatctggttcgtataaccaaaacgactggctag

SEQ ID NO: 17827 - DNA, 159 bp, Escherichia coli; identical to SEQ ID NO: 6188

SEQ ID NO: 17828 - DNA, 162 bp, Escherichia coli
atgaaacaaccgaaattaatgctcaccagtggtgaactgaatccccgccatcagcataccgtgacactgtatgcgaaggggctgacctgtgaagccgacaccctcggctcctgtggttacgtttatctggctgtttatccgacacctgaaacgaaaaagtaa

SEQ ID NO: 17829 - DNA, 819 bp, Escherichia coli; identical to SEQ ID NO: 6059

SEQ ID NO: 17830 - DNA, 354 bp, Escherichia coli
gtgcatcccaccactctgcattacgtctgggcccgggagtttggggagtgcaaaggtaaaaaacactatcatctgatgctgctggtcaaccgggatacctggtgtcgtgccggtgattaccgcgctccgggatcactggccggaatgattgaacaggcctggtgcagtgccctgggggtggatgccggatgccatgccacgctggtgcattttccggcctggccggcggtgtggctggcgcgtaatgatgacaccggctttcagcaagtgctggaacgtgctgactatctggcgaaggagcataccaaagctcactgcaccggtgagcgcaactttggctgcagtcgtggctga

SEQ ID NO: 17831 - DNA, 378 bp, Escherichia coli; identical to SEQ ID NO: 6181

SEQ ID NO: 17832 - DNA, 195 bp, Escherichia coli
atgcgtattcaccgtcagcatcctgcatcccgtctttttccgttctgtaccggtaaataccgctggcacggtagcacggatacatataccggccgtgaagtacaggatattcccggtgtgctggctgtgtttgcagaacgccgtaaggacagttttggtccgaatgtccggctgatgagcgtcaccctgaactga

SEQ ID NO: 17833 - DNA, 312 bp, Escherichia coli; identical to SEQ ID NO: 6177

SEQ ID NO: 17834 - DNA, 312 bp, Escherichia coli
atgagagttgagcagaataatttcagggacatgttctccgtttatctctccggcccgccgcagacgcagcatgtgttttgtgtatccccggcggcccgggtcgcgcacacgggtctggcaggcgaagaacggctgaaagccttcccgctgcagactttccagtacggtgatggtggggatgtacgtatagttctggcttcgggacgtgtgtttatcttccccgaaaatcccgggtacatagtgcatcagttcttcgtgtgtcagcggacggtcacggcgtatctggttcgcataaccaaaacgactggctag

SEQ ID NO: 17835 - DNA, 141 bp, Escherichia coli; identical to SEQ ID NO: 11045

SEQ ID NO: 17836 - DNA, 246 bp, Escherichia coli; identical to SEQ ID NO: 4533

SEQ ID NO: 17837 - DNA, 444 bp, Escherichia coli
atggaagaggcgtgcatctggttcagcggattctgcagccagggggacggagcctgttttgaagggcgctggcactggcagccagcgacaccccggaaaatcagggaatatgcccctcaggaccgtgagcttcatcgtatcgcggataccctgcaggcggtgcagaaacgtaacttctggcagcttcaggctgaaatcagtcaccggggacgttactgccatccgtacagcatggatatcaccgtcacccggaacagtccgactggtcaggcaatgacaaccgatgcggaagccgctgtcagcgaagccctgcgcgacctggccttctggctgtaccgccagctggaaaacaagtacgactggctgacctcagacaccgctgtggatgaggcccttctcatcaacgaatataccttcaccgaagccggtctgcgcgccggctga

SEQ ID NO: 17838 - DNA, 333 bp, Escherichia coli
atggcagggttccgttttgtcagcctgcgtcaccacaaacagcacctgctgatgtccgcactgcaggatgtgtcgccagaaatactcatccacagacagggcccggtcatcggctttaatcagccacagcaccaggtccagttcaggcagaatgtcacggtacagggcttcatactctgcatccctgtcccggctctcgcccaccccgggcaggtcagtgataaccatgctgtgaccgtgaccactcagacggaagcgctgcacttcccgggtgccggcgtgaacatcactgaccggtgtgacctccccctgaaacagtgcattacagagtga

SEQ ID NO: 17839 - DNA, 162 bp, Escherichia coli
atgaaacaactggaactcatgctcaccagcaatgaactgaatccccgccatcagcataccgtgacactgtatgcaaaagggctgacctgcgaagccgacaccctcggcagttgtggctacgtttatatggctgtttatccgacgcccgaaacgaaaaagtaa

SEQ ID NO: 17840 - DNA, 1080 bp, Escherichia coli
atgagaaatcgattaattgccatggttttatgcttatttggcatggtcgcgggggggcacgctacgccaaatgtgacggctgaaattacttatgatttggcgtcgggaagagccgattattatttatggaacaaagaagaaccaccagggaaagatgtgagcatgtggtataagtgcgcttatgccgatttacagcaaacctgtacgacctcagggacaatatcaattgtgcaaatctatcttactgaacagcgtagtgggatgcgttggccggtaaagcttaagggatatcaatctgtcactacgacaccgaatggtactcaatgtgatggttactctaaacagcgacctttgactgatagcgattggcgtacatgttataaccctgatggcagtccgagcgaagctgacaggaaactgctaactctctaccttgagcagacggaaatgaagaacctgccaattggtggtgtctggaaaggacaagtaaaactgcatttaagtaatccatcccaagactattttgcagatattaccctgaacaccctcgatcccaaccatatcgacgtgttcttcccggagttcgcccacgctacgccacgcgtacaactggatttgcatccaacaggtagcgttaacggcaacaactacgcgcaagatctgacgatgttggatatgtgcctgtacgatggctttaacggtaacggtcttagctatgaaattttgctaaaagatgagggaaaaacggcggcaggacgcagtaatggtgcgttttcgatttatcgtcagggcgcgagctcaacggatgaaggggagcgtattgattaccgtgtcaaaatgtatgacccggaatcaggtgggcaaattgatgtgcgcaacaatgagagcatggtctggaccaacatcaatcttaaacatgtccgcccggtggtgcttccaggcatccgttacgctgtgatgtgtgttcccactccactgacgctggtggtcgacaaatttaacgtgacggcaaaacaggcgggatattatatgggtaaattgtcggtcatctttaccccgtcattgccgacgatcaattag

SEQ ID NO: 17841 - DNA, 321 bp, Escherichia coli
atgtactatttaaaaaacacaaacttttggatgttcggtttattctttttcttttacttttttatcatgggagcctacttcccgtttttcccgatatggctacatgacatcaaccatatcagcaaaagtgatacgggtattatttttgctgctatttctctgttctcgctattattccaaccgctgtttggtctgctttctgacaaactcgggctgcgcaaatacctgctgtggattattaccggcatgttagtgatgtttgcgccgttctttatttttatcttcggaccactgttacaggtgatgctgccaacttactga

SEQ ID NO: 17842 - DNA, 804 bp, Escherichia coli
atgctttctacaaacttaatacagagtaattatggtgatttaaatattaaaaaccttgccttcgactcttttaaagaaagattgcagtctaccatgacagcactcactttctttatatcaacgggtcaatgtgcctgcgatgaaatagcagaatcaaacttcaattatatgattgcctatatgtctaacattaactatgatgcctcaaagccgggagcgccagcacttagttttgatacgtatctgcaggacaatgttaaatatagagtaataattaataatctttatggtagtgaaattcggataagaggtataaataaagattttattggaatggatgtcacttctgtatttcgcccagaaaaaatgaccaatttgatcaatataaaaaacaggttgattattcactatttaagaacgatatactatgaacaaaattatatacatcctgtcgggagcatttttgctgcgattcaaaaaaatgagagtctcctaaagtttccttcgataatatcaatgcttaatgtcaatcttctttttaatcccctgaatcttccgggaatgggaagtggtgtgcttgaagagattatgagtatttcagatagttcacttagaaaacgtcttgggtatgaggttttaagcttctcgctacaagcacattcattgagtcaggaatgtatcgataagttagccatttttttcgctgacgatctgtttaaatatgagtcagtatgcatcgccgcgatggaacatttaaaaagtaaggcaacggctcctatacaaaacggaccgttgccagcataa

SEQ ID NO: 17843 - DNA, 1737 bp, Escherichia coli
atggaggacacgcaggccattgacactatccttgatgagcatgccactatgcaatcgctgggaaaggatactggtacgagagtgcaggcaaatgcggtgtatgatctcggtcgatcagatcagaatggaagtatcacgtattcctctaaagccatctctgaaaatatggttatcaacaatggccgcgctaatgtctgggctggcacgatggttaacgtttcagtcagagggaatgatggcattcttgaggtcatgaagccgcaaataaattatgcacccgctatgttggtgggtagtgtcgtggtttctgagggcgcttctttaagaacgcatggtgccgtggataccagcaaagcggatgtttcgctcgatggtagctcatggaccatcattgccgatatcactacgacgaaccaaaacaccctcctcaacttagccaaccttgcgatgtctgacgcaaatgtgattatgatggatgagccagtgactcgttcatcagtgacggcaagtgcggaaaatttcattacgttgaccaccaataccctgtcgggaaacggcaatttttatatgcgtaccgatatggctaatcatcagagcgatcagctcaacgtcaccggtcaggcaacaggtgatttcaaaatattcgttacggacaccggtgccagcccggcagcaggagatagccttacactggtaacgacgggcggcggtgatgctgcatttacgttgggcaatgccggaggcgttgttgatatcggtacgtatgaatataccttgctggataatggcaaccatagctggagtctggcagagaatcgcgcgcaaattaccccttcaaccactgatgtgctgaatatggcggcagcacaaccgctggtatttgatgcagaactggacaccgtgcgtgagcgtcttggtagcgtaaaaggcgttaattacgatacggcgatgtggagttcggcaattaacacccgcaacaacgtgaccactgatgcgggagctggctttgagcaaacattgacggggctgacgctcggtatcgatagccgtttctcccgtgaagaaagcagtacaattcgcggcttgttctttggttactctcattctgatattggttttgatcgcggcggcaaaggcaatgtcgatagctataccctgggggcttatgccggttgggagcatcagaacggtgcctatgttgatggggtggtgaaagttgaccgttttgccaacaccatccatggcaagatgagtaatggggcaacagcgtttggcgattacaatagtaacggcgcgggtgctcatgtcgagagcgggttccgttgggttgacggattgtggagtgttagaccttatctggcctttaccggctttaccacagatggtcaggactacacgttatcaaacggcatgcgcgcggatgtgggaaatacccgcatattacgggctgaagcgggaacggcggtaagctatcacatggacctgcaaaacggtacgacgctggaaccctggctgaaagccgccgtacgtcaggaatacgccgattctaaccaggtgaaagttaatgacgatggcaaatttaataatgatgtggctggaacccgtggcgtttatcaggctgggataaggtcatcgtttaccccgacgttaagcgatcatttgtcagtcagttatggcaatggcgcaggggtagaatcgccgtggaatactcaggcgggtgtggtctggacgttctga

SEQ ID NO: 17844 - DNA, 153 bp, Escherichia coli
atgccactgaattcccccattgaaacgagtggtgtcgtcaaagctctggtgtggagtgcagcactcgattccaataactcgcacgttcagttttggggagatgtaagggctaatctgaacggctgcattccttgtttaaggaaaaacgaatga

SEQ ID NO: 17845 - DNA, 279 bp, Escherichia coli
atggttttgcaatccacgcgctggttggcgctcggttatttcacatacttttttagttacggcatttttctacctttctggagcgtctggcttaaaggtattggtttaacgccagaaaccatcggcctgttattgggggcgggtctggttgcccgtttcctcgggagtttgctcatcgcgccccgcgtcagcgatccttcccgcctgatttccgccttgcgcgtgctggcactgctgacacttctctttgctgtcgccttctgggcggggcgcacgtag

SEQ ID NO: 17846 - DNA, 3108 bp, Escherichia coli
atgttttcgcgcttttttgttcgccgcccggtctttgcctgggttatcgccattttgattatgttggcggggattctggctattcgcacattgcccgtcgcgcaatatcctgacgttgcaccgccgaccattaaaatttcagccacttatactggtgcttctgccgaaacgctggagaacagcgtgactcaggttatcgagcaacaactcactgggcttgataatttactctatttcagctcaaccagtagctctgatggttcggtcagtattaatgtgacctttgaacaaggtaccgatccagatactgcacaggttcaggtgcagaataaaattcagcaggcggagtcgcgcctacccagcgaagtgcagcaaacgggtgttacggtggagaaatcacaaagcaactttttgctgattgctgccgtgtatgacaccactgacaaagcctccagttcggatatcgccgactggctggtcagtaacgttcaggacccgctggcgcgtgttgaaggtgtggggagtctgcaagtctttggcgcggaatacgctatgcgcatctggctcgacccggccaaactggcgtcttactcgctgatgccttcagacgtgcaaagtgctattgaagcgcaaaacgtgcaggttactgccgggaaaataggggcattgccttcaccggatactcagcaactgaccgcaacggtacgtgcgcagtctcgtttgcagacggtggatcagttcaaaaatattatcgtgaaaagccagtcagacggcgcagttgttcgtataaaagatgtggctcgcgttgagatgggcagtgaagattataccgctattggcaaacttaacggtcacccgtctgccggggttgctgtaatgctttcgcccggtgcgaatgcgctgaatacggcgacgctggtcaaggataagattgccgaattccagcggaacatgccgcagggatacgacatcgcatacccgaaagacagcactgaatttattaaaatctccgtagaggacgtaattcagacgctgtttgaagccatcgtattggtggtttgcgtgatgtatttattcctgcaaaacctgcgtgccacactgattccggcgttagctgtccccgtcgttttgctgggcacattcggcgttcttgcgttgtttggctattcgattaataccctgacgttgtttgcaatggtgctggcgatcggcttgctggtggacgatgccattgtggtggtggagaacgttgaacgcattatgcgtgacgaagggttgcccgcgcgtgaagccacggaaaaatcaatgggcgagatttctggcgcactggttgccattgcgctggtgttgtcagccgtattcctgcctatggccttctttgggggatctacgggggtaatttatcgtcagttttcgataaccattatctccgcaatgctgctttccgtggtagtggcattgaccttgactcccgccctgtgcggttccgtcctccagcatgttccgccacataaaaaaggctttttcggcgcatttaaccgcttttaccgtcgtactgaagataaatatcagcgaggcgtaatttatgtcctgcgccgtgctgctcgaacgatggggctttatgtcgtactgggtggtggaatggccctgatgatgtggaaactgccgggcagtttcttacccactgaagaccagggcgaaatcatggtgcagtacacgctgccggccggggcgaccgctgcccgtacagcagaagtgaatcgccagattattgactggttcctgattaacgagaaagcaaataccgatgtcatttttaccgttgatggtttcagttttagcggcagcggacagaataccgggatggcgtttgtttcgttgaaaaactggtctcaacgtaaaggggcagaaaacaccgcccaggctatcgccctacgggcaaccaaagagttgggcacaattcgtgatgccacggtatttgcgatgacgccgccagccgttgatgggctggggcaaagcaatggttttacgtttgaattgttagctaacggtggaaccgatcgtgaaacactgctgcaaatgcgtaatcagttgatagaaaaagcgaatcaaagtccggagttacattctgtacgcgccaatgatttgccacaaatgccgcaattgcaggtagatattgatagcaataaagcggtgtcattagggttgagtttgaatgatgtcaccgacaccctgtccagtgcgtggggcggtacttatgtgaatgactttattgaccgtggtcgtgtgaaaaaagtctacattcagggcgacagcgaatttcgttccgcgccgtcagacttaggtaaatggtttgtgcgcggtagcgataacgccatgacaccattctctgcttttgcgaccacccgctggctgtatggaccggaaagactggtgcgctacaacggctcggcagcctatgaaattcagggcgaaaacgcgactggctttagttccggcgatgcaatgacaaaaatggaggaactggcaaacagtcttcctgcgggaacaacctgggcctggagtggtttgtcattgcaggagaaactggccagcggtcaggcattaagtctgtatgcagtttctattctggtggttttcctctgccttgcagcactgtacgaaagctggtcagtcccgttctcggtcattctggtgatccctctggggcttcttggcgcggcgctggcggcctggatgcgtgatttaaacaacgacgtttacttccaggtagcgctattaactactatcggcttgtcatcgaaaaacgccattctgattgtggaatttgctgaagcggcggttgcagagggctattccttgagtcgtgcggcattacgcgcggcgcagactcgtttacgcccaatcatcatgacctcgctggcgtttattgcgggggtaatgccgctggcgatagcaactggcgcaggggcgaacagccgcatcgccattggtacgggcattattggcggcacgctgaccgctacattactggccattttcttcgttcctctgttttttgtactggtgaaacgtttgtttgccggtaaaccgcgccgtcaggagtaa

SEQ ID NO: 17847 - DNA, 456 bp, Escherichia coli
atggctaaatcccgtttcacagataagcaaattgctgaaattttacagcgttcaaaagagggggcatctaataaggagctttgtgaacactatcaatttagcgttaacacgctgcggcgctggcaagaacagcacgctgacggcatcagaagcgaattaaaaaaaatagaatctaaagcacagatcgtctttctgcttttcattgctatcgtcattatactcacgcttatatttgataaacctacaggtggatgggcaataccgcctttattactctattgtgtttattatatccgcctgtatcgcaacatctccgccagacatataaaaaaagaagacatttttctctctcgttctgttaataacagctatagcgccctttataatttgagctggacgtttatttgtttttttatttttgcagtaatctatttttttattcaggtgttttcgtaa

SEQ ID NO: 17848 - DNA, 150 bp, Escherichia coli
atggccctaacggatactaaagttcgttctgcgaaaccagaggagaaagagtattcacttgttgacggcgacggcatgtctttacttgtaaaactgtcggttcaaagtattggcgatttcgtttccgttttggcggtaaacaacatttga

SEQ ID NO: 17849 - DNA, 894 bp, Escherichia coli
atgtactactcaaagtttcttgagaaacacaaatcccccctcagccacgcacaatggttgcgcttgcgctatattgagcgccagctactgtgggaacgaaaagtcacttcgcgcatgattgctgaagagtttggcgtctcggcgcaacaagctcgtactgatgtaagaacctatatggaggtcgctccaggcaatgctattgagaagggggccggccgaaaagggtatttccccagtacgacgtttacgcctgttttgctgggagacaacgatctggtctggcgtgcgacggtagaatttcaaccgccgcaagcggcccacgcgcaggaaatcccgctcatccatcgcgccgtgcatagccgcacgctggcaatttttttgtcagcaatcgaacagaaaggacaagtaaaagtgacttatgcgtcaatggaaaacccggaaggcatatctcgtacactaagccctacggtaattatcaccgttaacgggcgtcagcatgtgcgagcctatgactggggaagttcggcgtttaaggactttgttttggcgcgatttctggactcgccggaactgattgttcctgcacccgccccgccacgcaaagataccgcgtgggaggtcataatccccgtgcgttttatcgcaaatccaacactaaacaaagcgcaacaagaggtaattaagcgggactatttacttgaaccctctgaattcaacattcgtgcaccaatgattttttatttatgccctgaaaacaatctgcctaaaacagatgatgaatatgcacaagctactgacgccagcagccacggcccctttatctaccctgttctagctgtgcacgcccaaacaggggagcctattcataagtaccgccatgcaggtgagagatag

SEQ ID NO: 17850 - DNA, 1467 bp, Escherichia coli
atgtcgctagggtttttggagcaggctcgtaatgaatcaatggcacgtcgtgagctgtctattcagtctcacgccttgctggtcgtgcggacgctggattcaatatatagcgcccttcagcgaaatccgttcgatggtgttgagcttgatgcgctggcggcaatcatgtatctctttgacgccatgctttattatgctgaccgcgagcgccggcctggaatgacgcgtaaggaagcggagttatgtctggttgggcacctcaatgaagcctatccgggacaagaagaacccgactacgcacaagtggccagcaagatttttgcggcgatcaaagatcctttccgcctccgttattatgatttttcgcaacgaacgcattccgaagagcagatagtccgtctggtacgctatgaccagctatccggctcagatgatattctctggtcgctgactgatgaaggaatgttgttctataccctgcgcttggatgaaacgccgatagaacgcgctgcgattctggcctggcgcacgcttaaaaccatccgtcgcggagagatcgacaaggcagtacaccagatccaatcaacacagcggcaactggagcaatatctgattggaatgcggatgaaagtgcgtgccgcccagtctggtgatttgagtgcatcttatgcacacgatatccgtcccgtactcaatgattcctttgataaaacccgagaggttttggaacatatccagaactcaatgtcggccattaccgaaatgctggttgaaggaagttcgaaaataaatcccgacaaattaaataagctacgtagggcacaggagatttttgctgaggtctgcgcttttacgcagcgctatcaagactgcttacttgatgttaacaaagattttgagcgagctcgtctgaaactcattattcccagagataataccctctttcgggaaacactggaaaaaggtgcactcaagcccttgctgtctcattcccccgacactgtcgaaaaggaaatcgatgatctcaccgcacgcctgttggctccccgaagacaggatgatgatcggcacattctgtttgaccttgaggcgctgctgaacctttatctcgatagatttgaacaggcgcttccacatgagatacaggacctcaccgatcagcctgtagctattgaaaccaacctgcgaggtatccctgaatctgtcattaaaaaatgcagcgattgggttagtgaccgattgaagaattggggacatgtgagctttagagatgtttttgacgcctatgagggcgaagaattatccgaacaagagcaacaggtttgtttactccatattggcagcctggcagctaacagcgatcccgcaatagaagtggagatagacggcgctatcgaaacaacgctctggcgggctaacaatatcaaactgttaacggttgctcccttatacccctttgaggagtag

SEQ ID NO: 17851 - DNA, 897 bp, Escherichia coli
atgtacgacaacgcgcatcaacaaactaaacgctacgccgagattgccacgcaggcaattatgaattcactgggatataaaatgggggatgagctgattcaacgtgctcttgatctgcaaggtgatgccctgttcacagagattatccgtggcgtcgcgacaggtatgaaattgcggtatctcgggattcatgagacctacggggtattactggctgcagatggccgaggtccgttttccccatctttgggttggctgaacaaacgcttgctacctgaaacaatggctgagcaacagggtaaggaacggaaagaacagcgcctgtttgcaggcttaactctgattgcgttgctggctgatttgtttccaactccagacaccgttcgtgtcgagttcggtcagagtaacgccattaatgcagcctcggtggtagccaggctcaataatgttgccgaccaggtgattgcccagcgcaaggccgagggtgacgataccgtagatggcctacttatggcggccaggtttgtgcaggaagaacgtattccccgtattcacgacgaaaaggtagggcgtgtctcaagtattcgctcgcaaacagaaatggcaacgcgctggatacaactgctgcaggaggaaggctttctggccgaagacagcagtttgtcgggagagtccgactggtatccgacccaaaaactcaaacattatctgcgccatactggcatcgaagagacggtgcgctttgtcatgagcatcagtccagccgtagaagaacggtcgtccgatttagctgaaagcgatcttgcagcattagcagataccctggagtttccttcgctcaatgaacgtccagttacaactggaaccacagaaacgcaacgcttgacggagatttaa

SEQ ID NO: 17852 - DNA, 4014 bp, Escherichia coli
atgtggctgattaaacgggtttatatggatggtgcaggccatgaagaagctttctacaaggacctcacactggactatattggcctgtctcaagcggtcagtagccctgttgttgaaggtctgcgctcgcccgtcaggaatgcgaaggtggtgaccagtacttatcagcagcttgtgaatggggggggtaagtcgacctacatcgcgctgctgttatcgatttttgagccgtccgttagtgacttcacccaatatctggcaaatcatcgccagagtgaataccactaccgcaattacttctataaagaactctctgttgttttggttgagatggtcaatgaatcaggacaaacgttattactaggacatgctcatcagcgtaatggagatgatgttgaccggacactgtttatttgtgatgcgcccgactccctgatgggcgcgccgtttgatgaagtcccttcttattcccgcgcggaacgcaattctgagctgcgcccctatgccaatagcctgcgcagttttgatagctggcttaatctcaaggccggtagtgaaggcggtatgcattggcgtaaaaccaccagacagaacgagtggcgcgcatttttactggaacaacaaattaacgttgatcttatcaaaacaatggtgaccttcaactccgaagaaggtggcctgacccgctttatcgaatacaaaactgaacatgatttccttggcgcgttcttcgcctgcaccatgtctaaagatgcggctgagcggctgcgggaactggtagcgcatgaagttgaacgtcagggagagttagaggggattcgtcgtaacgagtccttcctgaaggatgtgctggctaactggctggcgtttcttgatccggctaaacagctggaaagcatccaggcacagcagcaactgctggatgatggcttccgagaagcaatgcgcgatctcgcagcctttgtcggggatgctcaggttgaacagacgcagcttgaagataacatggatagtttgcaaacacatattggccaggcgatgtctctgcgtgagcagttaggtaagtgcagagcactgcttgaatatgatctcgtgcagcatcagttcgacaaacaaaaagcgatagtcgatgcgcttcaagacgaagccgataccaatcagcaccagattgagattactcacgctgctatagactacaaagcctatgctaaggccctgaatgagtaccgccaggcagatgaagatctgaaggtattccaaagtgaaacggaaaggccgctacaggtgattttcgagcgtactgctggcgaagccttgggcacattagagtgggcaatcgacagacatcgccagcaggaggctacgcttgaggaagaattagggcagatggacagggaaagccatgtcctcagacagtcatacgataaactacaaaagacgttgggtggtctggaaacggagcgtgacggatataaaagagacaaatttcagggcgaatcgcaacggaatgaattatgtgaagctgggttgatccagaaggatgaaacaccagtagcagcccaataccgactggaattaaccttacgcgatgcaaagcagagtgaagaactggctaatacaattcttcatcagaaagagcaggcgctggaagcacagctgaatgttgtgcgggaggcatcaattgagaaaagtgaggcccagcaaaaactcattctggctgaacaaaaacaccagtcagctgtggatagtgccttacttttagcaaaaacctatcaaaaactgccatcgtcaacgcgacatgatctagatattgaagacacgagttggcacagcgagctgtgtggattgcagctcgacaaagtattgaatgcgaacgctcaaacgctgaatggaatgaaagagcgtttactgcaagcccggcacgaactggacgagttgagggggacgggacatgaactggttgctaagcaggtcaatgaggcacttgaagcgttttatgctgcgggcattgcacgggataagctatggacatttccacactatttggcctctgctcacaacgatgatgcacaaaagattgcagcggtgatcgatcagaaccctggccgctacctgagtctggtcgcactcgacaatgtaacgtttgaacaggtccataaaattagtgagatcctaccctggaagaaggcacctattgctatttacttgctggatgaagcacaagatctccgccgagaaacgtctgaattagtacaggttgtcctctcaaaccccgataagcacggatatagccaggccgcttacgaaacccggctgcaagacctggagaataccgtagcgtcgcaggaagtcagtgtgaaggctgcggagagcgcccttaaagtactggaatctttcaggaatgactggagtcggcattacgaacagtatggtaagcattgggcgggactgcttgaccaacgggagctggctctattaatactggaaaatgctgatgcagcacttaagcaagctgagcatgatgagcaaacactgcgtgacgagaagagagatgtccaggtgcgtttaaacaacgcccaacagcagaaaattcaggcagaaaaagcacatgataaagcgagtctttttgtagaaaaagaatgggcgaagcgtgaaacggcgataatgaaactggagcagttagctgcacagattcagcgaagcaagaacactctttacacccagagagagaggctggaacggctgagcgagctcgagaagaacaaacgctccgagaaaacccttttaattatccagataggtagctggagtaatctgtgtaacgaaccgttctattcagagattacggcgactgaaggtatggaaggacgaagccctgaatatgcccatgagatggctgctcaggcgcacaaaaaattgctcgaagcagccaacggtgatcaagtgaccgttctcaagcaacaactgaaagatgctgaacaggcacaacgttacgcctctgatcgtttgaccgctcaacccacctacaatacatatccggatgaggtaaaagctgcggccatcaatgagctaacggtaattaataacagcatcgtacgcctcaaagaacagcaaaagcaattcacgcaaaatctaattagctctcaggtaactctgcaaaaattttcccaaagctgtgaggaggctagtaaagcacttgacgaggattttgtctgggaagagaagcccattgagatagaggcaatccaaacgtctctggctgaaatcgtcaataacctttatgcgattgaacaccagatcaagttcctactggaacaaaagacactgctgttgagaaagattgaaaatgtgaaagagcggctacagaacgccaaaacagctcaagcgatgatccagcccattacgccgagctctgccgcgggtctacctggtaggatcctgagcatcacagaatatgctgacgatctggctgcacaatgccaaatgtatgccggtttaagtgaaacgctaaaacagcaaaatatgcgcgtctctacggtctggggaaaattccgcaaacggatcgaagaagagttggccaaggatccagacgcccgagccagtcaggaatacttacggcagttggactcaatcgcaacttatcatgaagtgctgggcgatttggagagggtcggtacagggatctcgcaggtattcgaagctgtgcaggacagcctcgagcaattccaacgttcgattgatctgactgtcacccatctgactgctcatctggaaggggcgattaagcttctcaggcgcgcgatgtcggtcaaaattcctgaggattgccccgtactgcctggtcggcccattattaaaatgaccgaccggttgaatgatgttgccgctgatctcaggggttttgccagcagccgcttgcagcagtggatagccaggggacagataccccgagcgcccaatcgggatgaaccgccccgggaatcctggagactaaacttcctgagaaagaggtaa

SEQ ID NO: 17853 - DNA, 1191 bp, Escherichia coli
gtgctattcatggaaaataatgataaattcttatcacaagacttattggaatcttatgccattcgtttgttgagcggaccattgaatggatgcgagtatgaaatacttaatgggcgtctacttgttatcattggtaatgatgtttcgttaggaagaagtgatgctttttctgagttaccagaaaacacaatagtcgttccttatggcgagcttacaggtagttttgagataataattactaccgaccctgatctggtagtaacattcagagaattaacagcacaagaacctgaagatagaacgttaacattgaatcagcaaatagaagttttaggtctcaaatttgctgtaaaagaaaaaaatgaagtttggcagtattcattgccaggcattattgaaaataacattatttctacaaaacaacatttctttagcagtaagctgtttaagtatgtaatgcttttttttctttttgctatcattttcattgctttttatattgttaatgccagtaatgatccgcagctgagacatatcgataaaattcttgtaaacaaaaacaggaattatgaaattttatatggtagagatcatgttatctatattaataccaatattttggatgaagcagtctgggtcaaacaagcactggaaaaaaatcaaccaggaaagccagtacgggtgataaatcctgatgatgaatcgatacgaattttttcatggcttgctgataatttccctgatttacaatattttaaacttcaactattagatgccagtaatctaagattgacagtgagtaagcaacggaacgctatcacacagcaactaatcgataatcttattaaaggattactgcaaactatgccatatgccagcaatataagtattgcggtattagatgataatgtattggaaagtcaggctattgaaacgttgtcagcgataggtctttcttatgaaaaatataaaacagctaacaatgtgtatttcaatatcattggtacgttaagtgacagtgaattaaataaaattaataactatgttgacgaatattataaacaatggggtaaacaatatgtaagatttaatgtgaatttgaaaaatcaggacacaaataatagttcatttagctacggagataaccgattcgagaagtctcaaggtagcaagtggacatttcaggaataa

SEQ ID NO: 17854 - DNA, 732 bp, Escherichia coli
atggccaataaaactgaaaagccaacacaaaagaaactccaggatgcttctaaaaaagggcaaattctaaaaagtagagacttaaccatctctgtaataatgcttgtgggtactttatatctcggatatgtttttgatgtgcatcacattatgtcgattcttgaatacatccttgatcataacgctaaaccagatatttgggactattttaaagctatgggggttggttggttgaaaacgaacattccttttttgctggtttgcatgttcacaacaatacttgtctcctggtttcaaagtaaaaagcaattagcaactgaagctgttaaatttaagcttgattcattgaatccagtaaatggcttaaagcgtatatttggcttaaaaaccgtaaaagaatctgttaaagcaattctttatattattttttttgcattggcgatcaaagtattttggagtaatcataaatcactgctttttaaaactcttgatggagatatcatatctttattatcagattggggagagatgctattccttctcatactgtattgtctcggcagtatgataattgtcttaatttttgattttatcgctgaatattttttatttatgaaagatatgaaaatggataaacaagaagttaaaagagaatacaaggagcaagaaggaaattcagaaattaagtctaaacgcagagagcgcatcaggaaattctttctgagcaattga

SEQ ID NO: 17855 - DNA, 1128 bp, Escherichia coli
atggtgcataaaatgccaaaaactgtcttagaaccgctcaaaacacagatgatttccccggatgagttaatcttggatgctagaaatccaaggctttataacgggaaaagctttaatgataatgctgactcatatgagttggttaaagcattatctgatactgcagatttagaagaattgattaaatccatttctgaaaatggatatatgtcgattgaacctttaattgtcatgaaaaaagatgataagtatgtcgtcttagaaggtaatcgtcgtttagctgccatcaaattgcttactgaaccgggcttggcacaaaaatgtcgagttgtcgttccaaaaaatatagattcttgggttttggatagcctcaaggaagttgctgtttatcttgttaatgatgagtcagaagctcgttcatttattggatttaaacatgttaatggtccccataaatgggattcgtttgctaaagcacagttcgcatataaatggtttataagtgaaagagataacggtctcactattgaacatataacaaaaaaacttggtgacagtaacaatactgttcgttctatagttagtgctatgtttgttcttgaacaggctaaaactcaagaaatatatgatattcatgtcgacagaatgtcaccaaaattttctttttctcatttgtatacggctttgaatagaactgaatataaagattttttaggattggagaaagattggaatattacactcagaaagaatcctgtaccgcaaaggaatcttgataaactcagagatgttctgatcggtctttatgggtataaaaaagataaaagagcatcgttgatctcttcgcaaaatcctgatttgaaatattttggtgaggttttagcgaatgaggcttcatatgaagcttttaagtctggagttgaaagtctttctgaattatataagcaagcgggtgaccctcttcaacacattaaagatgcttttttggaaataaacaaacaacttgatactatatcttctgttttagatagaacagattcgttagacgatacgacgaagaactacatcgaacagtttaagagaaaggtatctaaggttcaatatcaattgcagagcattgaggaataa

SEQ ID NO: 17856 - DNA, 1020 bp, Escherichia coli
atgcagttgcaaccttatccagagagtcatcatattcaagtcaaattggattggcttgagttatcttgcttatcaaatgtatattttacaatgcgaatttcagaactaaggaatattctagagaacttagattcatttacatcttccgatataggcgaagaagatgctgaagtcgaaaatgaaatacaaagactattagaacaatatcaacaaagaaaggatatactcggggatagctatccttttatttttaatgaagaaacgcaatgtttggaattggcaaaggaaacattggaattacttaccgtagatcagcatatatacttatattgtttgtatttttctcatatgtcggcatcacggctatttaatggggtagatttgccgacaggaaaacaccgagacttattacagattgctgcaacaattgcattagctggctatgttcaggggcatagtatttcattcggctggccaagacctgatagttcaaagttttatgatgctcttactagagctgttgatttaattggtgaaggaagggttagaccatttgaggatgttaatcgttatttgcaaacacgacctcataaagatgctggtattgatgtgattgcatggaaagataataatccccgcgatacatatccgggaagcaagcaaatttattttgctcaagttgctagcggccaagattggcgttcaaaagcaataaaagaggatattgcaaacatacaaaatcactggttagcgcaaagaatatatagaataactgatgctattgttataccttttgattttgagagtgatgatgaatctataaagaaagaccatatttcactagtcgcagaggagtttggcgcagtattgcatagactccggttacctacttgctttaagaaagggttagaactgttggtatcagatccagggctactaatagaacggaaagatgaaataaatgatatttcacaatatgtgatttctacaactgaaacattacaagcagaagcggcctga

SEQ ID NO: 17857 - DNA, 1005 bp, Escherichia coli
atggatcagagaatccttgaacatgaagcgattaaacaacttagcaaaaaatcagtgcgcaagttgtttggggttcacgatatccctagagccagttcaccatttcgctatccaggaggtaaagacaaacttgcctcatttctcgctatttttcttgtacataataagttaaatggtggccggtttattgaaccattttgtggtggtgctggagcatcactttctttactattgggcggatatgtaaaagagatccacttaaatgataagaactatgctttattttgcttttgggatcaattaattaacaacactgataatttattggatatggtatatcagaatataccatgcattgacgattggcataaacaaaagaaaatctaccaaacgagtattattgaccccaataaatacaccaaactcgaatatggttttagtgtattctatttaaacagaacaaacagatctggagtactaagcgctgggccaattggcggtttagaccagtctggaaaatataaaattgattgcagatacactgtaagtacgcttattaaaaagctcgaaaaaatagctagcatgcgtgactctatattcgtttataacgagcactgcattgattttttaaaacgtttcaatagtaaagataactatgatcatgatttcgtttatctagatcctccttatgttaaagaggggcgcaacatttattcaaaaaacttttgcttcgatgacactcagcatcgcgagcttaaggattacatagctggttatgcaaatcgttggttaatttcttatgacgatcaccctctagtgcatgaattatactcaaaacatggcacaagagccgttgagataagttacgccatgaataaagcaaaagttggaaaagaattaatgatagcggattctcgcttaagaatgccagaatcattattctctgttgatatattaaaatctggcgaaataccaatgaagaaaaaagtagttaaaatggcctga

SEQ ID NO: 17858 - DNA, 1653 bp, Escherichia coli
atgttagcgcagctttttgagcagttgtttcaatcgatagactctacactgatcaccaatattttcatctgggctgttatattcgtatttttatcagcgtggtggtgtgacaaaaaaaatatacatagtaagtttagagaatatgctccaaccttaatgggggcattaggtattctgggtactttcattggtattattattgggttactcaattttaatactgaaagtattgataccagcatccccgtattattaggcggcctaaaaacagcattcattacaagcattgtaggtatgttttttgccattttatttaatggaatggatgctttcttttttgccaataaacgaagtgcgttagcagaaaataaccctgaatctgttacacctgaacatatctatcatgaattaaaagagcagaaccagactctgactaaattagtctcgggtattaacggtgatagtgaaggttctcttattgctcaaataaaattactacgtactgagattagcgattcctcgcaggcacaattagctaatcacactcatttcagtaataagctttgggaacaacttgaacaatttgcagatctaatggcaaaaggtgctacagaacaaattattgatgctttacgacaagtcattattgattttaatgaaaatttaactgaacagtttggtgaaaactttaaagcacttgatgcctctgtaaaaaaacttgttgagtggcaggaaaattataaaacgcaagttgagctgatgtcagaacaatatcaacaaagtgtcgagtctctggttgaaacaaaaactgcggttgccgggatttgggaagaatgtaaagaaattcctctggctatgtctgaactgcgtgaagtgcttcaggtgaaccaacatcaaatcagcgaactctcccgccatttagaaacctttgtcgccatccgcgataaagctacaaccgtattacctgaaatacagaacaaaatggctgaagtgggtgaactgctgaaatccggagctgcaaatgttagtgcatctcttgagcaaaccagccagcaaatacttcttaatgcagattcaatgcgcgtggccctggatgaaggtaccgaaggattcagacaatcggttacccaaacacaacaagcatttgcctcgatggcacatgatgtcagcaattcctccgaaactctaaccagcacgttaggtgaaacaattactgaaatgaaacaaagtggtgaagaattcctgaagtcactagagtcgcactcgaaagaattgcatagaaatatggaacaaaatacgactaatgtaattgatatgttcagtaagactggtgaaaagattaaccatcaactatccagtaatgccgataatatgtttgattcaatccagacatcatttgataaggcaagtgcagggctgacttctcaagtcagagaatcaattgaaaaatttgctctatccatcaacgagcagttacatgcttttgagcaagcaactgaacgtgagatgaaccgtgaaatgcaatcattaggtaatgctctgctttcaatcagcaaaggttttgtcggtaactatgaaaaacttattaaagattaccaaataattatggggcagttacaagcattaatttctgctaataaacatcgagggtaa

SEQ ID NO: 17859 - DNA, 4353 bp, Escherichia coli
atggacgttcagcaactgcattatgcgccacttctaaatcagcttcatcagcgcgcggtgaggtcggtggtaagtcagttggcattgcggagcaagtcgttgactcattatctggaatcacaatatttccagcctcccggtcaggaggggtcactgcttgcagacccggtattcgaaagcacgttcggctggatgcctgcggatgaaacaatggaggatttgcgggacaagctaatttccagcccgctggttgatgcattgagcaaagcgccggtgccatttcgtcatcaacttacggcgtggcgaacgattctggaagacaaaaaatccttgttagtgagcagcggtacgggatccgggaaaacagaatgctttatggtaccggttctggaagatcttattcgtcagcaaaaatcgacccgtcagtcactaacagggacacaagctattttcttgtatccgttaaatgcattaattaacagccaacaggagcggcttcgcgaatggacgcgcggatttaaggggaaaatacgcttcgcgctatataatggcgaaacccggcataccaaatacgaagttcaggaagatcagttgaaagtacctgaacaagctttgagtcgggaagccatttacgaagcaccaccttccatcatggtgacgaataccaccatgctggaatatatgctgattcgtcgtaaagatgccccaatcatcgaaaagtctcaggggatgttaaagtatatcgtcctggatgaagcccatagttatattggttctcaggctgctgagttagcgctgcttttacgtcgtgttatgcaggctttcaatgttggacctggcacagataaacctgtgcagattatcgcgacctctgccactattggtgaagactctcctgaaggtaataaggagcttgctaaatttgtcgctgatcttgcgggcgttacagaacgtgatgtcaaagtggttcgcggctatcgacaaataccgcgggtatcggagtcgctgattcgtcatgaatatcccacatctttaacttctcttaaatctttgagccctcaggatctttaccaacagctttgtcattaccgtgtggcccagcaattgcgtcaggcgttaactcatcccggacggcaggcagtacgtttgagtgagttgctcaatgttgccagaagaacctggccagatattaatcaccgtgagttactgcaactcctcgacctaatggcgagatcgcgagaaggtgaactggcttttacgccattacgtatgcatgggtttatcagaacactggcgggtctatgggcatgttcaaacaaacaatgctcacataaagcgcatgaattaaatcagagtgactggccatttggtcaggtatggtttgagcagcgccaatattgtgactgtggtgcgccggtatttgaagttttacgttgctccgggtgtggttcagcttatttgtctgccaaagaggaggtgcgcggtgatggaacgaactggttggtagcgcaacccgccgctgccgaagtggatgaatttgctcttgatgtagatgtttattctgaagatgaagacaacgacgaattagacaataactctcaatttgatcgtctgattgcgatcgatggtgaaaaatatatcatttctctggaagaaacgacggcggggaaaattgatagtgaagcgcaaaagcactatgaaataaacctgttaagaccggaatctcgaggtgagggacgtaataattcctttgcttgtgtttgctgtggtgacacccaacgaaaaaataatcctttattccgtccgcttcgacttggcgcgcccttttttttaaatgaaattattcctactctgctggagttttcaccattaccgcagacaagagaagagcagttaggaccgtttaatggtcgacgtctgctcacctttacggattcacgtcagggcactgcccgcatttctgcccgcttacagcaggatgccgataaagcgacgttgcgagctctttgttaccaggagttggccaatattaatgagccatcagcaaagctcagcccggcacactgcgcattgttagagagttttattacccagttttctatccttcctttaaaaaactctattgacgcgctgaaaaaagcgatggttgctaatgaagagcttagcccggcggacattcaggcacttaaaattatcgagccgatggtgagttccttaagcccggatcatgctgaagcgatgcaaatactccaggctaactctggcaatcagcagaagaaaaccatgtcatggcaaacactgtctgaacagctggttggcagtgtggaccttgccgatagaatgagaggcagttttaaagaattgtctgggcttgatcttactaaacaacagtttgcagatttttgtttatacagtgagtttggtcgccgccctaaaaatgcctggaccctcgaaagtctgggtctggtagccattcactatccatttattgataaagttacaacctgcccgcaggactggaagacattattacccgatcccgataagcaattagcggaatggcgtaatttattgaagattactcttgatttctttatacgtgaaaacagtgccgttttttacgaaaacgagcaataccctcgctggatgggggctcgtttcccggtaaaaatgctccagggtccagataaaaaaaacaaagggcagaaacgtgatcaactttggccacaaatacgcgatcgccattataaccgggtcattaagctattaattgcagtctttccggaaatacaacctgagcaggctcactggaaatcgttagttaaccacttaatgattgaggtctgggatgcaattcgaccctgcttacgtcagtttgagtcgggttatcagctggatattaaacaacaagctgaattttacagtccaaagcaagtgtggcgttgcccctatactcgacgtgcgttagacgtcacgttactgggatactctccgtatttgccgggtagcaaagaaattgcacctgaaaaagcagtgttgattgaaatgcctgagcttcctgtacgtcactggcgtttgtctggtggtggagaaatcgcccgagaagaacgtctggagtggctggaaagtaatgcgctgattcaacatgcccgcgaggaaggattatggtctactcgcagcgaccgactggccctgaaagatagctggtatcgtctggaggaacactctgcgcagagaacgcctgagcagaaccagtttaatgaaaaacaatttaagtcaggcaaagttaatgtgctgaactgctccacgaccatggagatgggggtggacattggtggtatgagtttggtggcaatgaacaacgttcctccagctccggcaaattatttgcagcgtgcaggccgcgcgggtcgacgtggagagagtgcatctgctgccattacgttatgtaaaaacacggcgcatggaatggaggtattcaaagaccccctctgggcgttcaacactactgccagtgcgccacgggttcgttttgggagcagcagtattgttcaacgacatgttaatgccctggttttaggtctgtttttacgagctgaagttcctgatgcgacaaaactgagttgcaaatggttctttgaaggtgatgagagccagtgtcttcgttttctccattggttaaataaccaggccgatcagctggcggataaacttaaacgccttactcagggaaccgtcctgatgtcattgacggcaacccagctcttgacccgcacacaagcaatgatgcagcaggttgatatccgctggagaagccaacttgcgatactgttggaaaatatcgaagcgttgaaggcggataacagcgcgtgggaagaaacgccagcaggtaaagccatcgcttatcagcttcgtgattatcgcggtgcatatctgttttctaaactcattagtgaagcgttcctgccggggcatggtttcccggttggcgtcgtcaatttcaattatctgacggcagatgagctggaaaaacgtcgcgcaataaaagctactcaggctgaccctaatgaagggggagaaagcttttctcgtcgtattgaaaaattgcccagccgtgatttgcctacagcattacgcgagtatgctccaggtgcagatgtggtattgggcggaaaagtatatcgttcctcgggcattatgcttggcaaggtacttgccagcgggcaggagctgtcaggcgatcatcatattccgtggttctggcattgtcgtaaatgtggtgcggggcaaccagtactacccgtcctgtcgaatgtagtcactgcaaagcggatatacagcaacttgatgtga

SEQ ID NO: 17860 - DNA, 4935 bp, Escherichia coli
atggcgctggtcggtattaataacgaaaatgaattttactctaaccattatttgggtgaggttttcaccagtgatatccgcgatgtgctggaaccctggatagcccaggaaaatgcagcgcgtgaagcggagcgtgccgctcgtgaacagggcaaagacgtggagccgggataccgcgctccgtggaaccagtttaacagtctggcgactgagtttttccgcaaacttgccgagcacgaaaaacagcgtcagatcccgcagcgtctggccgatcaacgtaatcgctggcagccattgttaaaggcgctgggctacgaaattacgccgcagatccaaatgctggatgacgatacaccactgccggtactggcgcgttacaacagcactgacggtagcccgtggctgtggattgttgaagcacacgatcaggaagaaggaacgctggatccgctggcgctctccttactgaccgcgcaattcccggcggataccgacaaacataagcgcgacagcctgcgcaaaaaagccaacggtgaatatcgcagctggcaggatctgctctctacggcggtcttcacccaaaatgaaccgccgcgttttgtgctgctgctcggtaaccgtcagctattgttgttggaccgtactaagtgggcgcaaaaccgtctgctacgttttgattttgaagagattttaagtcgtcgtgaaacggatacgctgaaagcgacggcagtgttgctacataaagattcgctgctgccgggcagtggggcaccttatcttgactcgctggatgacaattcgcacaaacatgcgtttggtgtttcggaagatctgaaatatgccctgcgcgaaagcatagagttgttgggcaacgaagcgatgcattatctgatcgaccgtggcctggcaaactataccggtaaccgtgcggtggacccggatgaactgagccgcgaatgtctgcgttacatgtaccgcctgctgttcctgttctacattgaagcgcgcccggagctgggttatgcgccaatgaccgccaaaacctatctgcaaggttacagcctggaaacgttgcgcgatctggagatgatcccgctgaccagcgaagaagatcgcaacgggcgctacttccacgacagtctgaatatgctgtttaaactggtgcgcgaaggctacaacggcggcgtgaaaatacagagtgacctggagagcggcgaccggatcaccatccatagtcatcagttcagcgtcccgcgtctggaaagtcatctgttcgatgccaacaacacgcgcattcttaaccgcgtggtattccgtaacgaaaccctgcaacagattatccaggcgatgtcgttaagccgcccggccaaagggcgctttaaccgccgcggacgtatatcttatcgccagttgggaatcaaccagttgggggcggtgtatgaggcgctgctctcctatcgcggattcttcgccagcgaagatctctacgaggtgaagaaagccggggaagagtttaacgagctggagacgggttacttcgtcagtaaggatgagattggcaaataccacgaagacgagaaggtttacgagaaagacggcagtctgcgcattcaccgcaaaggcagttttatctaccgtatggccgggcgcgaccgtgagaaatctgcctcttattacaccccggaagtgctgacccgctcactggttaaatatgccctgaaagagctgtttaaagagcaaattgatccgattaccgatctgcacgccaaagctgatgccatcttaaacctcaccgtgtgcgaaccggcgatgggcagcgcggcgttccttaacgaagccatcaaccagctggcggaagcgtatctgttccacaagcagcaggcggaaggtcgccgtattccgcaggatcgttacacccaggagttacagcgggtgaaaatgtacattgccgacaacaatgttttcggcgtggacttaaacccggtggcggtggagctggcggaagtgtcgctgtggctgaacgccatcagtggcgatgcctttgtaccgtggtttggttaccagctgcactgcggtaactcgctggtgggcgcgcgccgtcaggtgttcaacaagagcgaactgacctacaaaaaagccaaagatccgagctggcttaacagcgaaccggtcgagctggcgatgaacacgccgcgtgaagagacgcagattttccacttcctgctgcccgacggcggtatggctaactacagcgataaaactgttaagcagcgttatccggatgacttcaaagccctggacagctggcgcaaagagtttattaaaagctttgccgggcatgagattgctgatgtgcagcgtatcagcgaaaaggtggaagctctgtggaacacctatcgccagcaacttaaagcagaacgtctgaaaaccgccgacagctacccggtgtggccggcagaaaacagcgagcagacgcgttcttcgctgagcagtaaagatgaaaccttcagtggtcgtcttgaagataacagtgcctaccagaagctgcgttgggtgatggactactggtgcgcgctgtggttctggccgatcgacaaagccgatgagctaccggatcgcggcacctggttgtttgagattgaaaccctgctcgacgggattgtaatcacggaaaaagtcactgaagttgcggagcacaccaccggcgatctgtttgccgaagaaggtctgctgcgagaagagtcttcactgttttccggcgcaggtcgtctgaaaaccgaggtgttgttccgtcatttgccgcgtctggcgattgtcgatgccctgagaaagcagtaccgtttcttccactgggatctggagttctgcgacctgtttgccgagcgcggcggttttgacctgatgctcggaaacccgccgtggctgaaagtggaatggcaggaagctggcgtgctgggtgattacgagccggaatttgtgctgcgtaagctgagtgcatcgaagctggcaatgttgcgtgttgatacctttaaccagatcccggcgctggaagcggcctggcgcagcgagtatgagggctgtgaagggatgcaaaacttcctcaatgcgcagcagaactacccggtactagcaggtcaaaaagcgaatttgtataaatgcttcctgccgcaggcgtggcgtttgggggcggaaagaggtgtgacaggactcctgcacccggaagggatttatgatgatcctactggtgggcagatgcgtgcatcagtttatccgaggttgagggctcattttcagtttgcgaatgaaataaaactatttgctgaggtggataatcacactagattcagcatcaatatctatggtccattttctcaaatgccagtattttcgaacatagtaaatttgtttattcctcaaacaattgatgcatgtttcgaacataaaggtgatggtaacgttccaggcattaaagaagaagctgagattgatggaaaggccaaagctaaatggaattttcagggacatttagatcgaattgtgactgttgattttataaaattaggactatttgctcgtctctatgattctgacgacacgccggccctacaagctcgtcttcctgcattacattctaaacaattggtagcggtgcttgagaagtttgctcgtcaacctaagagattaaatgattttacaaacagctattatgcaacccagcattggaatgaagttaatgcacaaaatgacggcacaattttgcgaaaaacacagtttccaaaaaatccttcacaatgggttgtatctggtccacatttctttgtcggcaatcctttctataacacacccaaagagatctgcgacacgaataaagcatacgataacctcgacttgctaactctgcctgatgactatctgccgcgcactaactacattccggcatgtgatgcacaggagtatgcaaagcgcactccacgggtttcgtggaaagagcaggatgaagacgagccgaggaaggtgacggattattatcgttttgttaatcgtgaaatgataggtccatcatctgaaagaacattaattacaacaattgtgccaccaggtgtgagccatataaatacttgtcttggaacggcgtttaaagatactcaattattgcttgactatttttcgatgactctttctgtaccgttggattatcgtgtgaaaagtacgggtatggggcatgccaatacctctcttattaaccaactgccagtacttacaaatgatgcttatcgtacagcactacatagtcgggctctatgccttgtatcgctagtgagaagttatgccgatctctggcaatcctgctacaccccagatttcaacacccagcgctggagccgcgatctcccgctgctgccccaagatttcttcgccaatctgaccccagagtggcagcgtaactgcgccttacgctctgactacagtcgtcgtcaggcgctggtggaaatcgacgtactggtggcgcaggcgctagggttaaccctcgaagagctgcttaccatttatcgtgtacagttcccggtgatgcgccagtacgaagcggacacctggtacgatcaaaacggtcgcattatctttaccccaagcaaagggctggtgggcgttggcttgcctcgcaccgcgcgtaaagctgacctgaaaaacggctttgtctttaacgtcgacagcccggagtggaccggcggtgactgcaccgatcaggctatcggctgggatgatgtcaaacatcttaaaaccggtaccgtcagcgtcacctttgatgactatacccgcagcgacgaaggcgagcgccgtaccgtcacctggcaggctccgtttatcaagccagatcgcgaagatgactacaaagtggcctgggcgttctttgcacaagataaggagagcacctga

SEQ ID NO: 17861 - DNA, 1860 bp, Escherichia coli
atgtcttatttctttgacacgccagtaaatattgaaggaaataaaaaactcagatctcctcaaattgaggcatatataaaaataaaagaattcttcagtgacgaagagaataaagaggctctcgtagttttaccaacaggaacaggtaaaagtggtttaatatctattgcaccatttggtgttgcacgtaaaaaagtattaataataactccaggtcttataacaaaagaaagcataagaaaaacgcaagaggttttagaaaataacttctgggttaattttgatattgtttttaatagcaaagatataccaatagttaatgaatactcatctgatttatctgatgaacatcttttaagcagccacataatttattcaaacatacaaaaagtaacatcttctcgaggcaacccactaataagtcgtgtaccccctgactttttcgatctcattattattgatgaggctcatcatgcccccgcacaaagttggcgggatactcttcattatttttccaatgctaagatattgcatgttactggcactccatatagaggcgacaaccaagaaataccaggagtaaaaatacatgaaactcctttatctgaagttatgcgggataaatatgtcaaatggttaagaaaagaaaccgtcaatgcacatgatttattcttttacacgccagaacagccaggagtaaagttatctaaagaacaagttttgatgtttaaagataaagaatggatagagaaaagtatcgctctttccaaagagtgctctttagatgttattaatcatagtataaaaaaacttaatgaactaaaagagctgtcaccaaatgtcccacataaaattttggctataggctgtagtatatctcatgctgaagatttactttcatggtataaagccaaaggaatgacatcagtaattgttcatagtgaaatggatcaaaacgacctttctgatgctctaatgaaaatagaacatcatcaatgtgacgtcgttatatctgtcaacatgctcatggaagggtatgatcataaatatctaacagtacttgctatatttagaccataccgtagcctaaacgcttttgcacaagttgttggacgcattttacgagcgattcctgaatcagaaattacccactttgaaatagataacaatggaatagtcatattccatgaggaaataggtttaaatgtcatgtgggaaacatttcagaaagaagtggagagagcacgcagagcaagtgtaagagaatatacatttacagacagggattatcatgaaagatctaatacattagctgggatagaaagtgatagtgcttacgtaagtgatacagactcttacctagatgatgttgactttaatgctatgtttgaacagaagcgtaatgagatcaacaattctgttgagcaacaaatagaaaaaataaaatcgtctggagtagatcttcctgaagatgctcttgaagcattacgccaaacattagcagaaaaagctgtgcaaaaagccgcagagataattgatcctgagctaattgaaaaaaggcctcatcaagcgagaaagttaatgagaaacatcttgaaaacccgcactcaggatggtgtttctaatttattgattgataatggaattggtgaaaaaagctccgaactgtatagtatttttaaccgacatgtaccttatttaaagacaactgatccaaatgatggtatattggttagatatgttaacctaaaattagccaaagcatatggtcctgttgataagcgggataataaaacccttcttcaatcaataaatgatttggacaagattctcgcagaagtagagaggatgattaaatga

SEQ ID NO: 17862 - DNA, 426 bp, Escherichia coli
atgacaaactattctcaaattatggaagaaattaataaaataatttctttctgtatggttaaaggtgttcaacctcatgaattaattagtgcaatattcgaagatgaatataagcacattgaaacttataaaaaaggtgagcatatacatcttatattgtcttattcagacactcatgaagatggtgtcaacaatattaaaatgagatatatttataacaataagcatcagctattatccgttgcacaaaaaatagatgcatcaagttataaaacgcaatgggaccgtagtgaaaaacttgatgaaatgctaaataaattagccttaaaattacctaaagatagcttggtaattaataaaatcagagaggcaattcccgatgattataaaacgatattctatcctcacctgaagatcgcttgctaa

SEQ ID NO: 17863 - DNA, 756 bp, Escherichia coli
gtgacttacaattcaaaaagctgtagttctcttgaaaaggcatattacactccaattgaagcggcgctacgttggtgtaatttaattgctcatgaagttttaatattggagcgagtgggagatggagttttacctagcgttggaatgttccctcaatggccttgcttgcgtgttaatgctgagaaaattttagatgcaatccataattgtgaaattccttatggtcgtgatggtaaaactgttcaacctggagaacaggttgctaagcaccgtttaaccgtccgtcattccgatctgaaatcatggatgtcaaaaaactatcccaaccaaaaaccagctttcctttttgatgctgttgagcagcagttacatgctggaattacagtcgaggcatatcaaactcttcaggctgaaaacaaacgtcttaatattcgcttagataatgctatgaagacttttcaacagcagaaaaatgaaatttccgaattacaaggggaacgtgattcactacgacgaatggttgataactccgtgcaaaacattgaccaacgttctgaaacaacatatttaaacattattggagggttgctttttctaatgttagggcgttcacctgctggtattaagcaatctgtattcgaaaatcaaagctctattattagtaatttattggggcattttgaaggtaagccggggatgagttcaagaacgctagaagcaaagtttgctgaagccaataaatcaattaaatcgtag

SEQ ID NO: 17864 - DNA, 198 bp, Escherichia coli
atgtcacaatctttaattcgtatgccagaaaccatgcgccgtacagggtatggaagggcatggatctataaactcattgcccaagggcgttttcctaaacctgtaaaaattggctcgcgagcgattgctttcgttgagagtgaaattgacgagtggattaatcagcgtattgcggaatcacgcggaacagctacctga

SEQ ID NO: 17865 - DNA, 849 bp, Escherichia coli
atgaaactgcgaaaaacgcccgtacaggggcagggcttcgttcggcctgaaaaccagaatctgcaaaattttggcgaaattatcccggttatttccggcgttattggcgggcgtgaaaccaatattgttagcgccagagcgttgcataaggcgctcggggtaggtcgtgatttcacaacctggattaaaggacgcattgatgagtacggatttaaaaagggcgtggattttgaagttgtagaaaatttgtactttgattccccgaaacgggggaaccaaagtgtaaatattgaacagtttgattctgattggacaacaaagcgcggcggtgatcgtcgcagtgaagactatttgatctccacgaacatggcaaaagaactggcgatggtcgaacgcaccgaacagggccgcgccgttcgtcagtacttcatcaaatgcgaggaggagctacacaaggtagcgccagtgcgttccgcagcgttacgccgggaactgaaagcccgtatcacagttgccagctactttaagccaatgtgtgccgcgttggaggcgtaccgggctgaactgggcaaaaacacgttccagcaccactacaccacggaagccaatatgctggcgcgtatcgtgctgggtggcatgactgcaaaacagtgggcgcaggcgaacggcatcacaggcgaaccacgcgaccacatgagcacgttgcagcttgagcacctttcttaccttgagcagagcaatatcacactgattgagttaggccaggactaccaccagcggaaagctgaattaattcgtctttcgcagcgttggttagcccgtcgcatggaggaaaacagccatgtgtaa

SEQ ID NO: 17866 - DNA, 366 bp, Escherichia coli
atgcataacctgtcaatttctgaccttaacagcattcagtttgacgagatattttccgggcagctactggtcaacgtggagaatggacgcgtggtaagtaattatcacctgccggatggtgcaattgccggaagcgttgaagcattgctggaactggcggaacgtgcgcgactgattaagccgtcaacgagccatcacgatgatgatctgcattttaccggacgtatggtgagtcactacaaaaacggcgttgaggtatcccgcgaacggctgcgtgatgattgctgtttcggcacactgccggaatttatcgaattgctgaccgattgcggttatcagatgattcaggagggtaaacatgcatga

SEQ ID NO: 17867 - DNA, 234 bp, Escherichia coli
atgcatgatatttacaatgacacagtagaccatgcatacagtgctcttacttacagtgaaaacatgcttgaaatattgcgcttatggcttgaaacacttggcgataatgaaagagataaccgcaacagaaatattgccacggcattaataacgcttcttgagcctgtaatttgtgaactgaaagaaatagacctgttgcacgacggatataaagagcaatacgccggggaataa

SEQ ID NO: 17868 - DNA, 315 bp, Escherichia coli
atgaaactgaaaaattctggctttactgccagcggccccgttcggcctgaaatccgccccggcgatattttccgggataaatacggcagcacgataacggtaaaaaccgtcgatgattttcgcgtgacctatatccgcgaatgttatgcgcatccctgcgtgtcgtcacatatgcgctttgaaagggaattcatcctggtaagtaaagcgccaccagcagaattaagcgacatcgacagaatcatgagcgtcacgggcgcggaacgtatcaggacagtacgtgaaattattcgtgagcggggaggtaagaagtga

SEQ ID NO: 17869 - DNA, 525 bp, Escherichia coli
atgccaaagctgaccattaacagaaagccaaaaggcatttacggcacgccgcagaaaacgacgcaggcggcacagcagcaggataaaaccacatcggcgcataaagtgatgcccggtaaccagaacgcgcagcagaagcccacaggggcgacaccgtggcggcatatgaccaaacgccagcgcaaaaaccgcaggcgcgttaaccgcctcactgagctgtggcctgacttattcagccgggaagcaccgaagccgcttaaggtggggatatttgacgacctgatgcaggatatcgccgtcagggggctggcattcgggccagggacattacgtgcgacgctggcatcttatgcgcagtgtccgcgctattaccgcgccttaatggctggtggggtacgctacgacctgaaaggccagccgtgcggcaaggtgacaccacaggaacaacaggacgcagaaacgcggctaatggcactgaatgaaaagcgcaaacgtcaggcagcaaaggagaagacaggcgcatga

SEQ ID NO: 17870 - DNA, 288 bp, Escherichia coli
atgattcacgacagcaaagcggaagaactggaggctaaagggctgtaccggagagcggcggcgcggtgggctgaggtcatgcaacaggtgaacaccgataaggagcgcgaacaggtggcaaagcgtcgcgcggaatgtatccacaaggcagcacgcccaccagcacggcaggataatttcggggagatgcgcgaaaccatcagccgggcacatgccggaatgggattacatcagcccaatggtgaggcattcaggaaataccaaaaaaagaacaattgtagtcagtaa

SEQ ID NO: 17871 - DNA, 123 bp, Escherichia coli
atgcaattgaatattcatctgctcagcaacgtagtagatttcctcagaaagcatcaacaaaaaaccaagagaatcccatcctctgttactgactacaattgttctttttttggtatttcctga

SEQ ID NO: 17872 - DNA, 582 bp, Escherichia coli
atgagtttttttagtctttatgggaaagaactattttctttttttatagcaattttaacatggatactgaataacagatttaaaagcaaggcaaagttatcctatggttatcagcatggatttacttttcttctcaatgaacccttacggaatgccaatggtgaggtaatatctaattcacagttggtgtatacacgatctattattcttgttaatgaagggcgagaaagtgctactaatatatcattggtttttaactataagccaatgcatattaatttttggcctgtccaccattttgaagaaaatattgaacaggatggtcgctatattatcaagtttgaaagccttgcacctggtgagtctattcaatgtgaaatattatcaataaatacagaagttccaagtattctatcgataagatctaaagagtgtgtggctgagccagtgaatatcgtgatgcaaaaatcgattagtaatattatcctacgttgctatcaattattaatacttcttggaactggcacattaacatatttaattatcgttattctgcaatggttagtcactaaaacgggataa

SEQ ID NO: 17873 - DNA, 222 bp, Escherichia coli
gtggcggaaaccggacaggccgcgacggtgagcggagcgttcggtaaggctacagctaagccttacaatatgcctaacttcgaagcggtattaagcacttttccttttctttctgtgttgctggtggggggggcaatgtgtcggagttttatctatctcataaagatacatgaaaaccatcacataaagtgggcagacgtggaggggatacgagcacgctga

SEQ ID NO: 17874 - DNA, 1437 bp, Escherichia coli
atggaagctgaacatccaaaagtattcgtatcatatagttggacaacccctgagcatgaagagtttgttattaacttagctgaggatttggtcagttctggtgtcgatgtgataatagataaatggtgtcttcgtgatggacatgattcatattcattcatggaaagcatggttaatgataaaactataagtaaagtgatgattataagtgacagaggatatgcagaaaaagctaataatagaaaaggtggtgtgggtactgaaacgcagataatttccccagagatttattcttcttcagagcaaacaaagtttgtcgttgttgttactgaaaaggatgaaaatggtcatttttatgtcccaaccttttataaaggacggttattcatagatatgaccgacccaagcaaaatgactgagggcgtagaaaggattttaagatgggtatttgataaacctgtttttgttaagccggagcttggaaagatacctgcatttcttgatgagtccccagatgtttctcttggaacgactgcattttacaatagggcgatggatgcaattcgcaatggcaagataacagccgcaggatgttatgatgagtacttgtctgttttggcaactaaccttgaacgcattagatttcgtactgctgaccacagtgaacctgatgaagcattccttaaaaatatagagtcttttattccggcaagaaatgaattcgttaatttggttttcttagcggcaaggtataatttggggggtgattactttaagagattacataagttttttgaatctggcataaattactactatcctcaggaaaatgtagggacttataatagtcttgattttgataattataagtttttaattcatgaactttatttatactctattgctgcattgattaaaaacgaacgttttgaagaatgcctcaatttgtttgatacctattatatatctcgtaaaatcgaaaggggcgatgatcctttatgttcgtacgtggatatcaggcagtatgttgaaatcattcaatggcggaatgaccatagaaaattaagacgactttctcttcatgcagacctattgaaggacagatgtcattctgtaccaattagttttgatgatataaatcaagctgactttgtttgttatcttcgttcaactatacaagctacagattactattcaatgtggtggcctacgacattgctgtatgctagaggatattttccttttgagatttttgcaaaatcaaaatccaaagcctatttttcaaaaattaaaggtcttttggcaattgaaacggctgagaaatttaagcagcatatacatgaattggaaaaaagtgataggttgcccaagtgggaatttgatagaatttctccattgagacttagcaatgctgatagcatagctacagtcatatga

SEQ ID NO: 17875 - DNA, 480 bp, Escherichia coli
atgaaacgactcgcgtggtgcttactttacagttttgctggcctgtcgcaggccgcggttaacgacgttacttttcacggcacgctggtttcgccgcccgcctgtaccatcagcgacggtaagagcattgaagtggcgttcagcaacgtgatcatcgacaacatcaacggcgacaacttccgccaggacgtgccttacaccatcacctgcgatcctgatgtgcgcgacgatgcctgggagatgagtctgacctggacgggccaccagaccagttacgatgacgctgccattgaaaccgacgtcgctggcctggggattgagcttcagcaaaacggccagccgtttaaagtgggcgaacagttgaaaatagacccggcgagcccgccgacgctgaccgcggtgccggtaaaagccagcgacgcggcgctcagtgaagggaacttctctgcctgggcaaccttaacggtggattaccaatga

SEQ ID NO: 17876 - DNA, 846 bp, Escherichia coli
atgaaaatattccgtttgataacctgtttgttcgtgctgatgtttgcgggggcgggcgcgcaggcggcgacaccgattgccaccttgcacacgttaacaggcgcttccagttacgctacacatatcacattctatcttgatattctcaccccccaaggcgttatgcatggtgtgtatcagaactctggccttatgttgaaagtaggttatctgcaagagcttagctggacagggagtgaccccgggcccagattatatttgaattattttaatacggtatcgaagtcaagctgcacagggcttgatgactatgatgcacgagcgaccagcagtcagtgggaatgttatgatatgcctatcgacgtctattatgatggtgatctgcatggctgcccatggctgatcacaacgtatgatgaggcttctgtgccattagaacacagtgttggcccctatgttggcccgcaggcgcgtaactcgacttgccctgtctcagtggccacctatgatatttcgtggagtgaagactacatctcgtatacgaaggtgctgtcactacagtcaacgggcggcatgattgagaaaacgctcccgaccttcctgatggaaaacggcaggctttgcgacggcagccagatggatgaacgcggtgcgtactgccgctttgtggcacagatgatcacgttctccacctccggctgcgacgattcaagcgttacggttacgcccaaccgacaccccattacggacaaacaactgcacgacatggtggtgcaggtggataccagcagcaggcagccgattgattccacctgccgcttccagtacacgctcaacgaactgtag

SEQ ID NO: 17877 - DNA, 552 bp, Escherichia coli
atgaaaaagaaaacaacacttagcgaggaggaccaggcgctgtttcgccagttgatggcggggactcgcaagattaagcaggacacgattgtccaccgaccgcagcgtaaaaaaatcagcgaagtgccggtcaagcggttgattcaggagcaggccgatgccagccattatttctctgacgagtttcaaccattattaaataccgaaggtccggtgaaatatgttcgcccggatgtcagccattttgaggcgaagaagttacgccgtggcgattattcaccggagctgtttttggatttgcacggtttgacgcagctgcaagccaagcaggagttaggcgcattgattgccgcctgtcgccgcgaacatgtgttttgtgcctgcgtgatgcatggtcatggtaagcatattttgaagcagcaaacgccactgtggctggcgcaacatccccatgtaatggcatttcatcaggcaccgaaagagtacggtggtgatgcggcattgctggtgttgatagaagtggatgaatggctgccgccggaattgccctga

SEQ ID NO: 17878 - DNA, 180 bp, Escherichia coli
gtgaagatgaatggtcaaaccgtaagccgtgatggtgcgcgtaatctcggtgaagtacgtaccggggttgaggcgaaagtaaataacaaccttagcctgtgggggaatgtcggtgtgcaactaggtgataaaggctatagcgatactcagggcatgctgggtgtgaaatatagctggtaa

SEQ ID NO: 17879 - DNA, 303 bp, Escherichia coli
atgaaaaaaagaaattttagcgcagagtttaaacgcgaatccgctcaactggttgttgaccagaaatacacggtggcagatgccgccaaagctatggatgttggcctttccacaatgacaagatgggtcaaacaactgcgtgatgagcgtcagggcaaaacaccaaaagcctctccgataacaccagaacaaatcgaaatacgtaagctgaggaaaaagctacaacgcattgaaatggaaaatgaaatattaaaaaaggctaccgcgctcttgatgtcagactccctgaacagttctcgataa

SEQ ID NO: 17880 - DNA, 378 bp, Escherichia coli; identical to SEQ ID NO: 7939

SEQ ID NO: 17881 - DNA, 2112 bp, Escherichia coli
gtgattggtgcggccgcttccggcaacggaccgctgtcccgggaggcgtatctgtcgctgggggtacggcagtcgctctacagcatggatgaccgcccgacggtctatgccctgtttgaacgttatacggtatggctgaaacagtcgaatcagtatgacagtaatctgctcagccatcagtatctgccgctggcagagccccgttacgatgctattttcgtcgatgaagttcaggatatgacgcctgttcagttgcaactggtactgaaaacgttacgtcatcctggtcagtttttgctttgtggtgatgccagtcagattgtacaccccagctttttctcatggagttcgctcaaaagtctctttttccggcagcaacaggggaacgacgcacccattaatatcctgcaggcaaactaccgtaacgggcaccatatcaccgcactggctaaccgtctgttgaggctcagacaggcccggttcagtgccattgatcgggaaagccaccatttcgtcagaagctgtggtcagacggaaggcgctgtcatgttactggaagacagggaagagacaaaacaggaactgaacaccaaaacctcacgtttgaatcgggtggcggttattgtgatgcatccggaacagaaagcacaggcacggtgctggttcagtacaccgctggtcttttcggttcaggaagtgaaggggctggaatacgaaacggtgatcctctacaacatggtcagcggtgcccggcaggcatttgatgatatctgcgggggaatctctccggcagaccttgagggcgaggcccgttattcccgtccgcgggacaggcaggatcgttcagcagaaatctataagttttttatcaacgcgctgtatgttgcgttcacccgtgccacacacaacgtgtatcttgttgaacagcaggtggcgcacccgttgtggtgtctgcttgcgctcacacatcaggaagagcaactgaatctgcaggaagaggtttccagccgtgacgagtggcagaaaactgcgcatctgcttgagaaacaggggaagcaggagcagtcggataccatccgcagccggatcctgcagacatctgaggtgccatggtcggtaatcaccgcagaggaggcccggcagtggaaagaacagatcctcgcaggtacagccgataaaaccacacaactgcaggcgctggagtacagtctgatttattccctgtgcccgttgtataatgcgctgtaccgggaagattttaagcccacaaggcagcccaagacgaagactctgcagttgctggagcagaagtatttccggtcatactcaatgaataacccggttgctgtgttgcgggatattgaacgttatggagttgatcaccgttcgccgtttaatcttactccgctgatgtcagcagcccgggcaggtaacatcgcactggttcagctactgcttgatcgtggcgcagatccctcgctgacgggtaatgacgggctggcggcttatcatcatgttttgtcagcggcggtcagtacaccccgttatgcgcaacagaaaagtgcgcagttgtataccctgctgaaacctgaaagtctctcactgcaggtggaaggacggctcatcaaactggacaaccggcagatggcaatgtttctggtgatcctgatgcaggcactgttccacacgcatctggggaatgcactggctttttcagaagcattcagtgcagcacgactggcagagtgtgtggcccaccttcctgaagcgttgctgccggaacgtcgcaaacgaagaagttatatcagcggccagctttttcagcatgaagttaacagcaaaaatccttatggcaaaaagctttttctgagactgaaccacggacagtatattcttaacctggggcttaagatcaggcagggcgatgtgtggtgtgcagtttatgagttgcagtcaccggaagatctctgtcatgatttacagagttatctgcaggacatgtcgccggaattagtggaaatgctgggagggaagaaggatttttacgaacgcagtgaggagtctgtcggatactgggtgggggtgatccgtcgtgccgttcagaaagtgtga

SEQ ID NO: 17882 - DNA, 483 bp, Escherichia coli
gtggtgattgatgaagaccgcttacaacaacaacctgtaccagagcctgttgatatagcgacggaaacgctgacgtacattaatccgtctcacgggcgtttccatcgtctggataaaatgttgtcctttgatgatgagcagcaggcgctgtacgaacacccgctaccgctggtgattgtcggctctgcggggagtggtaagacggcgctggtactggaaaaaatgaagcaggttgctggtgatatactgtatctcagcctgtcctcatttctggtggaaaaagcgcgaacgctttataacgcgtcgggggaagggagtgatgtgcagaatattgactttctgtcactgacggaattcctggaaaccctgcgtattccggaaggccgggaggtgaccttcagtgcgttcagcgactggttgccccgcaaccagtcgctgcactgggatctgcccataccctgtatgaggagttcaggggcgtga

SEQ ID NO: 17883 - DNA, 180 bp, Escherichia coli
atgaaaatctgtctctaccataccctgaacccggaagcgatcccgggctataaaaaatttgcacaggccattgaggccgataacttcgttcaggctgatgttcgtaaaattgacaccaatctttatcgcgcccggctcagtatccggtcccggttactgttttcgctgtatcgctactag

SEQ ID NO: 17884 - DNA, 126 bp, Escherichia coli
atgaaacgtgttgcaatgccggcgctggtattgcggaaatcagccctgtccccgatgctggcgacactcccgctcatctttctgctaactcctctggtcagccaactgtttgtcatcatttcctga

SEQ ID NO: 17885 - DNA, 561 bp, Escherichia coli
atgaatggtattccttatttcgactatagcatggcgcccttctggccgtattatcagaacaaaatcatcggtgttctcaaccgtgcgctgcgtgaacagtcctgctcccgggtacggcggatcctgcttcgcctgccgggggaacatgacaacatcttcagtgacagaaatacctggttaggcatggattttatcgaaaccgtcagtgcgctgatgaatgcaacccccggacgtgatctctgctggctcctgacccgtcatccggaaaagccggaataccacgtggtgctgtgcgtcagacaggagtatttcgacggccctgaactggacaggttgattctggatgcctggagcaacgtactgggcttcgcgtcaccgggtgaagcggcaccgtaccagaaacagataacacgggatgtggtactggatcgccggtcaccggactgcgaagccctgtttaaggaccttatctgggcgttcagtgatttcgcccgcgatcgccgtggagtgtgcgatccggaagcccgttgcctcgccggtaatcccggttggcagtgctga

SEQ ID NO: 17886 - DNA, 441 bp, Escherichia coli
atgagcaagaagaagttttctgttgagaatgaagatctctctactgttcgtacatcacttcttaattccaaccttgtccggaagttgatcatggaaatgtctgatgaagacttcaatcaagttaaggataaccttgaaaaggccattgagcagcgtaatgagttgaaggattctttggcaattatcaaaaagtacatggatgacgcaggtgtaacggcggaagatgtgtatcgtgaatttggcaaaaaattacagacgggcagaaaaaacgattcaggagagtctaataagtacaggtatgagtataacggtcaaataatgtactggagtggacaaggtcgtcggccttctgttattgcagaagcaataaaagccggaggttctcttgatgattttcttatatctcagggcacatcatcatcttgttctgattatgagtga

SEQ ID NO: 17887 - DNA, 1203 bp, Escherichia coli
atgaagattacatctgtagaaatttttgactgcgaactcaaaaaaagagatcaaactatggcctcttataatccagtacttattcgggttaataccgatgctggaataagtggtgttggcgaagtaggattagcctatggtgcaggtgcaaaatctggtgttggtattatcagagatttagcccctctcatcattggtgaagatccgttgaacattgagaagatttgggaattcctcttcaggaaaacattttggggaatgggcggtggtaatgttttttacgcaggtatgagcgctattgatattgccttatgggatattaaaggtaaatatttaaacgtgccggtttatcaactactggggggaaagactaacgataaattgagaacttacgccagtcagttacaatttggttggggcgaaaaaaggcaaatattagtaacgcctgaagagtatgcagaggcagcgcgtgccgctattgcagaaggttataatgcgataaaagttgatccgcttgaaatcgatctgcatggcggcgattgtgtctttcagaacaaaaatagaaattactctggcttattactggccgaacaattaaaaatgggcgaggcaagaattgccgctatgcgtgaagcaatgggcgacgatgctgatattattgtagagattcattctcttctaggagcaaattcagcgatccagtttgccaaagcaatagagaaatatcgtatttttctctatgaggagcctattcatccattaaattcggataatatgcagaaagttgcccgttcaacatcgattccgatagcaacaggtgagcgctcttatactcgttggggatatcgtgatttactggaaaaacaatcaattgcggttgcacaacctgatttgtgtctttgtggtggcattacagaaggaaagaaaatttgtgattatgccaatatatatgacacaaccgtgcaggtacatgtttgtggcgggcctgtttcaacagtagcggcgctgcatatggaaactgcaatacctaactttattattcatgaacatcataccaatgcgatgaaagcatgtattcgggaactttgtacttacgattatcaaccggagaatggttattatgtcgcgccagagttgcctgggcttggtcaggaattaaacgatgaaatcgtacaacaatatcttgcctatgtgatcaaataa

SEQ ID NO: 17888 - DNA, 1329 bp, Escherichia coli
atgagcagtcctcagaaagatttgtatgacgccatttctattgtgaaaaggaagattattccgttagcatttattctgtatttttttaactatatggatcgtgttaacatcggatttgccgctttacgcatgaatgaatcccttggtattacaccagaggattttgctaatatatcttcaatattttttgtgtcctatttaatttttcaaattccgagcagtattggattgcaaaagttaggtgcaagaaaatggattagcgccattattgttggttggggaacagtaacaacgttaattttctttgccaaagacacccagcatatattgctcgctcgggtctttttgggaatatttgaagcggggtttttccctggcatggtttactacctggcatgttggttcccggcgcgtgaacgtggaaaagtgaatagcttttttatgttatcaatcgcagttgcatctgtgctggcggcaccaatgtctggttggattattgaacatatgaataccggtaactatgaaggatggcgctggctttttgctattgaaggcattcctacggtgttattgggggcgctgaccttttatttactgccagatcgtccggaaaaagcccgctggcttacaccatcgcaagtcaccgcattggtcgataaacttaattctgataacgaaaaagccgcagcattaaataaaaatacaaatgcatcttttctgtcaatcattaaaaatccagtattactacaactctcatttgcttatatgtttattcaggcagcggcgttggcggcaaattactggttaccggggttggttaaaggattttcatcggatttcacagataccgatgtcggtttgattatgagtattccgtttattttcgcgatgttcagtatgccattatggggatggcattccgataaaaagaatgaaaggaaatggcatgccgcactaccgatgttggttgcaggttgcggttttttaatgatcgcacttgtaccttcgatgacgctgcgcatgatgggattaacattatacggtgtaggcattctcagttattacggtccgtactgggctttaccctcagctttactttcaccatctggcctggcaatcagtattgcgtttattaactcttgttcaagtttgggtggttttctgatcaataaatcacttggctatgtttctacacattatggtgccacggggatatttattgtggaagcgattctttgctttatcgccgtagctattttgttatcaatgaaaattgataataaaaaagataacgcccagaaagacaatgttatttcacatgctaaataa

SEQ ID NO: 17889 - DNA, 2082 bp, Escherichia coli
atgaatgacgttacagttgttacatcggttacttacccatcacccgagtcgttggctctggtggctgatgtgcaataccacgaaccatatctgtcagccgctctaaaccgaaaattcaggggaattgttgactcgggattttatgctggtttcttgcctaagcctggcggtgggatgaacctgttaatcacctcagtggatggagataaaaccgctggcgcggcgtcagtggatattggtgaattctaccaggtaactattcagcatcgtaaggatatctctcttgcacttaacgcaggcaagaaatatgcaattgtgctgaagggaagataccttcttggagaagatacctatcaggtgaataccgcgtcacatattcatgcagctgaatttgttgccagaacctataccgattcatatcagttaggtgatggggaactgctggtttgtacggtgaatatccctgctggtgtatctaccattactcaagagatgattgatacatccgagcgtatcaaccgcacgatcggcattgatatttcagactctgtaaccagtaccagaagtgatgttgctgcgagttcgctggcagttaaaaaagcctacgatctggcgaaaagcaagtatacggcgcaggatgcaagcacaacgcaaaagggattagttcagctcagtagtgccactaacagtacgtccgaagtgctggccgccacaccgaaagctgtcaaggctgcatatgacctggctaacgggaagtatacagcccaggatgcaaccacgacacaaaaagggatagttcagctcagtagcgacactaacagcacttctgaaacattagctgcaactccaaaagcggttaaagctgcatacgatctagcagccggaaaggcaccatccagtcatacacatccctggaatcagatcactggtgtgccaacagcttcattgacagcgaaaggcatcactcagctcagtagtgccactaacagcacgtctgaagtgctggccgccacaccgaaagctgtcaaggctgcatatgacctggctaacgggaagtatacagcccaggatgcaaccacgacacaaaaagggatagttcagctcagtagcgacactaacagcacttctgaaacattagctgcaactccaaaagcggttaaagctgcatacgatctagcagccggaaaggcaccatccagtcatacacatccctggaatcagatcactggtgtgccaacagcttcattgacagcgaaaggcatcactcagctcagtagtgccactaacagcacgtctgaagtgctggccgccacaccgaaagctgtcaaggctgcatatgacctggctaacgggaagtatacagcccaggatgcaaccacggctcaaaaagggatagtccaactcagcagtgctaccaatagcacgtccgaagtgctggccgccacaccgaaagctgtcaaggctgcatatgatttggctaatggaaagcaagcggcagacgctacgctcactgctctagcggcactagctacagcagcagataaactcccttatttcacaggtgttgatcgtgccgcgttaactgcattgacaagtgttggacgcgccattcttggtaagaccagtattcagagcgttcttgattaccttggtttaggggaaggctcggcgctgcccgttggtgtacccgttccttggccctcagccacaccgccaacggggtggctgaaatgtaacggagcagcattttcttctgaaaagtacccaaatctggcaaaggtttaccccaccaataaattgccggatctacggggcgaatttattcgaggttgggatgatggacgaggtgtggacaatgggcgagcattattaagcagccaagaggctacaaacttttctcagcgtgccggaaatataggtgatggtgcggggcacgcaattaattttcatgatggcatcgtcggaaatcagccaggattttcacgatttaatttcaccagtaactctgtaggtgatggtataaattttgttgctgtcaggccgcgaaatatcgcatttaattacatcgtaagggcggcataa

SEQ ID NO: 17890 - DNA, 435 bp, Escherichia coli
atgtctgacgtctcaacaaacctctataagagtcagttgttggactattactatcagcggcgcgctgaatcgtccattaacaaaggctctcgatttttaatcagcaaggccgttttcggtaccagttcactggttactaagaaaggagatggcacttatgagattggagaactgccaaaggctttcgatctggcagaactgaccagtcaattttgcaccatcaacctcgtcccaacctactcaggcgggataattactgtccgaatggaccttgatcaaagtcagttgcaggaagggaaaaactacccattcaacactctggttgttctggataacgagaataagccaattgccattatttgtgtccaagaagactcgctgtatgtgggcaaaacatataccgcagttatggccataaacacgactacagcataa

SEQ ID NO: 17891 - DNA, 837 bp, Escherichia coli
atgcaacgttcctggtttaataaccggcttacatcagctaagcaaaagtcattgctctataaatcattggctgatttggttcagtcaatgatggacacctttgttgacccatggttggagcgaattaccaaccggaagtctattttctccatgagcaaggaggatctggagaccaggacaaatgaacttggccagttttttactatcagaacgtcgaattcatcttccgttccgatgttgttacaacagcggtttgatgagatccattttaagggtactgaacgccctataaaccagacaatttatcgcgaatttaacggtatatcggttttatgggatcccatatatgctccggtggactttgaacgtcatccctatggcacggtcctgattccagaaagcacactggaaaccaccggcggcacattcggcgagatgtttctgacttccagaggaatgatcagtattcccataaacgacctggcccggacaatgggtattactggaacgatagatcagtccgcaattacagaagaaattctcagaaagtttaatcagttcgtaaagcctctactgccactgcatatagtgtttgatgggcttacgctctatttgtcggttgttgtaaatgaacaggccgacatgatcactttgaatgagatttctgataccgaaaaagcattctgctggtttgaaacttcggatacaacttcgcttactgaagttacgtcgattaacgccccgatcactgcaacgcctggcggcactagtgtgaaagcaacgcctacgtttgatcgcacccgcgcagatgatttgctgttggatagcgatgcgtga

SEQ ID NO: 17892 - DNA, 1434 bp, Escherichia coli
atgagtaaaacaacacctactaaagacagtattcgtgcagagtttgaagagcttgtcgagaaagattcattctggtcgaagtttgtcggctctcaatttgtctcgatgctgacattgtttattacccagattgtctacaggtgctttcagtatgccgatgcggcgctggctgaaggctttatatcgaccgcgacgcggcgttcttctatcctggcagcggcagaaacgaatagttacgttggtaccaagccaacaccgtcatcggggatgattgagatcaccgccacaagtgaagatgccccagcggtaatccccaaaaacatgcctttaatatctgacgaccagtatccttacatgactatggatgtatgcaggttggttgacggcaccggtacggtagaagtggcacagttggaaatccaggaggtgacatataccgttacggcagccaaagaatttctggaagtcgtgttatcaaaggctctcactgctgtctgctataagctggaagtattcgtgacgaccgatggtaagaccacgcagtggtcttccagcactatgttccggttagccggtagtaaaagccaggtctacgttgagttttataaaccatccgagcagttgggggttcgattcggtgatgggctaattgggcaaataccgccagaaggctcgaccattacgcttaaggtatggtgcaccaacggcgatataaccctggttgctggccaaaacctgacgcctgtcgattctgcggctaatttagctaatttgatttcagttaagacaacgacacctataaccgcaggtaccgatgccgaaacaacggagatcacacgtaaccgtgcacaatattaccttgcctatgatgatcaggtcgtatggggcggggactatacgtattttctggtgcgtaacatcccgggactgtcctgggtaaaggcatggggcgaaggccagcaagagaaattagatggtgcttataatgttcggaatatcaataagatatttatttcagggtggcatccaaataaaagccagtcagagcttgaagaaatgatcctggctgcctttaagaaggtgccgaatgagttgaacaagaaattctcgtataaagaggtcagaaaactaccatttaagataaccatcaccggacggatatcggcaagcctgaccattgagaacgtgaccgatgagctgaagtcggcactggaaacaaaatttgggcgcgactcaactttctttgatccgaaccgcgtcggaaagtacatcctgattaagaaaaaagacgtttgggcgtttatcgaaacgttgggctatttccgcgacttttatctggagtttgtcgagtggaatgagtccaacggcttttacgatttcgtttatctggatacaggaaactccaccttcaatatttcgtatgaggaggagtga

SEQ ID NO: 17893 - DNA, 357 bp, Escherichia coli
atggccaacaataacgaaattgatcctttgctgacgctggagttatccggcgtaaaaacgtatgagtcccaggaggaggcctggggcgctcgtttatatgagtggctaaacacttatcagggtgaggtatacggagatccgtcatggggcaatgttttaccgcagtttaaacacgaaccgaccaacttgtcgcatgttcaaattgcggttgaggcaatgcttttgcaaaaactgacggtagatttacccgacataccgatttctggcttgtcagtagccgagggagatgcttttgataagttgaaaatatccattcgtatcagggatataactatcacacaggacgtggtgctatga

SEQ ID NO: 17894 - DNA, 3393 bp, Escherichia coli
atggaaagaaaaaacgccaacattgacgatgttataaggacagttgaaaccgccagcgcaaaagagctggaagagcttgcaggtatccgggaagctgttgaagatttgaaaggggggcgcgttgcaactgttgatcctgtctctcgcagtgtgtcggcattaaatcgcacaatcgaaaattcccggccagactttgtggccaatgcgccatcagtggaccctattgttgaggcaatgaaacggcttaatttagggaacgtttctcgtgtagttcaggaggatgttgctctacaggaaccgcaggccaaatcaactacgcgaaagggtaaaaaacgacgcaagaaggctataacagaagatgtaaaggcgcaacggaccgaagcagccgaacacgctcgcgaaatgttcggtcaaaaaggcggtgcgcaaaaaagccaaaaccaacgcgatgcgcgtggtcgttttattggaaagtcagggagtaaggccgcagcggaagatgcccgtgctgaacgtgctgaaaaggctaggcgcaaagaggatgatgagcgtctaaatgctgaatcaggtttattaaaaaaactgtcaaaagtagctgaaggcataggtaacccttcagagactcgtgccgtcgatgcgttaggttatgccgttgctggtccattgtgggcagcagggaaggagcttggcgggatatcaaaagaagttggtggatcgcttaatggtgccagaaagtctattgccgatgtgattcgtggcaatgacgataacagccgtagaaaaggtttttttaggcgtaaatcgcaaaatagtgccgatgtcgttcaggttaacacccaaaaacggacggttcaggaacttcaggatcagaccagcgaaattaaagagggcaatgacaagattctcagcgcccttgatcagatagccaaaaacaccgggaaaaagaagggcggcttgctgtccaaattatttagcctgttagggaagggggccggtggcgtcgcgtcgttgttaatggggcgtggcatgctgaaaaaagctggagcactcgcttttggcgctctgggggcaaagaaacttgtaggaatgctacgcggtggtggcaagatgactctcgcccatgaaggcggagatttggctgcccgggcatcaggtaaacttggattaaaggcagttggtaaaggggcgttacgcgcaattcccctagtcggcacagtggctggaggtatttatgatgcggtaaccggttggaatgatacagaagcgcaacgtcgagcgtttgggcttaaatcaggacaagatccatcattccagcaaaaagccgcttatacgttagctaatgttcttgatatggggggactggtatctggtattagcagcgccattggtgaggttctcaaatcacttggatttgaggatatcggcaatatgttgcaatcattttcgacggaaagtattgcccaggccattgatagtggggttaccaacttagaaacatatatttctaaccttggcgacaccatttctaccaagttcgatgattacacagcaaagattggtgatgctgtttcagcatggtttagcgatacatctaataagttgcttgaaaagctggatgccataaaagacttctttactgtcgataacctgaaacaggttttcagtgatgcaattgatagtgcaattgacttcattaagaacccaggaaaacacattaaagaggcggctggtaatatttgggatggggttaaaaatttacccggtaaagcattagatgcagcggttgatgccgttaaaaatacccctgcggcaatgattgtatcaaaaatacccaatccgatcggcgaggctaatgcaaaagaaatcactccagagttaaaagctccggttaatagccaccaggagacatctgattctaaaactgaatccgatgctaaacagactaatattgctacccgcgtgataaatgcggcactggacacggcgaaagatagcaataaaacagttaaagaaactgccaatcagattatcaatgcaaatgccgtagaaacgggcaatagcgcggtgcggaaaattgattcagctattggacaaaatagctcgtcatcatcgtcgcgtaataccaccggcaccaggaatgacattcagaaagctgctgatacctacaataatggcaacttagatgtaaaagtcggaagccttggcgctgaaggtaaggcaaatctcgataagttagctccgtattttgctgaactggagaataaatatggtcttcctgaaggcactctttacgcgattgctgcaactgaatctggtggtaatccgtacgcaaaatcacaaactggtgctctaggaatgtttcagttcacgggcattgctcgtgaagagactggcttagctgaaggtgaatcgtttgatcctgtgaaatcggctgaagctgcggctcttctcatgagcaagtatctgaagcaagccaatggagacttaaacgaggccatcactgcatataacgctgggtttggcactattaataagtggaaaaaaggcaccggtgacttatcgaaggaaaaccgtgagtacgcgatcaaggtcaatactcatcgtgctcgctatttaggtggtgaaatctatacacctggggcaggagcacagggtggggcgcaatatggagtgagggaaccactacctgataacgccgttatcgatcagtctactggtctggcgtttacccctggtgatagcccgtttgagaaaggcggtttggtagacaaaatcggcaatgctgttggcgttaacgatctggtcaacaaattcatgaatggccggggtatgcgtcgggaagtcgttcagggaacgctcgaagaacgtgcacgagggaaggggaccgcaacagcagctggcaatgtgtatgttgatactccgatgccagttgaagaggcgcgtccggtggccagcaactcaagttactttgaccaactcggcgcacaaatggggattgatggactattcgataaactccgcaactcgccggggatgcggaaaaataatgcgcctgaaccagcctccacgtcccaggtgacgactgccgccaacgatttgcagcaaccaaccggtcgtatgcagatagacggacaggttattagtgaccttggcggctccggtgccaagccgacaatgcagttggctgataataccgtttcacttgatggtgaaacgaagcggctgtttgcgcagatgacctcattgcttgccaggattgaagagcacaccaaagactcggcgaaaggccagggaactgtcgtaaaggtcagcacgcctcagccgggcgttatgcgcacggtaccactgtcaattgatgatccgttgatgaatgactacgcgagagttgattga

SEQ ID NO: 17895 - DNA, 882 bp, Escherichia coli
atgcttttacctcttttcccgctaccatcgcggccaactgaattgatccagttccgtcagccaaatattgctgatgcgatgcgtttcaactcgataacaccggaggaacaagaacaacagacaacggcgtatttaaaagccttgctggctgaacccgcgaaacatgatcccctgacatggacggcgcaggaccggattaccgcgttatggtggatatttaccggctcccgtgaaacaccggtcgagacattcacctacacctgtaaacattgcggtaaagagcattattacgattgcgatatgaatgctctggctgaagatatccaggtcctggaagtggaaccgttcattgacgatattgaggtgtttgtagagggagtgccttatcaatggcgtatcgtgccgcttgatggctgggcaatggaaatgctggagatgcgccgtgcagcattgccacctgaagacgacgcggaattcaaagaagcgatcgttgatttgcgtttttgggaattcgcttatcagtgtgagctttataacgatgttagcggtactcgtgaagatcaggctgagcgtcgttatgaaacgattaaacggatggccattgatactgaatttatgaagctggcggcacacatccgactggctcatgaaaagctcgaacatggtttaccgtgctacatcgataaaggtgaaatgcgtcttcgtctcccgccgcataaatgcccaaatcaggataaaaaggagtccacagagggtgcatatacccgtctgtgggtgccctttcgggctaccgacttcattccacaggtggggattgaaaagctatcagaccttagtgtccaacctggttttgtatgggggtataccgattcaggacgctga

SEQ ID NO: 17896 - DNA, 612 bp, Escherichia coli
atggggtttaatgttgcttcagtaaagtcttatgtatcttcggcattaacgacgacattatttggctccggcgttggtgagcgggaagttggtaagctgacgtcaatcatcatgaacaaaatgctgttcgcgcaaggatggcagttctctgtcgaagttgatggactggagggggcagacttctttgccaaagatattacctaccacgattacagcatcgaatatgaaacgattaaaatcggcggagggaatatccttcagccaacggagcgttctcctgggcagataacaatgatggtcagggataccggtgatggccttgtttttgactggtttaatacggcaaaaagtcgggtgatcaatcctgacggcaccgtgaatataccgtctaaatatttgctcaatgtgcgtatttatcggttgctgtcttccggcttaaccaaactggaaaatgagatgactgtatttccggtcactaccggcgatgtcacctatgcgcgggatcaggttacggaatttaagtcattcccaatgaccttcgcattgcacagcacgtttaaccaatcctcaagttctttggcttcccttctgggctttagtttttctctttga

SEQ ID NO: 17897 - DNA, 567 bp, Escherichia coli
atgacaccacgacaattactcgaagacgtcaaaacccgcttcacacctttgattgcggatgaacctgccttactggaatccctgctaagaaaagcattgggaacctaccaggatagggcggggcacatcaagcggatacgcttcaccgatcaggcaagtaaatcacttgcttgccctgctgattttcttgcgctcgtatcggttacagatcacaccggcgatcttgtctactccgatgtttacgatgggaatatcgagcttgaagatactcatcgagcgatatacccactgaatgtgtcatacctggctaatttacgtgatatggatctggataatggggaagtgccacctgaaatcattgggttactttctgactatctggaagtgctaatcgcgatacctaacactgatcgcctgcgaagaatatctatcgcggggaaactcgatgccagcaatttatccgacgagaacacactgtatcagcgaaagctggatctggaagagaaaatgagcgcaacaagggcaattatcccgggaattgttcttttctcatccatgttgaagtga

SEQ ID NO: 17898 - DNA, 894 bp, Escherichia coli
atgcattctttacagaaatacataaaacataaatatactcacttaactttttttctctcattactttttttcatgatatttgaatctcgagaagatattatcaagaaaatattatctttttctctcgatgaagttttaccattcttaatgtttgcgttcttctccgtatttatcagcataacgataaaggaaaagatagcaaaaaaatatccagaaacaaacgacgggattaccattatagctttaatctttggtgtaacactatatagtgtatttatcttatattatttatatggtgatgtataccaatccacaattgctttacttataagttctgtgctacttggttctgggtggtgggttcaggctactgtgagtaaagtagccgcaagaaaatcacacaccttaaatacactaatgaatcaaagaaacagtgaattatttcacaaaaaagtttcatcggtagcgaatacgttcgggcttagaaaaactataaatgaaattattgccaaacaaagacttgtcccaaatgataaagatttaaaaaataagaaggtccatgctgaatacatatcagcaggtaatgatatgttctttgttcttaattattatgagtttatctgttcaggaataataaatggagactttgatgaagattcaatgagagaatgtcttgggcaaattgttccaggtctcgaagttagagcatttcattttataagaattgcaagagaaatttcagggagtagctgcttctgtaattttgtcgctgtttcagataaatggtctactaatggaggttctcttattctcagacacgagaaaggagaacctgtgattaataacctgacccattgctttgaagaaacagcctgttataacacaacctcttaa

SEQ ID NO: 17899 - DNA, 477 bp, Escherichia coli
atgaatattagatggtttttattatttgtatcgttaatttcagcaggagtatttgcaaaaattgattctctacaatggaatgtaattgaagatagaggggggagggaatatacaatccataatcataatggtgataagataagttttttatgtgatatgggattcatgtatggatcaccagatagtgcaggtagtttaggcctgttgctaatgtcgtcgaataataaaaaagagtataatgctgacaagagtaaaatagtattaacactagatggtgagcaatacccttttagcaatcttgggtcaatggttggagattcttggtggtatgccttttggcaggatgcagcagattcaaatgctaatgtgattgatgcttatgttgataatgaaaaaattgctacatttcctctttctgggctaagtaagttatatcaacaagccaaaaacgatggatgcttaaagcgcggcgattaa

SEQ ID NO: 17900 - DNA, 351 bp, Escherichia coli
atgtcatctgaacatgttcgtaaaggtgtaacaaatgcgaaattcaatgaagagcaatctaatattctcttcattgaaataggaattctgtcaatactgataggtttaatgtctaaatcatggtgggcctttggcggttcttttcttggactgatttttagtttaagaataaaatttctggcaataccattgatgattgtctttagcttagtatggggagctattggctatagcattggtactttgtttgaatcaacatcagctagtattgttttggggataattgctttcctgagtggcttgggcactcattttgctgccgtgcaatgggcaaatgatattgcagaataa

SEQ ID NO: 17901 - DNA, 222 bp, Escherichia coli
gtggctactatccctaccccaactcatcctgaattcatctggcgcttttactcctgccagaaacgtcactatcacttcgttattgcaccgacagaagatgaggctcgctctcagcttccggatgctccctgcattttctccgcccgtttttctaccgattcgcacaattctctcagttactggtgcctccctgttaacacttctgctcaggagggactatga

SEQ ID NO: 17902 - DNA, 1092 bp, Escherichia coli
atgagaacatcgttagttacccgtgaagagatgatcgaggcaattgaacggcacactgcctgtatcagtcccagggatataccgggcgttattgccaactacttcatgatcaccaaacaactttaccggagaaaggacaagaacgcggttcaccgcatcctgctgtctgatatccgcgaatacctgctcgaacaggggcacctgaattacgcaaccgtcgcagccgaagcacgcaaggaggcacacagaatgaaagcaactaacgttaaatcagaaaaaattcatacaccttcagttcaggaatcggagctggtggttgttcaggatcagcatgatgaaattcccgttctggaatggcagggagtacgtgtcgtgacgaccgaaactcttgctagagggtatggggtcgatgaagccaatattcgcaacaatttgtctcgcaaccttgaccgctttgaagaaggtaagcattactttcttctaactggtttaaaattaagagaatttaagaacagagtaaccggaagttactctgttggtaagaacgctagaagccttacactctggacagagcgcggcgctgcacgcatgtctaagatcgtggacacaaatgaagcatgggcgttctttgaaaaactggaagacagctacttccggcaaaaagaacagcaaccggtcacaatcccccaaacattaccagaagccctacgcctggctgccgagttggcagaacagaaaatgcagttggaacaacagctggtggccgcagcccctaaagtcgattttgccgaccgggtatcagtggccaatggaatcctgatcgggaactttgcaaaggtcgttggacttaagcaaaacgcccttttctcatggttgcgccagaacggcattctcatggcttttggtgcgcgcaaaaacgtaccgcgccaacagtacatcaacgccgggtatttcacggtgaaagaagtggtactggatgatgaaaatggctaccagatacggctgacgccccaattaacgggtaaaggccagcagtggttaactcgcaagctacttgatgctggtttgttaaaaccagtagcaataggttaa

SEQ ID NO: 17903 - DNA, 801 bp, Escherichia coli
atgcaacaaacattcaatgcggatatgaatatatcaaaccttcatcaaaatgtcgatccttcaaccactctgcctgttatttgtggtgttgaaattacgaccgaccacgctggccgttacaaccttaatgctctacacagagcgagcggactcggtgcccataaagcgccagctcaatggctaagaacgctgtcagccaaacagctcatcgaagagcttgaaaaagaaactatgcagaattgcatagtttcgttcgaaggccgtggcggcggcacttttgcccatgaattgctcgctgtggagtacgcaggctggatttctcccgcatttcggctgaaggtaaaccagacatttatcgactatcgagccggaagattacaacctgctattccgcagagtctccctgaagctctccgtttggctgccgacctggcagagcaaaagcaacggctggagcaaaaaatgcttatggatgcacctaaagtcgaattcgccgaacgcgttgctaccgccagcggggttctaatcggcaactatgccaaagtgctcggcctgggccaaaactatctcttcacctggttgcgtgataacggaattctgatcgcaaccggtgaacgcaggaacgtccccaaacaagaatacatatcccgtgggtacttcaccctcaaagaaaccgtgatcgatacaagcaacggaagcaggatttctttcacgactcgtataaccggcaaaggtcagcagtggctaatgaagcgattgcttgatgctggtgtgctggtacctgtcgcggctacgcgctaa

SEQ ID NO: 17904 - DNA, 807 bp, Escherichia coli
atgagcgattttactttttctggctatgaattggcctgctttgtaacacactccggtctatcccgtagcgccgggcatatcctgtcgcaatgtgcaaatctcgcggcaacaaccagtgaatacttcattcacaagcctcaccgcatgatcgcggcagaaactggttatagccaatcaaccgtcgttcgcgcattccgtgaagctgtaaacaaaggaatcctatcggtagagattgttatcggcgatcaccgtgaacgccgcgctaacctgtaccggtttacaccatcctttttagcctttgctcaacaagccaaaaatgcgctaattgaaagcaaattaaagatctcttcagccgcaaccaaggttaaagctgttctcgctaagacattggctttatttaattttttatccacacccccatgtcaaaatgataccccctccccctgtcaggatgacgtggcaataaagaataagaagtcacaaattaaaaaaacaaaaagatcagtttccggcggtgccggaacgaccagactcaaaaaattgacttcatggatcgctgaggcaaaagcaaaggctgacaatctgcggttatccaaaaaacgcgctcaaaaacatgagttcaagcagaaagtagaggcggcagcgcggaaatatgcttacctgaagaacaagcgttctcctgatattggcggggtatcaaacttcgataatctgccgcattgcatgacggtaaacgaagctctggatatggtcctatctaccagaaaagaaaaggaattttatattccaactggttttcgcggatga

SEQ ID NO: 17905 - DNA, 516 bp, Escherichia coli
atgaaaaaagtagttttaacggcccttctggcatgtgccttgggggttgctgggactgcctccgcatatcagcacacactctccttagactttgcccaaggaagcgcaacggttaaaggcggagatataaaagatccaaaaggcgtgaatattaaatatcgctacgaaatggattctacgtggggtggattagcttcggtcacttacgaaaagtcaaacacaaacctatggaatgccgccaaagccaaggttgagtatgcctcatttacttttggtccgtcatacagattcaatgaattaatgagtgcatacggcttggtgggtttaagccatgcggatgcaacagcaaaactgaatggacagtcatatgctggttttggaaccgattttgcttatggacttgggcttcaatttaacccatctccgcagtttgctgttgacctttcgtatgaacgctctaaaccaggtgatctaagcaatagcatttggatgcttggtgtcggttaccgattttaa

SEQ ID NO: 17906 - DNA, 231 bp, Escherichia coli
atgactatcctggtatctattcccatctatatactaattggtggactgatatacgcattaagtcgatatattttgcgagctaatgcagaaatggcctggtgggatcgtttttggataatgattttttttggcatattctggccattagggatcatgtttgctgcaacatttcttctgatgtggatattcacccttccaggtgatttctatagaaaaaaagccagacattga

SEQ ID NO: 17907 - DNA, 627 bp, Escherichia coli
gtgcctgtactgttaaagggggactctaaaatggctgtgattccaatgtcgtactccccgggtactgtcgctcgtcgattttcgatcctggacggagttaccatccagggtgtgctttaccaggttatatgggattccaaaaccccatttgcagctgtaatagaggctgcgccttctgttatcgatggtgatatgcggcataaggttgtcgctactcttgaacttcaacgtcgcccgcagcttgaaggcgtactggtaaggaagttctgggaggatagcgatgttgcccagattgaaggtatcgtggttgatggaactgtccgggatgtcggtttagctacttttgtttacgaaaccgtagcctcaaaagctggtgttgttttgctcagtgataatgagcaatacgaaggtggaaaagctctttggcaacatatcgcccgtcgctcttccgagctaaaagtgtttatcctcgacaccgatgccgctcagtattacccgtttgacggcgaacgtgtttgctatgacggggtaagtattcctgaatccgagatatggagtgaacacccagatcgaagtaagcatggggttgttctggtcgctgaatccataactggaaaggcggcatag

SEQ ID NO: 17908 - DNA, 510 bp, Escherichia coli
atggggcacaataacactaagggaaaccgtaaatttattaagggccgctatactgccaacgcggccaaaggcgaacgactggtatcttctgaattccagctcacttttgcaggctatgaagatatcagtgtacttgttcgtacgtcgcaaatccctgaaatgactcgcgaggatgtggaggactatggtccgaatggtgtgaagttcaaccagcacggaccaattcgaaactctggggaaatccaggtccagtgcgtggagactatcgaaggcgatattcttcagttcattaaggatcgcattgcggcgaaggactatgttgatatcacgatggctgctacccctgaatccaaatcttccggggttaacgctgtgacaaaagctgctacaacaattgaaatgttggactgcaaaatctacagtgatgcaatcgactttagtaccgaagatgtgactgccgctgtgcgcccgtcacttcgtatcgtctacaactggattgagtgggattaa

SEQ ID NO: 17909 - DNA, 465 bp, Escherichia coli
atgaacatggcccagaattgggaagcaccgtttaccggtatgtccatgggttctgtttctggcgctctgggggggtttgtgcaagtaggtactgaaacaacgtcggttgcccgttggaacagcttaatggtttgggaaggggggacaccaccgacgttcacgctgcccgtaactttcattgctttgaacaatccattcattgaagtttcaggcgctatcgccgcgttgacagccatgattagcccggaactaaaagcggccaatgttggtggtcgaatcccggaacgtgtgacgctaaacattggtcgccggatcaacatcaccgatgtcgctatccaggacttaagttttgatctcgatgcgccaagggacagtaatggatatttcctgaaaaacaccgtcaacctccagttgaccggttcttcgatatataacagctccgatattgttcgggcgttccagtaa

SEQ ID NO: 17910 - DNA, 816 bp, Escherichia coli
atgagcaaaaacttttttcaatccggggcatttttggggaatggactgtcccgtttcgctttgaacgctgatcctgtgcagttgatggagtctgcccgggcaagcgccgaaccgccaacagatccggttattaataataatccggaaccggcggcacaaactaatgataacgttccatctgacccggcttctgagcaaatcctggaaggtaaagacggtaaagaatggaccgtcgaacaggcgcaccagatgattctggaagctgcaaatcgaagtgctatgcagaatgcgttgagtgatgcggccgacgccgttttcgcctgggctgatagcggtgatctgactttcgactcccttgatggtttcgttcaggctatcgctggtatctctgatgacgacgactccgaagttacagaagaacaggacgatgcctataacgaagcatgggcaaatgttgctgatttcctcgcagcatgcggtgtagatgatgacctgatcgaagccctggcagacgatgaagacgacgacgcagctgctgatgttggtgcctctatcgctggtttagatagcgacgaccgcgacgaactggaagcggcgtttgttgttgctggcacttctgatgaaatgctgactgaagcatttaagaaggttgttcgtaacggtgagatcaaactcatccgtaaacgtctgcgtaaaaaacgtctgactgcggctcaaaaatcggcgctgaaaaaagcgcgtcgaaaagcccagactggcgcggcaaaacttgcccgcaaaaagtcaatgaaactgcgccgtaagcgccttggctaa

SEQ ID NO: 17911 - DNA, 1590 bp, Escherichia coli
atgtctcaatattcaattcaacagtcattaggtaatgcatccggcgtcgcggttagcccgatcaatgccgatgcgacgttatctaccggtgttgcattaaatagcagcttgtgggctggtattggcgtatttgcgcgtggcaagccgtttactgttctcgctgttactgagtccaattacgaagatgttctcggcgaaccgctgaaaccgtcttccggctcacagttcgaaccaattcgtcatgtgtacgaagctattcagcaaacgtctggttatgttgttcgtgctgttccggatgatgcgaaattcccgattattatgttcgatgaatcaggcgaaccagcttacagtgcgttgccatacggttctgaaattgaacttgatagcggcgaagcctttgctatctacgttgatgatggtgatccgtgtatttcacctacccgtgagttaaccatcgaaacggcaacagcggacagtgcgggcaatgaacgcttcctcttaaaactgacccagacgacttcgctcggtgtggtaacgaccctggagacacacactgtgtctttggcggaagaagcgaaagatgacatgggccgcttgtgttatctgcctacggctctggaagcccgttctaaatatctgcgcgcggttgttaatgaagagctgatttcgacagcgaaagtaacaaacaaaaaatcgttggcgttcaccggtggtaccaacggtgatcaatcgaaaatctcaactgctgcgtacctgcgtgcggtgaaagtgctgaacaatgccccgtacatgtacaccgctgttcttggcctgggctgctatgacaatgcggcgatcactgcgttaggtaatatctgttctgatcgcctgattgatggcttctttgatgttaaaccgacattgacgtacacggaagcgctgtctgctgttgaagataccggtttacttggtaccgattatgtaagctgttctgtctatcactacccgttctcctgcaaagacaaatggacccaatcccgtgtggtctttggtctgtctggcgtggcgtacgcggcgaaagctcgtggcgtcaagaaaaactctgatgtcggcggttggcattactcaccggctggtgaagaacgtgccgtcattgctcgtgcgtcaattcaaccgctgtatccggaagataccccggacgaagaagcaatggtcaagggccgtctcaataaagtatctgttggcacctctggccagatgatcatcgacgatgctttaacttgctgcacgcaggataactatctgcacttccagcacgtcccatccctgatgaatgcaatcagccgtttctttgtccagttagcccgccagatgaagcatagcccggacggtattactgcggctggcctgactaaagggatgaccaaacttttagatcgctttgtcgcctccggcgctctggtggctcctcgtgatcctgatgctgacggtacagaaccgtatgtgctgaaagttacgcaggcggaattcgataaatgggaagtagtctgggcctgctgcccgactggcgtagcccgtcgtatccagggcgtaccgctgcttattaagtaa

SEQ ID NO: 17912 - DNA, 1707 bp, Escherichia coli
ttgagtaacttacgcgaataccagaatcgtattgcagatatcgcaaaacgctctaaagctgtgcttggctgggcaagcactgcgcagttcggtactgataaccaattcattaaagatgatgccgcgcgtgccgcatctatccttgaagctgcacgtaaagacccaatttttgcgggtatctctgataatgccaccgctcaaatcgctacagcgtgggcaagtgcactggctgactacgccgcaacacataaatctatgccacgtccggaaattctggcctcctgccaccagacgctggaaaactgcctgattgagtccactcgcaatagcatggatgccaccaataaagcgatgctggaatcagtcacagcagagatgatgagtgtttctgacggtgttatgcgtctgcctttattcctggcgatgatcctgcctgttcagttgggggcagctaccgctgatgcgtgtacattcgttccggttgcgcgtgacaagtccgaaatctatgaaatctttaacgtagcgggttcttcttttggctcttatgctattggtgatgttctggacatgcaatccgttggcgtgtacagccagttgcgccgccgctatgtgctggttgcaagctccgacggcaccagcaaaactgcaaccttcaagatggaagatttcgaaggtcagaatgtcccgattcgcaaaggtcgcacaaacatctacgttaaccgtattaagtctgttgttgataacggctccggtactctgcttcacacattcaataacaaagcaggcgaacaaatcactgttacttgctctttgaattacaacgttggtcagattgtcctgtcgttctccaaagcgccagataaaggtacagagatcgccattgaggcggagatcaatatagaagcagctcctgagctgatcccacttatcaaccacgaaatgaagagttacaccctgttcccaaaccagttcgtcctcgcggctgagcacacggtacaggcggcgtatgaagcacagcgtgaatttggtctggatcttggctccctacagttccgcaccctgaaggaatacctgtcccatgagcaagatatgcttcgtcttcgtatcatgatttggcgaactcttgcgaccgactcctttgatattgcactgccagctaaccagtcctttgatgtgtgggcaactatcgttcgaggcaaattccagacggtatatcgcggtattattgagcgtgttaaatcttctggtgcgatggggatgtatgccggtgctgatgcggcatctttcttcaaacaattgccgaaggatttcttccagccagcagaagattatatccagaccccatacgtccactacattggcactctgttcggcaacgtcaaagtgttcgaagtaccagaaggtatttgtacgaacctgaccgccgacggtatccagttcagcccaatggatgtgctgtgctacgtccgtgatgaaaatccgggcaaagcgggcttcgtaactggtgatgcagtcccggctgtcccattcaagcatccgaccaccccggcactggtcaaccgaaccactctgtggggttcggctatcaacgatatgcacccacgtaacggcgctgactacttcacccgtgtaactctgactatggccaaaaatggcggaattaacttcctgaccggtaacatgattgatgccggtgactctgagtaa

SEQ ID NO: 17913 - DNA, 1002 bp, Escherichia coli
atgtcaaagaaaaacagaccaacaattgggcgaacccttaatccttcaatattaagcggatttgatagttcttcagcctctggcgatcgagtcgagcaggtattcaagttatcaactggtcgtcaggccacatttattgaagaggtaatacctccgaaccaggtagaaagcgatacctttgttgatcagcataacaacgggcgtgaccaggcatctcttacgccaaaatcattaaaaagtatccgaagcactattaagcatcagcaattttaccctgcaataggtgttagacgtgctacagggaaaattgaaattttggatggttcccggcgtcgagcttctgccatcttagagaacgtagggttgcgggttttagtaacggaccaggagatcagcgtccaggaagcgcaaaatttagcgaaagacgttcagacagcattgcagcacagcattcgagaaataggtctgcgtttgatgcgaatgaaaaatgatgggatgagtcagaaggatattgcagccaaagaagggctatctcaggcgaaggtcacgcgcgctctccaggcagcgagtgctccggaagaattagtcgcccttttccctgtgcagtcggaattaaccttttcggactacaaaacgctttgtgctgttggcgacgaaatggggaacaagaatttagagtttgatcagcttattcaaaacatatccccggaaataaacgacatcttatccattgaagaaatggccgaagatgaagttaaaaataaaatcctgcgcttgataacaaaggaagcctcactactcacggataaaggttctaaagataagtccgtggttactgaattatggaaatttgaggacaaggatcgctttgcaaggaagcgcgtgaaaggccgtgccttttcttatgagtttaatcgactctcaaaagagttacaggaagaactcgacaggatgattgggcatatccttagaaagagcctcgataaaaagccgaagccttaa

SEQ ID NO: 17914 - DNA, 1197 bp, Escherichia coli
atgagtgattccagccagcttcacaaggttgctcaaagagcaaacagaatgctcaatgttctgactgaacaagtacagttgcaaaaggatgagctacacgcgaacgagttttaccaggtctatgcgaaagcggcactggcaaaattgcctctactgacccgagcgaacgttgactatgccgtaagtgaaatggaagaaaagggttatgttttcgataaacgccctgctggctcttcaatgaaatatgcgatgtcaattcagaacatcattgacatatatgaacatcgcggagtgccaaaataccgggatcgctacagcgaagcgtatgtgattttcatctccaatcttaaaggcggtgtgtcaaaaactgtatcgacggtttctctggcgcatgcaatgcgtgctcaccctcatcttctgatggaagatttaaggattctggttattgaccttgatccgcaatcttcagcaacgatgtttttaagccataaacactctattggtatcgtaaacgcaacatctgcacaggctatgttgcagaatgtaagccgtgaagagctgttagaggagtttattgttccttctgttgtacctggggttgacgttatgcctgcgtcgattgacgatgcctttattgcatccgattggagagagctgtgcaatgagcatctaccgggtcagaacatccatgcagtcctgaaagaaaatgtgattgataagctgaagagcgattatgactttatcctcgttgatagtggtcctcaccttgacgccttcctgaaaaatgctttggcctcggccaatatactgtttacacctctgccgcctgcaacggttgatttccactcatcgcttaaatacgttgcccgccttcctgagttggtgaaactcatttcggatgaaggctgcgagtgccagcttgcgactaacattggttttatgtccaagttgagtaacaaggcagaccataaatattgccatagcctggctaaagaagtgttcggtggggatatgcttgatgtcgtcctccctcgccttgacggttttgaacgctgcggcgagtcttttgacactgttatttcagctaacccggcaacgtatgttggtagtgctgatgcattgaagaacgcgcgaattgccgcggaagattttgcaaaagcagtgtttgaccgtattgaatttatcagatctaactga

SEQ ID NO: 17915 - DNA, 861 bp, Escherichia coli
atgaatcaatcttttatctccgatattctttacgcagacattgaaagtaaggcaaaagaactaacagttaattcaaacaacactgtgcagcctgtagcgttgatgcgcttgggggtattcgtgccgaagccatcaaagagcaaaggagaaagtaaagagattgatgccaccaaagcgttttcccagctggagatagctaaagcagaaggttacgatgacattaaaatcaccggtcctcgactcgatatggatactgatttcaaaacatggatcggtgttatctacgcgttcagcaaatacggcttgtcctcaaacaccatccagttatcgtttcaggaattcgctaaagcctgtggtttcccctcaaaacgtctggatgcgaaactgcgtttaaccattcatgaatcacttggccgcttgcgtaacaagggtatcgcttttaagcgtggtaaagatgctaaaggtggctaccagactggtctgttgaaggtcggacgtttcgatgctgacctcgatctgatcgagctggaagccgactcgaagctgtgggagctgttccagcttgattatcgcgtcctgttgcagcaccacgccttgcgtgcccttccgaagaaagaagcagcacaagccatttacacttttatcgaaagccttccgcagaacccgttgccgctatcgttcgcgcgaatccgtgagcgcctggctttgcagtcggctgttggcgagcaaaaccgtatcattaagaaagcgatagaacagcttaaaacaatcggctatctcgactgttcaattgagaagaaaggccgggaaagttttgtaatcgtccattctcgcaatccaaagctgaaactccccgaataa

SEQ ID NO: 17916 - DNA, 393 bp, Escherichia coli
atgtctgataaagtaacggtaaagcaaactatcaacaaagcgacttcaatctacaaaattgagcaaatcactgttggcaagctaggatctgaacaataccgtcatgctttcgaacttgccgatcagcttggtttaaaacatccagattgtatcgagcatgtatttccaacttatgctgatgagcaatgtaatcaagtgcttattgaagaggattttttcagtactgaagaacgagaaggcgttgatcgctgcattggtgtgatttgttcttcggtaagtgatgatttatttcctaatgtgccggaaggtggtggtgttggataccaattcctgtatgaaggcgatgagcttaaatgctatgagcatggtcttcttatcgaaagcgtagaataa

SEQ ID NO: 17917 - DNA, 423 bp, Escherichia coli
atgtcattcttttctacgttaaaaacagctttgtctttgaaggagaaacttgctgctactggtgttcttgttctgatttgcgcacttgttggtgctgggtttgcatgggaacgtcatcagctaaagcaagctatagagaaaattggcagtcttgatcaggctgttaaggaacgtgataagtcaataatggatcttaaccagaccattgagacgatgaacaaagcagatcaacattttcacagccaggaagtgaaaaatgaatcagaacaagccaagtatgctgacaggcaaatggaacgaaaagcagaagttcagaaacaactggttgcggcgggtaatgttcgccagcgcattcctgctgacactcagcggttgctccgggagtcgatcagcgaatttaacgccgacgccgacaaaggttaa

SEQ ID NO: 17918 - DNA, 789 bp, Escherichia coli
atgctggaaaaagactaccagttatccgcatataaaaaattggccgcagccggtgggatgaaaacaccaggtgccataacatcgtcacgaaacagtgctaacacggcaaaacagcttgcagaagaattgacgggattaattctggatacaattatctatcccgacactattaccagctatgtttcaacgatcagaacaaccacaaccggcttaacgaacattggagaactggcaactaagcacgcggacctgttggctggttatgcagatctgtcaatgctgcttcaactcgatattggttgggacgtttactgccgtgctaatgagcgagaagtttcagaactgccgatctctattgccattggtgatgtgaatattactaaatcgcttgagaacgctgttaacgcgcttaatacatcaagtttagtcgctgctatgggggagattaaccagacccttaacactggctcaggaagctcgtcaggctctggttcaggcggcggcactgccactcccccaccagcactaacagaagagcaaattgaatctctgaaagtagcaactgaacagtttggggttgttttcaaccagacaacagcgcccacaactgcgttacaacagcagtatgaacgagcgaatgaaagcgccaacgtagccataactgcttataaccatgctatcggtaccgcgcttgcggaagcatcagcaaataaggtcagcacagccagcgcagtcgccgctttggttcctgattctgttcttgatgaattaaacaaagcagcacagtaa

SEQ ID NO: 17919 - DNA, 285 bp, Escherichia coli
atgcagatggagctaataagccgcaaggagttcgatagccgtgtaaccagcggtgaacttgacaacttgcaggctatcaaggtgaaagaaggcttttgcctcattgggaatcagagcggaacaaatcgcgtttttatgcttcgccgtacggatttgaagccatttgtctggaagaacgaaattggtcccagctcatacgctcaaacgagggggtgccacaacctggcctttttctacaaagacgagctttctgtggttgatattcaagggttacaacatgtttaa

SEQ ID NO: 17920 - DNA, 906 bp, Escherichia coli
atgtttaagcactggaaaaacattactatttataaactttctcgtgaggcggatctgaccgacttagaagataaaaagaaaatgatccttttcacgccatgcggtagtcaggatatagccaagttcggttttgtatcgccatttggtgataattccgaagttatcgctatgcatggaaatggttttatccttgttgaagcaaagcgcgaaacaaaaattcttcccccgccggttatccagcgagctattcaagaaaaaattgaaaaacttgagcaagaacaagcgcgtaaactgaagaaaacagagaaggactccctgaaagacgaagttctgcattctcttctgccacgggctttttcaaagttttctgttatccaggcgatctacgacggttcaactaaacgtatctatatcaatgccagcgcgcggcaggcagaggatatgctcgcgcttatgcgtaagtctctgggttctcttcctgttgttcccctgagtgttgaaaatcccattgaattaacgctgaccgactgggtacgtgatggtagtgctccacagggatttcaaatgggggatgcggcagaacttaaggcagtgcttgaggatggcggtattgcccgggtgaaaaagcaggatttgggaagcgatgaaatttccacacacctggaagctggcaagctcgtcactaagttggcactcgactggcagaaccgcattaaatttacactggaccataacttcagccttaccagcgtcaaatttgcggatgaattgcttgagcagaactctgatattgatagtgaagatgttgcgcagcgactggacgcagatttcttcctgttgaccagtgaaatttcgtgcctggttgatgctctggtaaatgcccttggtggagaggctaagcagtga

SEQ ID NO: 17921 - DNA, 2019 bp, Escherichia coli
gtgaaagagctgtgctatggatctgtttgcagtggaattgaagccgcgagtattgcctgggaaccgttgggtatgcgtccggtgtggtttgctgaaatcgagtcttttccatctgccgttcttgcgcaccgctggccccatgtcgccaaccttggcgacatgacaaaacttgccaaaaaagtcctggctggggaaatcgaatcccctgatgtgctcgtcgggggaacaccttgtcaggcattcagtatcgcgggattacgtggtgggcttgatgatgagcgtggcgcgctaattttaaagtatgtggagcttgcaaatgcaattgacgacaaacgggctgagtcatttctcaaaccagccgttatcgtctgggaaaatgtcccaggagtcttgtcatcggcagataacgccttcggatgtttccttgccggattggctggagaagatgtgccatttgaaccaggtgatcgacctgaatcaggaaaaagcaacgcgttctggcggtgggatggcaaaaccggttgccatgttccaaagtggccgcagtgtggttgtatttatggaccgcagcgaaaggtggcctggagaatccttgatgcccaatacttcggagtggcacaacgacgccgacgcgtgtttgttgtcgcaagtgctcgaacagacctcgatcccgcaacggtactttttgagttcgaaggcgtgcgccggaatattgcgccgagcagaggcgaggggaaggaaactaccagatatacttcaaacatcgctatcagatcttgcgatgatacaaacatagttgccatggcacatgggcaaggaggggctgagataaaaaccgataattcggcaccaactttgacatgtaaccatgaagcaccaattgtattgctcggcgacggtagaatgcgccgtcttatccctgtcgaatgtgaaaggctgcaaggttttcctgatggacatacattgatccctacggaaaagcgtaaaaaagtttcttcagatgaactggcataccttcgcaaaaactatcctgatttgagcgaagaagaggccgcgatgcttgcagctgacggaccgcgttacaaagcgatcggcaatagtatggcgataccagtaatgcgctggattggcgatcggattaccaaggctgcatgttggcagaatgaagggaatgaaacaaaagagcgaaaagttaaaccagcggcagaattcgaacggtccatattcaaatgggctggtggaaaatttggtgttctggaacaaatctttcgctatttgccagaagggaagcgcctgattgaacctttcgtcggtggcggagctgtcttcatgaatgccggataccaggaaaatctgctaaatgatgtgaatgctgacctgattaacttttacaagactttgcaacgtgaggaacgttcacttatcactctggcgcatcggtttttccaggactacaacacacaggaaggatacctggcagtacggaatgcgtttaacaaacaagtctatgatgatttacatcgcgcagcggcgtttttgttcctgaaccgacattgttttaacggattgacgcgttacaaccaagccggtgagttcaatgtcggttatgggaagtataaaactccgtatttcccattgcaggagatggaagccttccttggtgcggaagggcgttctgagtttgtatgtggtgattttgctgcggtgattgaagctgccggagaaggagatgtcattttttgcgatccgccatatgaaccgcttccaaatacagagggattcacgaactattccggtcatgactttaagtttgaagagcaaaaacgcctggtgtctctgttgacggatgctcatcgccgaggtgcaaaggttctaattactaacagtggcgcgccaaatatcagagagctttatcatgacagtggcttcagagtggaacctctttttgccagacgttctgtgtcttgtaagggggacactcgaggtgtagctcatgacgttttaggtatattgctctaa

SEQ ID NO: 17922 - DNA, 426 bp, Escherichia coli
atgctcggcattctcaaaaagaaattccgcaaagcggctggcggagtcaagaagatggaaaaccgtgatgcggtggaagcgaccgtctggggcgcatattccattgcatactctgacggcacctgcgatgcgaaagaaattgcagtattggaaaaaaccattgcagcacttcctgcctttgcgccgttctccggtgaaattgctcagatgagtgccaatattcgcgctcaatatgaagcctcgcctcgccgagcgaatgcccaggctttacgtgaactggctgacgtgtctggaactaatgatgcggtagatgttctgtgcctatgcattgatattgccgaccaggatggtattggggctgaagagcaggagcaattgaaaaaaattgcccaagctcttcaattgccactggaacagtatgtctga

SEQ ID NO: 17923 - DNA, 150 bp, Escherichia coli
atgtctgatggttataaaagcacgtttaattctagctttggtctttctcgtgctatctgtgctggtggatttcaccagcacaatcctgtcagttttatcggacggggcgttggtggcagtagctgtaacattggtatggccgatatttaa

SEQ ID NO: 17924 - DNA, 1365 bp, Escherichia coli
atgtctgcatcccctcttgaatccatgccaaattcccttagtgcagaacaagctgtacttggtggcttaatgcttgataactgccgctgggatgaagtggcagatcgtatagttgctgatgatttttataccagtgctcatcgtgaaattttcagtgagatggagaggttattaagtcatggcaaaccgattgatttgataacacttgctgaagcacttgaacagaacggtaaattagaacgcgccggtggttttgcgtaccttgcggagatgtcaaagaacacgcccagcgcggcaaatatttgtgcttatgcggatatcgttcgtgaacgcgcggttgttcgtgaaatgatttccgtcgcaaatgaaatagccgaagctggatatgcgcaggatggcaggggcagcaatgaattgctggatatggccgagcgccgcgtttttgaaatagctgaaaaacgacaaaagagcggtagtggtccaaaagatatcgccagcattctcgatgcaacggtatctcgcatagaagagttgtttcagcgaccgcatgatggtgtaacggggattgataccggatttaccgatctcaataagaagacggcaggacttcagccgtccgatctcatcattgtcgccgcccgcccatctatggggaagaccacgtttgcgatgaatctcgtcgaaaatgccgcagttcgtaacgataagcccgtattggtttttagccttgagatgccgagccaccagctgatgatgcgctcacttgcttctcttgcacgcgttgatcagactcgtattagaacggggcaacttaacgacgatgattgggcgcgggtttctggcgcaatggggattctgttggacaagcagaatatttttattgatgactcaagcgccctgacgccgacagagctacgttcccgcgctcgtcgtgtttataaagaaaatggtggtttgagcatgattatgatcgactacctgcaacttatgcgcgtccccgagctgcaagataaccgaacgctggagattgccgagatttctcgctcactgaaggcgttggcgaaggaattacaagtaccggtggtggcattgtcacaacttaatcgatcgcttgaacagcgtgcggacaaacgaccggtaaattcagatttacgtgaatcaggagcaattgagcaggacgcagacctgatcatgtttctgtatcgcgacgaagtttatcacccggatagcgaaatgaagggcattgccgaggtaattatcggaaagcaacgaaatggcccaattggcacggtgagattggcttttaacggccaatactcacggtttgataactatgctggtgctgactggcaagaggattattga

SEQ ID NO: 17925 - DNA, 303 bp, Escherichia coli
atgcaacggaaactaactaagcgtaataaaaattggttgagcgacatgctgaaaaaagccaatcgcaaccatatgtacctcaacgactggctatcaattaaaggtaatctcagtgatgcaaaaatgatcgacagacatgttgcgcgctatggtgtttcacttgtcttagaaaaggctgaattagtattttcggaatattattccattccgcaaattagctccaaaggaaaaatatgtggctatgtgctcaaacataaaagcaagctggatgagcttttagtcagggaaaaggagacgcaatga

SEQ ID NO: 17926 - DNA, 975 bp, Escherichia coli
atgaacatcctgatcattgggcgaaaatttgaagctatcagtgatgtgaaaacatatacggaaatgtgggcttacaacctggcctgcgcctttagtgaggctggggtaacattgcaataccatcgtccatattctcccggcgtcgaaagcccggaggattatgttgaagctgtgttgaccgctgcgctctcgtgttctgcgaaagccattttagcgccaggattgcggtattttactacggtgcccagggaaataggcgtgcaactgcgtcgtcgattcactggatgggtagctcaggtatacgacggttctatgctggattcagcaccagttgatattacttttactgtccgcgatgatacctggcggtacctggataatcccggcaggttagagcgtcataatcgctttaacaaacatgttggatgggcagcgaatcaggagctgttccatctggaaaccaaaacagacgatgttctgcgtatttttgtagaccacgctgcatttgatgttagtgggtttgatcactccttaagtatccttatgaaccttcagcgtctgactgttccgtatgaggccagaacgttgaccgatgacggattggttaccattgatccggggaatatttcggtaactccatacagacggacgccggtaccagcaaccgaatttgcagctgaattgcgtaagagtgatgtttttattgttacgcatcccgaaagccttggattaactgttcttgaggcggcaatgtgtggggcgttggtattaactcctcccgattgccttccgccagatcgcctggctttggtgaaccatatggttatcaagtcgcggattgattgggatgaggttattgctcgcgttgatcgcgtgaaaaatgctgaaaaggtccagtgtcacacctggtcggcaattgcggaaaagatgcttgagacgtttatcacgcagaaaccgtcgcgcggtaacggataa

SEQ ID NO: 17927 - DNA, 633 bp, Escherichia coli
atgggtagtttgacagggaagtatcgggctgtagtggtaagcgtcgatgaccctaaaggtctgatgcgtacgcaaatacgcgttgtcggcatgatggatgggctaccagatgcctcattgccgtgggcagaagccatattgtccaatgcaaacacgttttcaccatttctgcccggcgataaagtatgggtagaatttccctacaatggggattcgcgatggccattgataatcggttatgcacaggatgcatccggtggcgctcccaatgtgccacctgaagcgtcaggacaaggtgaaggctatgtaccgcctgaagttgaaggtgcaccagcacaaccatcaaccagcgccaaaaaagactttatttcgtcgcggaacggactaatggaggtccggacggcgggcggagcctgggccgttacgcacttgaaaagtggaacaacaatcgggttcaacgaggccggggagttatatgccatttctcaaggtccagcattcatctcttccgcaggaaatctcgatataaagtcaggcgcggatgtcgccctgaaggcggggggaagtatggcgatagaggccagcgggaatctatccataaaagccgctcaagtctctgttgacaaggcttaa

SEQ ID NO: 17928 - DNA, 1017 bp, Escherichia coli
atggccacaaagaccaccaccgccccggaaactgattcaaaacgcactcagctattcctgcaatctgtttcaattgggcagaacgaaatccctcgcgaaatgatcgtaggatgtacctatgtcgaacccggggagctatctggtccccagcttatgctcatggtcagagattcaacggcttacgtggtcaataagctgggggtgaaatttggtacaatactgacagtttcacttggtgatccggaaggtcatggcggcatcctcttctcggaagagttctttgttcttaaagcgccgcgcaaggacgatactgtactgatttacgcgtttagtaacccggtgcggttattaaaagttccgtccaccagcgcacagtattttgttgataagcccccatcagccgtagtttcctctcttgcccctggtctgaaggttaatgctgactcattcagaaaaacatccacataccacctaaatgttggagaaaaaccgaccaaggtattgcaggagatagcccgggataccggttctatgtgctgggcatccagggggacgatcaattttaaaagtatggaaaaaatggcaaacgccgctccatcgcttacttatgagtccgccaatcccaacacatccggatttacaattagtcagttcaacatcctgaatgccgattatgaataccagcgccgccacaattacagaatggccagttatgacatgaccaaaggtgtggtttactcaggtaaccaggaagaccccattaaatttacgagcaatcccgatcctaccgcgctggcgaactacaacaaatttattctcccccgcctcgatatgctggtggaaggaaatgccgcgctcactccgggtaccacactgaaaattgtcgttcataacacagcaggtgacggagaactcgacgaatctatccccgacaaaatgatagtgatgtccgtgactcattttgaagatcgtttccgttttgtcagccgtgcacagttaggagtggtgaatgggtag

SEQ ID NO: 17929 - DNA, 786 bp, Escherichia coli
gtgattctgaataatcaggaatggctactggccatctttaagaaaaaaggtcttactccaaccggtaagctggaatctgccactattgatggcattgattcggcgctcgcacaggctttaaacgaagcgttcgactcacaagttgtcagctttaatgatcgagctaaccagtcgttccgggagtttctgaaacgcaccccaagagatcgcataacgctcggcacttttagtgatgtgaaagaatggttgtcatcatttgaagccgatcgcgccgggcgtaaagatacagtctcttctggcccggtaaataagctggcaatgccgcttgtgaatctgtctcgttctcccgcgttttcaatttatgaaggtgaactgtgccgcgataattacgaggaaggacaggtcaccaatgaaaatgatgagattgaagccctggtatcgactatccctttctcactggaatattcgctatggatagccagtgacgagaaggaatctcttgggatggtttcaactgcattagcattctggctacgaatgtatgccagcctcgggcaggcatctttcactcatattgccaatgtcggcggttatgagataccggttacctgttacatagaagggcaaaaatcaatcgcatttcaggatctgaccaccggcaccgccgataacaggctgttcgcggttggattgaacctcaccgttgtggcggagcttccaatcctggcttatatgaagcaaaccaacggcaccataacggtaaaagcgaaaattctggaggcgtga

SEQ ID NO: 17930 - DNA, 729 bp, Escherichia coli
atggctggtttctttgatgacatgtttgaggacacagaaccatcacaacaagtgactggtgataacctcccggacaccgaatcggatccggatattccaggcgaaggttctgaactgattgaagaggaagatattgatgctgaaatcgaaaccgatggtgttaacgttggtaatattgttgatcctgtggagaacaatcaccttcccaatctggatcacggcctgcttagtgattctggtgtgcgccaccgttatcaaggtcatgcagtttataataaccttgtgcggatggactggctcaaagcaatcaagctagaccctgactcattcgatgcggttctataccgcgcaataccttacagagacaaaaatgcacctgaaacggcatctgaaataatagaaccgaaccaacgcatatatgactatcaggatccagaactgataacggccctcgactgcccggatgagatggacgccttctacgcgctatacgacggcagcgataatacgggaattagcgacagtgctttaatccttcggttagccgccgttaatgtgccagtgggttctatgctcgaatggctggaacagctgtcagacggtacaactattcgccgcttctggtacatccataaaatattcaattacggcactgccagggtaggcagtttgttttattgcgtgccttcacgcgcctttgaagggaatttcatcggtgattctgaataa

SEQ ID NO: 17931 - DNA, 1218 bp, Escherichia coli
atgccaactgaatatgctcgcgacaaccttggtcgctatcagactgatggattaagtgcaaaagactttaacaaggtcttcgatcttatccgtaaacagcagcgtcagaatcggcgaaacgcgcggcgtacactcaccccaaggattatgggcatgcgtaaccgcgaacttgaggcattcctcagccttgggaaaaagaaagatggcacctactttacgcccgaagatatacgcagtttcaacacctcaaggcaggctcataaaaccaaattcaagagcacggtaccaggcattacctatgctcagctggtggcgcagtccaccagcattgatataaaacgcgctaacaacaaagtttctgatggcacagggatcaaagccgcgacatttctcgggctaaaacacaaccttgcattgatatctgttaatgcctcggatgagtcagtccaccagcatcaccgtgtcagaattcgatttgaggaatgggataaagccgttgaggatattgctgaagacggtgcgaaaaaagcccgaatcgctgccgatctctgcaagggccgggtatctttcgactgtgattgtggacgccatcaatactggtatcgttatatggccacggctggtaactatgctgtcgcgccgccaaaagagtatgcattccccaaaatccgcaaccctgatctgactggtgtggcttgcaaacatgttttgcacgctatgacgcgttttcaatctcccacatggcacaaggccatcattattgccctggaaaaagcagctgaacaggtggccttcggcgatgacaagcggaagacaacaacctatttcaaaggcgaactggctaaatcgctcgcgcgcaaccggacaacaacgacggatcaggctaaagctgcgcgtgagtatgagctgtatctgaaatctcaggatgcattaggcaaaaaactacgcgccaaagatagcgccacagacaacgttcgccggttgttaaaaaaagctcgcaccacggcaaacaggaagaatgccgaactaaaagcatcgcgggtgagggaagcccaggctcgcgctgaagccgacgctctcaaaaaagccctgcaaacgcaggcgaacaacctcataaagtttttcatgagtcagggaatggacaaagccgctgccactgcgcaggcgcgaagcattcttgagacacaaattaacgaagcccgtaaacggaaaggataa

SEQ ID NO: 17932 - DNA, 261 bp, Escherichia coli
atgtgtgaatcgaacgacaagaatctgacgatttattacgttcttcccgatgagcaatatcgcccggatttgctggcttaccgtatgtggggcatagcagagctacgctgggttgtgacgctcgccgccgggcttgaggatgagtctcagggtatgactgttggcaaaaaattaaaactcccacctgccacctggatccgcgaaatgattcgccatttccaatatgacggccaggtgatagggacattatccattgcgtaa

SEQ ID NO: 17933 - DNA, 246 bp, Escherichia coli
ttggcagaacgtgttgatgatgcagagctgagcatgaatcagttagaagctctcaaagacatggccatagataacatcagaaagcaggcacaggtcgtgagccaggtatttacagggaagtgtcgttactgcaatgaaccgattgaatcaggcatctattgtgacgctgagtgtgcgcaatggcacagggaagagcaggccgcaaaacagcgtaaatatggcatgcgaccggcaggatttgactga

SEQ ID NO: 17934 - DNA, 579 bp, Escherichia coli
gtgttgcgctttactgagcaagagtatctggctttcagtaagcgcaggaagaaaggatgggctaagccaaagcccaaaaaggatccgttcttatcacttgccccggtaaaagaagtttcgccacatgcgaaggcgcttgcagcactggcaaaaaatcctgatctgcgagtaggaaattgcgagcactacgaacaggttttcatttttgattacttcgagcgcaattaccctgaaatttatgagctgttgcatgcaacgcctaacggagggaagcgttcaaaagcaaccgccgggaaaatgaaggctgaagggcagaaaaaaggttatccggacatgagtctcgataaagcatgcggtatttatcacggcatgcgaattgagcttaaagaaccaaatggtaaagccccgacgaaagagcagatcgcctggatgcgcaggcttagagaagaaggttactacgttgttcttgcgtatggtgcagaacaagcgattaccgccatcctggaatacataagccttaaaaagggtgaggctattgagcatgtattgaacggcgataagtggttgtatgctgcttaa

SEQ ID NO: 17935 - DNA, 156 bp, Escherichia coli
gtgtcatccaaggttaattatgagtcgctggcatcggtcatgccgcgtaatgaacaggaaacagatgctgtagtggaccctgtaatcgctgaaatgaatgctcgcctggaggctgaatttgcagctgagaatgaacataccacccagggcgactag

SEQ ID NO: 17936 - DNA, 627 bp, Escherichia coli
atgtttcccaagaataaatttagaggcagtgatcgcgttattatcgtcggcagtggcccaagcgccgcaaactttgttgcgccacgcggagtgccgattatagcggtcaatggggctatcgactggcttaaccgcgcttcttattttttcacccttgatccatccccagacaatatgcggcgcgttggtcgtggccgccgtcgccgtggtgtttgttattgcatggcactacccgatgttaaagaacgtgaagtcagcgatggcgttctgtgcttccgtcgtgtggctgaacgcggcatggagccaaaaaatacgaattctcccgagtggtgggcgtggcgctggtccgcacatttcggcctttgcgaagatgagaatgaaattgccagcggcaatagtgcatatggtgctctgaacctggctttccatatcggattcaaacatgtagccctggtgggcgttgacgctacacaagaaccacgcgttcactccggcggcacgccaaaaaatctaagtcacctgcctttgttattccagtctgcgcgtgaacagattgacgttgtttcatgcgggaaaatgggaggtattccgcagatgactcttaaagaatggctgaagaatacatga

SEQ ID NO: 17937 - DNA, 678 bp, Escherichia coli
atgatggcacccacaatttatcaccgtatcgacggtaccaaatacaggaatgtctgggttgttggtgatctgcatggttgctacaccagactgatgtccgaactccatcgtgtggattttgacccggcgcaggatttactgatatcggtcggcgaccttatcgatcgcggtactgaaaatgtcgaatgtctggaactattgcagatgccctggttcagggcagtgatggggaaccatgagcggttgatgctcgatgcgttaagtcctgatggcaacgtgaataactggctaatgaatggtggacaatggttcttcatgttggacactgatcaggaaatattagccagggcgctggtggagctggtaagacgtctgccctatatcattgagttgaacaccgggcaagaaactatcgttatagcccatgccgactatccggataatgaatatcaattcggtaaggaggtgccgcttttcaacgttgtctgggcgcgcgagcgtatcagtgattcgatggatgatattggtggcgaaatttcgggcgcagatcgttttatctttggtcacactccggtgaaaagcccgaagacattctggaatcagcattatatcgacactggtgccgtattttgcggaaacctgacattgatgaaagtgaaaggtgatggtgcagcatga

SEQ ID NO: 17938 - DNA, 702 bp, Escherichia coli
atgaagattgctttagttcttcgctctggtggtgactataacgcttccgatgtgcagtggctggttaatcaactgccaaaaggctatgaaattatttgcctgacagacctgaagcgtttacatgtacctggcgtcaaagttatcccattgatcaaccagtggcaaaagtgccgtggctggtgggcgaaaatcgagttgttccgaccggatataaccgatgatctgttctatctggatttggacacggttattgccggtgatatacgcccaatccttgagaatccaccaaccagcttcaccatgcttagggatttttaccatccacaatatcgtggtagcggtgccctgtggataccaaatagtgtaaaagcgcatatctggagtgcattctggcaagatccggaaggttggattgctcgttgtgttactactgaatgctggggtgatcaggggtttttgcggaaggttatgggtgatgatacaccagcatttcaggagctgtatccaggatggtttgtaagttacaaggccgatgttgtggaacctggttcaaaatatgcgagcgcgcgttactccagggggaatgggacattaccaaaggactgccgaataatctttttccacggcaaaccgcggcctcgcgaagtgtcagaggattggcttcccctcattagctcgttttttgagcgagaatcagaataa

SEQ ID NO: 17939 - DNA, 219 bp, Escherichia coli
atgtggccattccgacggaaatatcactactggctgatcgcctttgttacgccgaccggcggtatcaggcatgtcatcaccaggtatcgcaacaagagactcaccttagccagaattttacaggctgccataggtgagggactggatacaaattgcgtagtccttccaccttcatacttaggaaaaatgaccgaagcacaagctaatacggaactttga

SEQ ID NO: 17940 - DNA, 1263 bp, Escherichia coli
atgagcacttcagcacaaaaccaatcaatcgaaaatgtatctatccctgatgtcctgaatgccggtatcccggccattatccagaacatccgggccgcgcaacgccgcgttagttgtgatgacctcacagcacgtttttttgataatgcggttcagtcagcggagatgcttcacgcacagcttattgatgtttataacgcagaagctgatagccataactccctggtagatgcagctgaaaatatgcagttggatctcggtctgaaggttaaagaaattgaagagcttcagctgcaaattgaacatttgaaacgccagcaacaggacgcgatcgacgatgcgacgcatgacgccaaccagcgtgctgataatgccgaacgtataagcattgagctggaaacaaaactcaatgaaatgaccgcgatggttgaactgcggaactcacagatttcaacgctaaaatctcaatataaagagatcatgaaacttgatccttttaaccttgagaaacgctataacaaagctaaaagcgagcgacaggaactgcgtaagcaggtcgccgaccttaaccaacagctcaaaaaaactattaaagatgcaagcgaggcgcgcgtggcatttgctaataaaaaagcagaggttaccgcgctggttaatgagaatgccaaatttgcgacgctcaagaaggaaatgtatggcattactgagcgccgtttccctgcaagcaaacttcatccgacgttagggcaaatctccttcttcccgcgcctcctggcttatgggatctcatcgcctaaagagttcaataacgagcgtccttatatcgtttctaagctggactttgcttatcagttctgctgcgacatgggctatgccattgatatccgaatcaacgaatggttgatgccaaacttccagccgttggcaattttccgcgagttccagccggaaggttgggtagagttcttccatgaattaatctgtaaagagatggaaagccgccgcccggaattggtccgtcgagttgagtgggcgcaagaggttatgttggcagatgcagagctgccgttcgaaccggaattcattgatgatctggcaactaaagggttgcataccctgtttgatgtggttacccgccgtcatgagcagttggttgtcgaattgggtttagaggaaacagcggcaagaagacttctcgatgtttgctatgcacgtagcgatgcatgggaaaaagagaacggcggcactatttacgttcgctga

SEQ ID NO: 17941 - DNA, 507 bp, Escherichia coli
ttgagtattttcaataaacacgcacaccaggaacgtccgtacatcgtcatagtagatattgatgggacgatatcagaggcaacggaagacaggctgcatttacttccaccacctggcaaaggtgcattaacagagcactggaacgagtttaaccttgcctgtgacactgatgctcccatcacttcagttattgatatggtgcgccagttgtccggcatttacaccctctggtttgtaaccgggcgctgtgagatagccagggataaaacacgagcctggttgcgtaagcacgtaacaaacggggctgagcctttgctatctatgcgtcctgccaccgatgacagaaatgacggcccagcaaagattgatctccttaagaaaattggtctaagtaaaatcgcgttcgcgctggaagataagattgaagtggcgcgtgttttcaggagtcacggcgtacttacgttaatggtcagggagtatgaaaacgcgcttctccatcaacaataa

SEQ ID NO: 17942 - DNA, 579 bp, Escherichia coli
atgaaaggcgaagtgaaagagcgcggcatgatttttaacgatgagatggtccgggcaattcttggcgggaataaaacacagactcgcaggattgttgaagaaaaattctatggacgggcagtggccgcagagttgcttgccaagcattgtccatatggtcaaccgggcgatcgtatttgggttcgcgaaacctaccgggtacatggcaaagcgacggacgtcgcaacgctggtttatcgcgcaagtgtgcgtaactcctggacagaacaaacgcaccgggttccggtcgaggtttgtaataaaccagtatcagaaaagtggacgccatcaattcacatgccgcgctgggcatcgcgcattcttctggaaattaccgacgtgcgtgtggaacggctacatgacatgagcgaggcagatgctaaagcagaaggtgcaactccggcgacgtacaagattacgccacctgaagctgtttatcgcgttggttttggtgatatctggcgcagtatttacgggcaggataactggctatctaacccgttggtatgggtaatcgagtttaagcgcattcaggaataa

SEQ ID NO: 17943 - DNA, 204 bp, Escherichia coli
atgacaatcgtaaaaacccataccggtaccgtgatcaccaaagatggcccgcaggtaaaaaaactgcaccaaacagagcggatgtgggtcgttggcaaaaacgagttttaccacaaagaaactggacgccgccattttgcagaaaatacgcgccgccgactgctgttagacaccatcaagcctatcgaggtgaagcatgtttaa

SEQ ID NO: 17944 - DNA, 144 bp, Escherichia coli
atgtcggatgcgatgcttgcgcatcttatccgacctacacctttggtgttactcgaggcgatttttaacattcccataagttacgcttatttaaagcgtcgtgaatttaatggcgtaaattcctgctatttattcgtttgctga

SEQ ID NO: 17945 - DNA, 1734 bp, Escherichia coli
atgcattccacagaagtccaggctaaacccctttttagctggaaagccttgggttgggcactgctctacttttggtttttctctactctgctacaggccattatttacatcagtggttatagtggcactaacggcattcgcgactcgctgttattcagttcgctgtggttgatcccggcattcctctttccgaagcggattaaaattattgccgcagtgatcggcgtggtgctatgggcggcctctctggcggcgctgtgctactacgtcatctacggtcaggagttctcgcagagcgttctgtttgtgatgtttgaaaccaacaccaacgaagccagcgagtatttaagccagtatttcagcctgaaaattgtgcttatcgcgctggcctatacggcggtggcagttctgctgtggacacgcctgcgcccggtctatattccaaagccgtggcgttatgttgtctcttttgccctactttatggcttgattctgcatccgatcgccatgaatacgtttatcaaaaacaagccatttgagaaagcgttggataacctggcatcgcgtatggagcctgccgcaccgtggcaattcctgaccggctattatcagtatcgtcagcaactaaactcgctaacaaagctactgaatgaaaataatgccttgccgccgctggcgaatttcaaagatgaatcgggtaacgaaccgcgcactttagtgctggtgattggcgagtcgacccagcgtggccgcatgagtctgtacggttatccgcgtgaaaccacgccggagctggatgcactgcataaaaccgatccgaatctgaccgtgtttaataacgtggttacgtctcgtccgtacaccattgaaatcctgcaacaggcgctgacctttgccaatgaaaagaacccggacctgtacctgacacagccgtcgctgatgaacatgatgaaacaggcggggtataaaaccttctggatcaccaaccagcagacgatgaccgcccgcaataccatgctgacggtattttcgcgccagaccgacaagcagtactacatgaaccagcaacgtacgcagagtgcgcgtgaatacgacaccaacgtgctgaagccgttccaggaagtgctgaaggacccggcaccgaagaaactgatcatcgttcatctgctgggtacgcatatcaaatacaaataccgctacccggaaaatcagggcaagtttgatggcaataccgatcatgtcccgccggggttaaacgcggaagagctggagtcatataacgattatgacaacgctaacctgtataacgatcatgtggttgccagcctgattaaagactttaaagcggcagacccgaacggattcctggtttacttctctgaccacggtgaagaggtttacgacacgccgccgcataaaacccaggggcgtaatgaggacaacccgacgcgtcatatgtacaccattccgttcctgctgtggacgtcagaaaaatggcaagcgactcatccgcgtgatttctcgcaggatgttgatcgtaaatacagccttgcggaactgatccacacctggtcagatttggcgggcttatcttacgacggttacgatccaacccgttcagtggtgaacccgcagttcaaagaaaccacccgctggattggtaatccgtacaagaaaaatgcgctgatcgattacgacactctgccgtatggcgatcaggtaggtaatcagtaa

SEQ ID NO: 17946 - DNA, 366 bp, Escherichia coli
atgaaacaccttatcacgcttatagaggagttgcgggaaaaaggtgttaatttccgtagtctgacagacagtattgacacatcaacacccatggggcgtttcttttttcacgtcatgggggctttagcagaaatggaacgtgaactaattgttgagagaacactggccggactggcagctgcacgcgaacagggacgcattggcggacgtcgcccgaagttgacaaaagaacaacatgagcaaatagcgaggttgatcgaaaatggctacagcaggaaacagttggcaattatttacgatatcggtgtatcgacgatttatcgttatcatcctgtagagaagcgccaaactcaatctgagctgtaa

SEQ ID NO: 17947 - DNA, 264 bp, Escherichia coli
atgacattttatgtacatatcgtgatgttatcccttcttggtggggtgtattcgtatttgagtgggctatgtgaaaaccgttacgagtcttcatgcaagaaattgctggccgaatgtatttccgccgtacttgctggctttattggcatgtatctcgcggaatataaggacatgaatgaaagccttcagagctgcatggttcttattttcagcgccaatagcaggcttattattgaaggttccaaaagtcggttgaataggtaa

SEQ ID NO: 17948 - DNA, 330 bp, Escherichia coli
gtgcttgacacacaggaattagctccagttgctattgcgctcctgctttcagtaattggtgggataggcacgttcctgatggatgtccgagatggtcgccagtctggcaatttgttgggattggttacggagatctttgttgcagtgacagctggcgcggtggcgtacctattggggcaacacgaaggctgggagttatcaattacgtacttaatggtaacgatagccagcaataacggtcatgaggtgatttcagggatgaaacgagtgaatatcgatagcattctgaatgttcttacaagtttggtgaaaaagggaggcgggaaatga

SEQ ID NO: 17949 - DNA, 444 bp, Escherichia coli
atgattggctggggtgtatgcgttcttgcgttagccttagccgatcgctatttgctaaaacgcaaggacatcacgcatttagaacttggtgatgtggaaattaaaccgggtttcatccgggtgccgttcaaataccggtctaaattcccgtttttgcgcggcgcaacggtcagatattggatccgcgatgttcagaagccgacgacagtgattgaaggcgaacaacgttgtttgacgtcggctgaacagggcgaaaacagtgaatggttgtacatacccactgaatatatgggtaaaggagagcgactgtggcatttcaacgtcatggttacgcatggcgactcgttcattaacccgttgtatcggattttccctgttactcagcaaatccgcagaagttacgtaataaatctcgcacaggatgtgtcagatgacgaaaaataa

SEQ ID NO: 17950 - DNA, 603 bp, Escherichia coli
atgacgaaaaataagtatgcaacggtcgattttgaccaggttaatgaaaaggggctgaaatcccttatcgcggcgatcaataaaaccggggttacggtaattgaggttgactccagcaaccgcgcaacaacgaaagatggcgttaaagttaaaaccgcaaagctggttcttaacgacggacaaattcttgccatacaggtaaacgatactggcgatatatcgtctgtgaaactgaatggaaaagctattcctaacgctcagtcgccggatatcaagacgcttggtaccgtcatgggacaggcggcccgcaaaaactccgcaaaattccagaaatcactgatcgccaaagcgaagcgtgtagccaatccggtagacaagaaaccggcagttaaatccaactttcagcgcctgcaagaagcaaaacagcggaatgctcaggtggttgccgcttataagtccgcgcagaattcggtgtctttcaatcaacagcagatcactgatttgcgggcgaagctggataaggagacgggccgactcaataacgaaaaggcacggaatggcgaactcaaacgtcgtcttaagcaactgaaagcaggaaattaa

SEQ ID NO: 17951 - DNA, 1920 bp, Escherichia coli
atggaacagttcaatatcaataaaggggtgacgatcaagcctgggcttgacgtgcttcccccgccagtgactgatgatgaatatcgcgcattaatggccggtgaggaccgctatctgatgacggaatccaacaccatggaggaaatcgaggctacgttcttctatgacacgccgatccactggtgtgctacagatttactggaggcgattagttctactcgtttgcagttacaccggaccatgcaggcatttgtccgggcattgaaccagaagctgaatggcaccggaatctctgcggggagtgataaaacgggggatgtggcccagagcggcgcgcgcgcgatcggcggtgctgaaattggccgggcacggaacgttaacgggctgccggtcctgccagccattattccgctcagtgatggtcagactatcagcattctgtttcatagcccgacagcggaaaaccggatcaccaatagcgatacgctggttgctttccagttcttactgaataaaaaagacgttactcacaccgttgctccgatgagtggacgtgatatgacgctggcgcaggtcaccatgaaacttgccaaccttgcagagaaaaactcggcaaaattccagcgtgcgcagaagaagaaaaaagccctggttgatgaaataacccaactacaggctgacagtgaccagaaagaggatgctatgagcgacctcgcggatcaggtggcagcggtagaagggcagaaggtagatctggagcagaaaattaacgctgttgcatcggaagcgaattctctttatgaagagaatgagcgtttgcagacggagattgatcagctcaatcgcactggtgggcgcgaaaccattgctcctgcggggatgacgggtggacactctcgcgcgatgacggatcgccttgcaagtatcaaaaatcgtatgcatatgaacggggaagtgacgctcagtaatggtgcatcaatgaagcaattcattgaggacggtgaagggtatatccagttaaccgattcggatggcagcgtgtacatgatcaaggctaaatccatacagggtgtagacatggcagatgcgatcggcaagctgtttaaagcctataaagcgggtaatgtatcggaatacctggtccaaccagaagaacataaaccagaaaacgtcgaacctgaaccagcggaggataccggtagctcttcgcctgaaccagaagtctctgtaggtgcatatcgatatgccctgcaaatgcgtccggcggcccctggcgcaatacctgaaggtaacaaagcaattctgccgcgccctgatgaaggtgacccgtattatgaatatgcacgctacggcattgctacttacgataccccgctttctgatcagcaaatgagtgagtacgacctgaagttattgcctcgcgaggattctttcgacttcctggcgaagacacttactaatggtccgtttggcaaatatgcacaaaaagctctggagctggccaccagctcaccagacgagttccgcgtaatgctgaagactcagtttcaaaaaactttccccaatattgcgtttccggggggcgctggcaccgagaaaatggtgcagagcatgatcaatgcattgcaggccgaagtcggtgagattactcagccagaaccggccccggcacagcctgatgaaacggttagcgaagcagatgcagaggctaataaagccattgaatatctcaataacgtgatggatatgcaaagcactgacatggcggagatccgtaacgcccggggcaatgtccgggaagcgattgcagcccttcaggctgccggacgttttgaggaaaacgaagagctggttaatggcgctgctcgccacctggctgatctgctggtagcaatccagaaagcggggatagcggcatga

SEQ ID NO: 17952 - DNA, 366 bp, Escherichia coli
atgacactatcagctattgagttaatggatctcagcgataagttggatgctctgatgtccaaagcggctaccgcgagtggcatggagttgctggatatcagcgatgaaattgaccagatcatgcaacagatggggtacggcgcgtccggcggcagtagtggcgaggaaaaacaaccttcggtacatgatggtgtgccaaaactggttgctgatttcctggctgataaattcgtcgatcagagcacagatgcatttatcggtaccttgcaggacttgagtcaatatgttggcacatacatcgacctggaccaggttaaacagcacacggcggcatggatagccgccaacattgaagaggcagcataa

SEQ ID NO: 17953 - DNA, 2988 bp, Escherichia coli
atgagcttaagcgatcaggtggtaatggccaccagcatagaaacgctgatcgagctgcttaagaacctgcccgattatgggcgggtttcgtatgtggtgacagcgaagggagacgaggtaaaaacagcgtttgatatcgtcgatgcctcagctcttttggtatccaatactctggatgggaaaattaatcctgactatccccaggagcttcagccgcgcgaccggacccgcgcatccagccttcttcaggttaaccagatatccaaagatttgcggcctgctcagcttactgattccggtttatccagccatggcgcgccgataattggtgaggacaatgccgttgagtcaggtaatggacggaccatggggatcatcaaagcctatcaggacggcaatgcggatcggtatcgtgagtacctgattgatcatgcgaccgaattcggcatacgacctgaaaaggttgaatcaatgacggctccggtactggtgcgccgccggttaactaaggttgaccgcgttcagtttgccaaggactcaaatatttctgatcttcaggaaatggcagccagtgaaaaggcttttgttgatgccgacagcataacaccggcgatgatggcgctttttaacccgtcagaaagcggagatctgcttagccgcagtaatgacgcgtttattcgcggatttatgacgcaagttggtgccacacaggcggctggccttgtaactgaagatgggcgaccaacacggcaacttgtagaccgtatacaaaacgcgatctttgccaaggcatataaggatgcgcgcctggtaaggatggttgcagaagaacctgatccggatatgcgtaatgttctgacggcgcttaatgcggcagccaatgattttgtccagatgcaggctttatcaggagaagcgcacaagcaggctgtgacaactattgttgatggcattgagacagcggatagcctcgataaaaaggcgctggcggcattgaaagatgcggtagacctggtaaggcaatcgaaggagtcaggccagcatattaccgatgttattgctcagggggatatgttcagcgaaacggccccggaagtgaaagcactcgcgttgttcatcgtcgcgaataaccgtagcgcgaagcgtatggccaccgcctttaaattgatggctcaacgtatcaatgatgagttacagcaccagggccaggcgctgggggatatgtttggcggtggcgatgtgtcgttacaggatatccttcgccaggtgtctcaggaactggaaaacgaaggcattcaagggatatccggcggtcttttcgagtccgtttccggcggtagttacaacggtgttgctccatataccagtttgctattacatcgggcatccggcatcaaagacattattcatctgatcaggctgctttcccgtacagatccccaggatgaacagcttgtacaagtgcttgcgcattttgttcgaatgcctgttgccgacgtgaaaaaatggtgccgattattcggtatcagcaattcgttacttcgcggcttgttaaatcacgcatcctcccttgggcgcgatggctttgacgagatagcgcaggcgataaaaaacggagatatgccaccagctattgactggttttccattcgcccaaccagggtgaaagcattccttagcgcggcgcattcggcatcaccattggcagaaatggttcagaggttgtcgctcatattcacagaccataccgcgttgggtgatctgactctggacgagatgaaagaagcctccattcagtgggccgatcaacaaaatgaggttaactcagacttcttgccagcattcaggaaggccgttagtaaagcggatgatgcccgtggaattctgaaggcatttaaggcattgcaaagtcgtgttaataaacatgtcggtgatatcgatggggtaacggcggaaggccgggatatccttaaagagcacggcataacgccagagtttattgatgagatcaggactgatatgcagcgtgaggtcgtatcgtccctgcaaatcgtagccagagcgttggcggatgctaatccgaagagtgcggccattgttaaccgggttattggtgatattgaagcatcggagggcatgggggcgctgaaactcttcctttcgcgagcgtttaatcctaacggcaatattctccctggcattattggtgaggctaaaaagtatgtcagtgaagaagaacttgagcagcttgaccaactacttaagcgattctcatataacccgcagacacgctggcaaatgaatcagcgaagtatgggttcggtccacgagaaagtgttatctgccatgaacagtgcgatcgcaaactcatccgtatctgaagaaaaagctcttgagtgggccgactcttttatcacagaagaagtggaagaagcccgcgctggacagaatggtgggatagacctgcgcaaggaacttgctgatatttatcgcctgaccggcggtaaaatttcgaccttatcaaaggtggttcaccaccagggaagggcatatgcaaatcttaatggtgttgttgctgtcaatttgaacgatgaaaatgcaagtgcactgtggcacgagctgggtcatcatcttgagtacagtaaccctggtttgttagagaaagcccggtcattcctgaaggccaatgttgaaggggataagccatctttcgttaatatcggtgggcgtggcaagcctgaatggtgcttcagatctcgattgagtaatatttatatggcgaaggtatacccgcctgtctcagtgagtaattctggtaaatttcgacacaaatctccgacaatttccaaaacgtcagcaacggaagtgttctctatggctcttcagttgtatcatgacaaagaggccgctgccgcatcactgatgaatggtgacggattgctggaactgttattaggtgtggcaaaggagctaaataatgcagattaa

SEQ ID NO: 17954 - DNA, 309 bp, Escherichia coli
atgcagattaaaatcgcagcgccattaggcggagatgccattatcgaatttgatgataatgaagaagtttccgggcgtttaagcattatctccggtgacattaccgaggacatgatcgctgaagccatagctggagcaaatcccaatagctatatgggattcgttaacacccttgatgctcccgcaagtgatgttctccgaacgctgcatctttacgctggctggtttgttgattggccagcagtagatggtggcgatgaggacgacgacgatgattttggtgatcatgtagaccagatcgtatattga

SEQ ID NO: 17955 - DNA, 1095 bp, Escherichia coli
gtgattaatcgtatacagaatgaatctgcctggttagcactgatagaacggtataaatacaattgggaactggcagcaaaagagttgcttgatattgagttaacacctcatcaagcaaaaattattaacgcgataaagaacaccggagccaaagtcactgccaccacaccacatggtattggggaaacctctattgtggcagtgattagcatcctgcaaacaatactgtattcgtgttcccgtacagtggttgtttctcctgcgattaacgatagtcgaaaaacaataattgactatatgttccgttattgggagcgagttacccaaaaacacccttttcttggcaattatttcagaatacaccctgacaaagggttggtgcatatcagtgaaacatggggatgcgtctatataacctattgtctgaataacgaagagtctctggctggttttactggaccgcacgatcttttcatcgttattaacgcggcagaaatcagcgaccgcgctcatgctgtgataacaggcaatttgaccggttatgattcgcgcctgctgttgctgtcgaaaccatcggaacgagagaaagggtatttttatgattcgcatcaccggttggcccatagtgagaacaatcctgctggtattttcacggcgataactctcagcacagaggattcacctctcgtttctgaagcatatcttgaattcaaagccaaagagtttggtgggcgcaatagcgatgaatatcgccgattgatcttggggaaattccccgggattcgggagttgatggaaaagtcatctgttccccgtaatatgcacttcacaatgactgacggtagtaaatgggtagtgcctacgatcgtgatcgccaaacaccatgcgaaacatcacgctcaaaaacacaactccagcacattagactggctgaaggcctatacaataccgttattctcggcaaaccataacgctataactgaatgggctaaacaaatcccctggcaggatgtggctgaagaggcatttgtcgaaaaaccaccaagagatttgcacgagcactgttggctgacatcagaaaagagcttctcgtga

SEQ ID NO: 17956 - DNA, 795 bp, Escherichia coli
atgacagcacaaaatactaaaaccattcaataccgcctacgtaatggccagagtgtcgaagtgaccatcaataatgatggagtgccaggcgaaaaggtttctatctctgatctggctatcgaaaaaaccatcatgtgccaccttggctttactgaagaagtgagcaaaaagcatggtgtagctatctggcgcacaatggatactggcatgcgcagattcattactgctcgtacccctggtatgaccatgatggacctcatgcagattgcgccgctgtttgagtgtgaacctttggatgtattcagcaatccagccatctgccagcagttatatggtgagatgaaactcgcagttacccccattgtgctgcatgaaggatcgcttgctggcgtgtggaaagtagagcgtatttcaagctacatgcccttccacttccatgtcaacggcataatcactggtgaaaaccaacctgtttccgttacaaagtcagacctcaagcgcgcaattcttgaagcaagttgtcgagttatcggcctgggcaaacagtcttatgtatccttcccggctggccctgaaggcccggcagaaattctgattatggatgccgatctgctctggcaaatacagtttctgattggcaaaagcatcatccgcgctgaagaactcgatcagtacattacctgctcgatgacggatgaagtcaaaagtgtggctatagccaatgcccggaacctatgtcgtgctgcattaacagaactgcaagaaaacaccacggaagaagtggaaagtgattaa

SEQ ID NO: 17957 - DNA, 489 bp, Escherichia coli
gtggcacaacgcggtgtaaacaaagtcatcctgattggtaccctggggcaagacccggagatcaggtatataccaaatggcggagcggtcggaagactcagcatcgcaacgaatgaatcatggcgcgacaagcaaacgggccaacagaaagagcaaacagaatggcataaagtcgttttgttcggaaaacttgctgaaattgcgagtgagtatttacgaaaaggttctcaggtctacatcgaagggaaacttaaaacccgtaagtggacagatgacgccggtgtagaacgttacacgacggaaattatcgtcagccaagaaggaatcatgcaaatgatcggcgctcgccgcgacgattcacagtcctcaaatggctgggggcagtcaaaccaacctcaaaaccaccagcaatacagtggtggcggtaaacctcagagcaacgccaataacgaacctccaatggactttgacgacgatattccgttttga

SEQ ID NO: 17958 - DNA, 558 bp, Escherichia coli
atgaagggaaaaacagccgcaggaggcggtgcaatttgcgctatcgcgatgatgattaccatcgtgatgggtaatggcaatgtgcgaaccaaccaggcggggcttgagcttatcggaaacgctgaaggttgccgacgtgatccatacaagtgcccggcgggtgtatggaccgacgggatcggtaatacacacggggtaacgcctggcgtgcgaaaaaccgaccagcaaatcgccgctgattgggaaaagaatatcctgatcgctgaacgctgtattaaccagcacttccggggcaaagacatgcccgataatgccttcagcgcaatgacaagcgcggcattcaatatgggatgcaatagtttacggacctactacagcaaagcgcgaggcatgcgagtcgaaacgtccatccacaagtgggcgcagaaaggggaatgggtgaatatgtgtaaccatctccctgattttgtgaacagtaacggcgtccccctgcccgggttaaagattcgccgtgaagaagaacgccagctttgcctgacggggcttgtcaatgaataa

SEQ ID NO: 17959 - DNA, 1020 bp, Escherichia coli
atgactgatgttttgaaaacggtcactgaccgcttttgtctctatagcaatgctcgaaaaggtcgccagaacgggcgacagtatgtattaagcgcggtaaagaccatgcttgaaagcaaggaaactcaggaaggtttacgccttggtgagcttttcggctattacggtcacggtcgccgacagctgaccggtaaactggaagtaccagaaaccagcgtgatcatggtggaaggtcgcccggtcgtaatcgacaatgttccagcatgccgaacagtggctatatctgttgacgacaacggcatcgttacccatacacaggaaattcttaacacagagccgggtaaaattgtcgccgcgatgatcgaaagccgagctggtggctggagctgggccactggcgggcgcgagtccgggaaaatcgctgtaaccaccagcttccatggtgtggattatgtgacaacgccgaactatatcagtctggatcatcctgccagcgccggaatgtttgaaagcgcggattctaaatccttactggcagagtccctggcggcgcatgggtactccgacgagtcagtgcaggccgttatatcccattacggcaaaatggctgaactggaaatgatggtggaggcgacagagcgtacggcagaactggaaactgcactactcgaaagccagggccgccacctcgaagcaatggccaagatcgcagatgctgaagcgcgaatcgctttgctggagcaaacagcgggtatccgcgatgatgtgctggcagcgatgcaagacgaactggataacctcccgattttcgtctccgccgcccaaaaagacgcattccgcctcaaagaacctggtgatgcaaaaatcgtagccacgcttttcgaatctctgatcaaagttggcgcacgcaacttgcctgtcaccaagaaaattaaggaggttccgcaagcggctaacgtccaggcaccgcgtgagacaagcatcatcacgtttaataattcaatcaatccgtttaaataa

SEQ ID NO: 17960 - DNA, 1710 bp, Escherichia coli
ttggcagacaataaaatcacgctatcctcggtcaggaaggcgctggcgggggtttttaaagacaacggagaacgggacaacatcctcctgtccgcgctggctgtgcacggcggaagtgggtatttgttttctcgcgcaggggcaccggtacaactgtccggcttcttaggcggaaaaccgggcgatagtggcatggctggcgatgggctggtggacggaagtcgctttatctttgatgaagttcaactgccggaagaccgcttgcaacgctatccgctactcgaagagatggcggtttacagcacgatcgccaccgcgctgaacatccatattacgcacgcgctctctttcgataagaagaccggacaaaccttctctatcgtgccggtacataacggaaacgatagtgactatgacgccgcgcaggcgttgtgtgacgagctgatgaacgacatcgggcgaaccatcaacaaagaggtcgccgggtgggcatttatcatgtctgtatttggggtggcttatgtcaggccatacgccaaagaaggaatagggattacgtcttttgagtgctcctattacacccttccgagcttcatcaaagaattcgaggtcagcggcaacctggcgggatttagcggcgattatctgaaggacgcgtcagggaaaatggttttcgccgatccgtggaccattatccctatgaaaatcccctactggcggcctaagtcaaaccttatgcctgtgcacactggccataaggcttacagcctgctggataatccggaagagcgcacgccgattgaaacccagaattacgggaccagcttgctcgaatacgcctacgagccgtacatgaacctgcgttcggcgatccgctcgctgaaggcaacgcgttttaatgcgtcgaaaattgaccgaatcatcggcctggcgatgaatagtctggatccggtaaaagcagccgattattcgcgcaccattactcagacgcttaaacgagcagctgacctgatggaaaagcgcgcacgcggcgcgaataacatgcctacggtgaccaataccctgctgcctattatgggcgacggcaaggggcagatgactattgatactcagaccatccaggctgacatcaacggcattgaagacattctcacctatatgcgccagctggcggcagcacttggcctcgattacaccctcctggggtgggcagatcaaatgtccggcgggcttggtgaaggtggattcctgcgcacggcaattcaggccgccatgcgcgcctcatggatccagcagggcgtagaagagttcattcagcgggctatcgatattcatcttgctttcaagtacggcaaggtttacccggaaggtgatcgcccgtacaaaatcgaattccactccgttaataccgctctgcaacaagagcacaacgataaccgcgactcgcaggcgaactacgccaccatcgttacgcaaatcctcgatgccgtcagcaataacagcgtcctcgctaattccgatgcattcaaacgttacctgtttagcgatgtgctggagattgacgaaaaaatctctgaagcactggtgaacgaactgaaagctaaaagcgaggacgacgatcacctgatggattccatcatcaaaacaccgccacaggaactggcgcaaatccttgaatcggtctttaaagagggaaacgataatgactga

SEQ ID NO: 17961 - DNA, 6768 bp, Escherichia coli
atgaacaagctatctatgggggtgtttcgctgttcaagtgtcagcgaaatattgaaatatattagggcaataacatttcaccgagcgccgattagatacggcgtggaaaaggtggaaggcaaaagctatgaccggctgcgccgggaggcgaatcagaaggcgatagatttgcttaattcgctggtggacggcgcgacactgacagatgaacagcgccagatcctggctgggtacaccggcgaaggcggcattggcgggtccgtctccgaatattacacaccaaagcctatcgctgaaggtgtctgggagatcatgaagctctatggcgcggacgtaggtaacactctggaaccatcggcgggcaccggcgtttttaatgagacaaaaccggttggtacggtgatgaccgcgactgagatcagcagtgtttccggtcgtataaaccagctgttacatccggaagacagcgtacagatttccccgttcgaacaactggctgtaagcacgcctaacgattcattcgaccatgttgtgggtaacgttccgttcggcggtcgtgataacacacgcaacatcgataagccttacgcagaagaaacggatatggggtcttacttcatgctccgcatgctggacaagataaagccaggcggattcatgtgtgtgattgtgccgccgtccattgtttcaggttcaaacatgaagcggttacgcctgcgcctatcccgtaaagctgaatttcttggcgctcaccgcttgcctaccggtacttttgacgcaaacgggaccagtacggtcgttgatgtggtgctgatgcgcaagcatccggcagagatggctgagaaaatccccctggtggatgaaagcactcttgaatcggcaaatgtgctttggccaacgtttatttctggcaagtggtttgaaaaggacggccgccggtttgttcatggtacccaggaaaagggcttccaggggcgtattgaggttcgtgccgacgggcagattgataaccaggctcttaaagcgaagctgattcatcgtttcgaaagtcgtatcgactggtctttgctcgatatggctgaaccgtcaccgaccgcagacgttgttgatgaaggggaaatgcgcctgattaatggcgtatggcaaaaatatgctggtggtcgctggattgaatctgatgccgggaaggagctgaagattgatgttgccagttatggcgcggacagctgggaggctcttcagcgtaacctgactacaacagaaggccgtctcggtatgacatttacccagatggcaaatgtccgcgataagtataccacatcaatcagcgacgatatggtgcagctggtggactggattaacagccagcctgaaaaataccgtgaacgcttgtatcgcggggcgatgattggccggatgttaattgaatatcaggatatgaaggccgccgggcatagtgctgaacaaatcgaacagcagcgcctttccctggtatcccgtttgcaggcagagattgaccgttttggtaaccccggtcgcggtccgatagcgaaattatcggggagcggtgcgcgcgcctggtttgctttccgtggtgcaattaagctggatggtactatttctgacgagctgacaggaaagctggttacgcatgattccagcgccagttatgactccaccagctatcaggacaccctgcgttatctctacagtgatctcactcgcgatccaatccagctcgatgatttccgccttgcgtttaccggcgaactgccagccagtgatgacgagttgcttaatttattggccagcacccctggcattgcggtttcaccgtatggcgggattgttccgtttgcccgcgccaccagcggcgacattaacgagatagtggctccaaaacaggaattcctcgccacgctccccgacggtccagtaaagaacaacgtccttaatcagctggcagcgatcgaagagaagcgcatcaagacgccagcagagaatatccggtttaagctcaatagccgttggttcgaccgttccgtcattctggaatttttgcaggaaaacggctatccggatctgcgctatgtgcagtcagtgcagctggaaggcgacgaaatggtttctgatacctatcacggtggtgatggcctgttcgtcgggcaccgatacggtgtcgtccagcgcaaggataaagacacaggcgagatccgctacgagtgggaccgtaaatcaggtgaaaacgcgaccgggttcccggcacagctggaaaagtatctcaatggtgcgcgtatcggtggcaaagatagcgcgacggcgaacggctaccgcgagcagatggcactgcttgaggaccagttcaataagtggatcaagacgcacgatcgctacgatgagctggttgccaaatacaacgatgtgttcaatagcaatatcccgtatgaacactctggcgatccgcttgggttgaagggattaagcggtaagcgacagccatttgattaccagaatagcgaggtacgccgactgtccgaagatgggcgcggcatcctgggcttcggcaccgggctgggtaaaacgacgaccgcgctggcgcttgaggcgttcaactatgagaatggccgatcaaccagaactttgtatgtagtacctaaatcagtgctggaaaactggtattacgaggcaaaagagttcctgagtgaagaggcattcagtaactacctgtttgtcggtcttgatgtgctgatggatggcgatcagattcgccaggtgccggtgctcgatgagaacggtaaacctgtcgttggtgcagatggcactcccgttatgcgcgatgcccttaagctggctgatgaagccactatcacggcgcggataaacgctatcccgcactcaaattaccgtgctgtagtgctcaccaaagaacaatacttccgccttcctctacgcgatgaaaccgtagatgagcatgctcaagatatgcttttggactttgttgccgccgggcgtgtagccagcgcaatggactccgactcccaccgcaaagaggccgcgcgtcgccgtatattgtcggagtattcagataccggcaccgaaaaatcagataagtatccgtactttgaggatatgggcttcgatagcgtgatcgttgacgaaggccacaactaccgcaatagctataaaaatggtcgcgaagcgtcacagttggcctatctgcccaccagcgcggtggcgcaatcggcgcgggatatggcaattaaaaacgcgtacctgatgaaaaagaatggcgggcgcggaccggttctcctgactgcaacgccagtcgttaacaccccgatcgatgcatacaacatgctttctcatgttctgccgaaggaatactggcagaagatggggatctacggtcctgatgacttcgttaaattcttcggcaagaccaggctggaaacggtacagaaaatcagcggtgaagttgaagaaaaaatggcgctggtgggctttgaaaaccttgatgcgctgcgcggtatattccatcgctgggtaacgcttaaaacggcggaagacgttaaggataccgtggagatcccggagctggacgaacaccagcaggatgcaccacttactgaagaacaactggcggcgtatgaagaattgcgtcagcaggcggaagcggcagccaaagccaacaatggcgtaacgtcctcggtcaatgaagacggcgtgattgagcacgagaaagcccgtccgatcttctcaataatcagggatatggaccgcgtatgtactgacatggacctgtactatcgccggatcacctatcgtttcctgccggagtacgccgatgcggtgcagcaactggcggacagtttgcctaaacaagccaccagcgaagacgacgacagtgatgattctatcacgcagcaatcgcaatactccctgatagataagggcgagtttattcagttgcaggttccggaagcgttcgagctggaagtgaacaagcgcctggccaagtttggcattgacgaacagaccgtaactcaccccgttacacccaaatacgcgaagctgatcgccacgctgaaggagtttttcccggaaggtaagcaaatcatcttcacggacgaaaaaacgcagcaccagaagctcaagcgcattatctgcaatgctcttaaccttgaaccttcaaaggtggggatcctgaatgctcagacggttgccgaggcaggtaaaaccggtcagaaactgaaagctgttaaaccgccgaaagagctaccggatgaaccaacagatgcgcagatagcgaaatacaacgagcaaatggctctgtatgacgcctatatcgcgcagcaaaatgaaatgtcgttgggcggtctggaaaagattgcagccgacttccaggagggccggactccgatcatcatctgcaacaaaaaggcagaggtgggtatcaacctgcatcgaggaacgactgacatccatcatctgacgttgccatggactccagccagtatcgcacaacgtaacggtcgcggtgcccgagttggctccaaccgtgcaagcgttcgcgttcactactactgcggcaagggttctttcgatgaataccgactgaagacgctgaagcgtaaagcaggctggatctccgatatcctccgttcagataagtcagaaatggagaacgccgacgccaacgatatgatcgaaatgcagatgtataccgctaaggatgatggcgaacgtctggcaatgatgcaggttcaaatggataaggcgaaagccgcgcaacgcgctcgccagaaagaacaggctactatcgaccttcagaactacatcaaggcgcagcacgcagctggcgaggatgtggaggtgcttaccgctgaattagagcgaagcaaagcggaacttgaaaagaccaccgccgaggtagctaaattcaaacaggcggtaatggccaaagcagctgataacgcagactggaaagcccgctggggtagcgtccatcacacagaccgtatgttgttagcacagtatcgcgcgtcgttgaaaagcgccattcagcgcaagactaatatctctcaagccatctcccgctatgagaaattattgaaccgtactcagaaggccgcgacggatatcaaacgcctgcgcccactggtggaggatgcaataaataaaggcattctggatgttgatcctgaccttgttaaccatgcgagtgagttccttgttatcggcgatcgctcatggcgtgtaggccaatactacgattgtgccggtgatatcgttcgcattaagtcgctggacttcgacagccagcgcgcagacgtggagatcatctttaccttcaaaggcaccaaatcgggtaactgggatgtgaagacgctggataaacaggtggatgtaactcccgatgaagatgctgttatgcagaaaatcagtggtggcgtctccatcgccgggattaacgacatcatttcctgtgacgatttctaccgtttccagcagcgcggcatgatcaaaataactgactcatacggcgttcagactacagagtcaggctatagcattgattttgttggtacctatacggacccactgaagcatgcggtttacccggatcgccgtgacggcgcgctgaagtcgtcaattgcaaaatgggtgcttggtatgatgtctgaagggaataaccgccaggtccgtttggcagaagcattcctggttgaactgtttggttccaattatggcgatgtaatcgcgtcatacggagatacgctatcccctgaagcaattcaggagaaaatagcggatgcgatcgcaaaaatgccggagaaaacaagccaggggtctactcgtaacggggattctgaacttgaggtcaccaatgctattttcggtaccaatgagttccgggcgtcagattatgagatcaccaccacacagtttggccccattggcatttacagcaataaagacgagatcaagcaggcaatggacgcagcaagcgcgcgcattgcagcagaacggaaagccaatctgaatcatgcagtcgccgcgctgactcaatcgtgggtaacagcaatcagggaggccgccaccacagggaaaatcacaccggcaattgcggatgttgtaaacgacggctctaaatttatggatgcctatcaaatggatgcggtgcagttgccatcagcctatggccaactcagctatcgcatgacctacaacctggtatcaatgttttccgaccttgccatccttgggctggtggaccttagcgaggttacgccggaattgctcagcatgcgcaagaatcatgtggagatattgcagagaattaacacggttcttgccgggcgcaccgatgaagagaaacaggccgacgctgatcggataaacctggcccttggcaacatcacggaggaagaaattgccgccagaaacgagaaacaagaagagttatcatcaatacagggtgatgccaccagcatagctcagtctcttggtctgaattatcgcgtatccaccgccgacctgaagatgatgtacgcaccaaaattcgccgctggcgaggtatttgggcttcaggaagcctcaggcatgaaaggcgttcttttccgtgcgaaagacgcaatcaaggcgaaattcggcgctcgctggctgccagcgaaggcgaagaacagcgatttcccgggtaactggtggattatcgagacaaaacacaacgtggcggacgttctggccgtcatccaacaatacgcatga

SEQ ID NO: 17962 - DNA, 441 bp, Escherichia coli
atggccacactatctgatacaataaaaccgaataaaacatatcttgaagcggtactccgtacagcgttgttaggaaagacagaagacgaatacgttgatttcttcctgtcagggctacgcgggcgattactgaaaaatccccgcctgtaccgcagctatggtccatactggccggaaattaaaaaattattactggagcgcggttatggtaatttcggtcgtctcgttgaccgtgacgttcgcaaaatttaccgttatgaccgcccggcgctaacactcatagccgcgacgctctacagccaggagcgttttgataatggtcagatatactcagcctggcatttactgccagtgcctgaagaagttgacgaccaggactatgagtttgagtcttacgatttggaagttgaagccttggcacaggctggagagaaaacttga

SEQ ID NO: 17963 - DNA, 249 bp, Escherichia coli
ttgaaaaagcgatactacacagtaaagcatgggacgctacgggcattacaagagtttgctgataagcataacgttgaggtgcgcagggaagggggaagtaaagctctgcgcatgtaccgtccggacgggaaatggcgtacggtcgtcgatttcaaaactaacagtgttccccagggtgtccgcgatcgggcattcgaagaatgggagcagatcatcatagataacgcattgctcctgaatgctgattaa

SEQ ID NO: 17964 - DNA, 642 bp, Escherichia coli
atggataagaaaatatgcgttgtttcgatgagcgtcggcaaaccggcgtcaatgactgctgcatggatcaacaacgagctgataatggctgagcggaccagctaccctgaacgccgccgcgatatggaactccagctgctgcgcgaattgcgagaaaaagaggaaaagggttttatcgtgctggtggaagaggaaaacagctttcttactggtcgagttggccagcgtgtaaggttgcgcgatcccttcatgaacggcaggccggtactaattgaggcaatgcagatttataaggagctggaacgccagaaagcaatcaagttaccgcgcaaggaatccggcaaatacatcctccaccaaagcatcttcgattccgaacacgataaaaaaggcgatgaatttttcaacatcaactggagcgaaataacgacagagcatgttctgacgttactatgttgctttgcgacggaatacaacaacgttgccagcgccgactacatcagggcaatggctggagaagttgaggcacgccaggaaccatcgttactaagccctctgattaacataattcgcggaacccaaacactggcgcaaaaacaagtaccacaaggggaattgacgggtaaaagtaattacctctga

SEQ ID NO: 17965 - DNA, 561 bp, Escherichia coli
atgaaaacaatcgaacaaaaaattgaacagtgccgcaagtggcagaaggcagccagagaacgagcgatcgctcggcaacgggagaagttggctgatccggtctggcgagaatctcaatatcagaaaatgcgagatactatcgaccgccgtatcgctaaacagaaagagcgcccaccagccagcaaaacgcggaaaagcgcggtaaaaataaaatctcgtggcttgaaggggagaacaccaacggcggaggaacggcgcatcgccaatgctcttggcgctctcccctgcattgcctgctatatgcatggagtaatatctaatgaggtgtctctgcaccatatcgccggtcgtaccgcgccgggttgtcataaaaagcaattgccactttgtagatggcaccaccagcatgcagcaccggctgaagtaagagcaaaatacccctggctggtccctgttcatgccgatggtgtggttggaggcaagaaagaattcaccctgctgaacaagtcagagatggagttactggctgacgcctatgagatggcaaacatcatgcactaa

SEQ ID NO: 17966 - DNA, 210 bp, Escherichia coli
atgcctgatattgactcaatatccgttgcgttccctgtcaaaagtatgcgtagtgctgaacatttcgtgatgaatgccaccgaggaagaagcacggcgcggttttgccaaagtgatgtctgagtttggcgaatttttggggcacgttgacaaagccctctcaatcagttcagcaaggtccaaagcattaacagcttccatgatgaaataa

SEQ ID NO: 17967 - DNA, 1032 bp, Escherichia coli
atgactaattcgttaaccgttcaccaaaatttgcctgcattgccggtcgatgcaacgagtgatgaggttcgcaagaacctgatggacatgttcagggatcgccaagcgttttctgagcatacctggaaaatgcttctgtccgtttgccggtcgtgggcggcatggtgcaaattgaataaccggaaatggtttcccgcagaacctgaagatgttcgcgattatcttctatatcttcaggcgcgcggtctggcagtaaaaactatccagcaacatttgggccagctaaacatgcttcatcgtcggtccgggctgccacgaccaagtgacagcaatgctgtttcactggtcatgcggaggatccgaaaagaaaacgttgatgccggtgaacgtgcaaaacaggcactagcgttcgaacgcactgatttcgaccaggttcgttcactcatggaacatagcgatcgctgccaggatatacgtaatctggcatttctggggattgcttataacaccctgttacgtatagccgaaattgccaggatcagggttaaagatatctcacgtactgacggtgggagaatgttaatccatattggcagaacgaaaacgctggttagcaccgcaggtgtagagaaggcgcttagcctgggggtaactaaactggtcgagcgatggatttctgtctctggtgtggctgatgatccgaataactacttgttttgccgggtcagaaaaaatggtgttgcctcgccatcatccaccagccagctatcaactcgcgccctggaagggatttttgaagcaactcaccgattgatttacggggctaaggatgactctggccagaggtacctggcttggtctggacacagtgcccgtgtcggagccgcgcgagatatggcccgcgccggagtttcaataccggagatcatgcaagctggtggctggaccaacgtaaatattgtcatgaactatatccgtaatctggatagtgaaacgggggcaatggtgcgcctgctggaagatggtgattag

SEQ ID NO: 17968 - DNA, 396 bp, Escherichia coli
atgtttaatagcctgacagatgccaaggtaaacgccttacttaaggacgcaaaacaaaaagctgctaaccctggaacgagtgaaaatgaacgtgctatggctgttgcaatttgggagttagcagaagaagtaaagcgaaaccgcatgcagtacactcgggtttaccagcaatttgatggtgcaagctggaaagatatcgaagaggctgaatattcagcatgcaaagaagaaaaaaagcctgttcgggttttgcatgaagctgcaactccaatcactgtagaaatccccgatcacagatatttcgagaacgatgatctaccaggggatgtgattcgaattattgatgagatacttcatgaacaaggcttaactgttaaaattacgcataataaatga

SEQ ID NO: 17969 - DNA, 222 bp, Escherichia coli
atgggatattcagctgctaaagtgtccactcatcttgagcttgagaaaaatcgtggttactggcgggcaaaagggtttgatcgtgatagttgccaactgtcattatcgcgcggtgaagagaaaatagaacgcacgcgcggtcgctggcgtttctatgacgagaaccataaccaggtaaaggcagagccaatcctgtacactctgctgaaaacaataatttaa

SEQ ID NO: 17970 - DNA, 210 bp, Escherichia coli
atggctttcattccaccaaccatcgacgacgttagacattgctctaacgctttatctgtagaccccgccgaaaccgacgctgcccgcgccattgctgaacactactcaaagatatccaatcaggagtaccgcatcactcaagacgacctggatgatctcactgacacaatcgaatatctcatggccactaaccaaccagactcacaataa

SEQ ID NO: 17971 - DNA, 852 bp, Escherichia coli
atgataaattatgtctacggcgaacaactgtaccaggagttcgtcagcttcagggatctctttctaaaaaaagctgttgcacgcgcccaacacgttgatgccgccagcgacggtcgtcctgtacgcccggttgtcgttctgccgttcaaagaaacggacagcattcaggctgaaattgataaatggactttaatggcgcgggaactggaacagtacccagatctcaatatcccaaagactattttatatcctgtgcctaacatccttcgcggtgtgcgtaaggttacgacttatcagacagaagctgtgaacagcgtcaatatgaccgctggccgcattattcatctgattgataaggacattcgcatccaaaaaagcgcggggatcaatgagcacagtgcgaaatacatagagaacctggaagcaacaaaagagctaatgaagcagtacccggaggatgaaaaattccgtatgcgcgtacacggctttagcgaaacaatgctgcgcgtccattacatttccagtagccctaactacaatgatggtaaatcagttagttaccatgtgccgctatgtggcgtgtttatctgcgatgaaactctccgagatggaatcatcatcaacggtgaatttgagaaagcaaaatttagcctttatgactctatagaaccgatcatctgcgaccgctggccgcaagcaaaaatatatcgcctggcagatattgaaaatgtaaaaaaacaaattgccatcactcgcgaagagaaaaaggtcaaatcagccgcatcagttacgcgcagccgtaaaactaagaaggggcagccagtaaacagcaaccccgaaagcgcacaatag

SEQ ID NO: 17972 - DNA, 1485 bp, Escherichia coli
atggccagaagttgcgtaacggacccacgttggcgcgagctggtggcgctatatcgttatgactggattgcggccgctgatgtgttgtttgggaagacaccaacctggcagcaggatgagatcattgagtccacgcagcaggacggcagttggacaagtgtgacctccggccatggtactggtaagtcggatatgacgagtatcattgcaatactcttcatcatgtttttccccggcgctcgcgtcattctggtcgctaacaaaagacagcaagtccttgatggtattttcaaatacataaagagcaattgggctactgctgttagcagattcccgtggttgtcgaagtatttcattcttacagaaacgtctttttttgaggtgactggcaagggtgtttggacaatattgataaagtcctgtcgccccggaaatgaggaggcgttggctggtgaacacgccgatcatctcttgtatatcattgacgaagcgtcgggtgtgagtgataaagcattcagtgtgataacaggtgcgctgaccggtaaggataaccgtattctgcttctttcccagcctacgcgaccttcaggctatttctacgattcacaccacagactagctattcgcccgggaaatcctgatggattgtttactgcgataatactgaatagtgaagaatctccgcttgtagatgcaaaatttatacgagcaaaacttgcggagtatggcggtcgtgataaccccatgtacatgatcaaagtacgtggtgaatttcccaaatctcaagatggctttcttcttggtcgtgatgaggttgagcgggcgacgcggcgaaaggtcaagattgccaaaggatggggctgggttgcatgtgttgacgttgctggtggcacaggacgagataagtccgttattaatatcatgatggtgtccggccagcgaaataaacgccgtgtaatcaactatcgtatgctggaatacacagacgttacagaaacgcagttagccgccaagattttcgcagaatgtaacccagaacggttcccgaacataaccatagctattgatggcgatggcttggggaaatcgacggctgatctgatgtacgaacgctatggtattaccgtccagcgtatccgctggggtaaaaagatgcacagccgtgaagataaaagcctttatttcgatatgcgcgctttcgcgaatattcaggcggcagaagctgtaaaatcagggcgtatgcggcttgataagggggctgcgactatagaggaagcatcaaagataccggtagggataaattccgcaggtcaatggaaagtgatgtcaaaggaagatatgaagaaaaaactcaacctgcactcaccggaccattgggatacatattgtttcgctatgttggcgaactatgttccccaagatgaagtgcttagcgtcgaagacgaagcgcaggttgatgaagctctggcatggcttaatgaataa

SEQ ID NO: 17973 - DNA, 1194 bp, Escherichia coli
gtgacctgggacgatcacaagaagaattttgctcgcctggcgcgagatggtggttacaccatcgcacagtatgccgccgagtttaatcttaaccctaataccgcacgtcgttatctccgtgccttcaaagaagacaccaggacagcggacagccgcaagccaaataagccagtcaggaagccactaaaaagcatgatcattgatcactctaatgatcaacatgcaggtgatcacattgcggctgatatggtggaaaaacaaagagttaatgccgttgtcagtgccgcagtcgagaatgcgaagcgccaaaataagcgcataaatgatcgttcagatgatcatgacgtgatcacccgcgcccaccggaccttacgtgatcgcctggaacgcgacaccctagatgatgatggtgaacgctttgaattcgaagctggcgattacctgatagataacgttgaagcgcggaaggccgcgcgcgctatgttgcgtcggtccggggccgatgttctggaaacaactcttcttgaaaagtctctttctcatctccttatgctggagaacgcccgggatacgtgtattcgcctggtgcaggaaatgcgcgatcagcaaaaagacgatgatgaaggtactccgcctgaataccgtatcgcgagcatgctaaacagctgttccgcgcagataagcagcctgatcaacaccatttatagcatccggaataactatcgaaaagaaagccgggaggcggaaaagcacgctttatctatggggcaagctggcattgttaagctggcatacgaacgaaagcgtgaaaataactggtcagtgctggaagctgctgaattcatcgaggcgcatggcggaaaagtgccgcccctgatgctggagcaaatcaaagccgatctgcgtgctcctaagaccaataccgatgatgaggaaaaccaaacagcatctggcgctccatcacttgaagatctggataaaatcgcgcgagaacgggccgccagccgccgcgctgatgccgcattgtggattgagcatcgtagagaagaaattgccgatatcgtcgatacaggtggttatggtgatgtcgatgcggaaggcacatcaaacgaagcatggcttgaacaggagctggacgaagacgaggaggaagacgaagaagttacccgcaaactgtacggggatgatgattaa

SEQ ID NO: 17974 - DNA, 453 bp, Escherichia coli
atgttacttaactggcagggacgccacttcatggaaataaatcactcacgaataacatcgtatgagattgcggattacatgatccgcactaaatctcttctatcagcgaaagaactcgcagcaatccttgaaaaggaatacccgcatctggatgtcgataagcgcgacgtttatctgcgcttaaaggctatcgctgtgtctaagtattcgtctgttttgattgatgacagtacacgcccacgtagatttcagatccactctctgaatcctgaattctttcgccgcagccgcgcgccgcgccggtttgatgaaaaactccagaacgaactctatatgacgcaggacgaaaaggaacgccgggagcaccagccttgggtaatggcgcgtcaacttttcaataaggtggcccgtcagcaccgtcattatggtaatgccacatccacacgtatctga

SEQ ID NO: 17975 - DNA, 276 bp, Escherichia coli
atgtcgaaaattaacttaaggaccgaatctgcggtgttcaagaatcctacgtttaatgtacccaaacaaacgcttgatgaacttgtgccgattgatagtaggtttgttattcctgcggaactggtcgagaactgcaaagagaagcaaaagtcgttaaaggaaatatcgctttctgaattcctctcccgcagtgatgtaagtaaggaggaggttttaagggcgatatctgcatctactgctaccacgctacgtagattgtatggttccgcggagtag

SEQ ID NO: 17976 - DNA, 390 bp, Escherichia coli
atgggcttcccttctcctgcggcggattatgttgaaagccgaatttctcttgatcagcaactaatcaggcatccatcagcaacctacttcatgcgggccgctgatagccatcaccgtgagggaatattgcagggtgctttgctggtggttgattcctcgcttactccggttgatggttctctgcttgtgtgcgctatggagggtgaatatcgcataaagagatacaggaagtatccgcgccagcacctggaggatttaagcaccgggaagaaagaggcgttaccagtggatgacgatggatacacgggcagtaatgctgtttttggtgtgatcactcatgtcatcaatgatgcccgaagtggggaatttgatgattgtccggtgatttaa

SEQ ID NO: 17977 - DNA, 573 bp, Escherichia coli
atgcctaatcgcattcctctcgatcctgtattgcccaaaaattttgactgcactcctaacgagaaacgctctaaagctcagctggacgcctggtgggaccatccctatggggttacacaacctgacgggaaaattgttgtttattgtctgaatggtggcgcgtgggaccgtccatccgtgcttggtttggcaaataactatgatgaagcctgtgaacttgccgaaagacagcaggctagatgggtgaaaacacggtcacagccgacattcatgttttcaaaagaaccgccatttatactggcgaggatgccgcagcgaccggatcatcaacaagaaattgttgctgaattttcctcaagggatgagatgaatctcttctcattaaagcaggaagaaagggagcgcgtcgaagtgtctccaactctcgaccacaaccggatgaacctggcccaactcgcctggtacagcaaagaattagagatgtctattgcccgacttgaaaacgaaaaagccgctatccaagcccagcatgaagctgtcattgccaggatacgagaagttcaaaacggttaa

SEQ ID NO: 17978 - DNA, 252 bp, Escherichia coli
atgagcgactggaatattgcagctaaaagtcaggaagaacgggataaggttaacgttgatctggctgccagcggtgtggcgtacaaagagcgattgaacatacctgtcatagctgaacaggtagcccgcgagcaaccagagaatctgcgcacctatttcatggaacggctacggcactaccggcagttaagcctccagttgccaaaagggagcgatccggcatatcagaaagatgatgccgtaaagaaatag

SEQ ID NO: 17979 - DNA, 267 bp, Escherichia coli
atgttgtatagagttttatggaaaagcgttattgtcggcgcgatactggctatatctgggtgtgcaatggtgcaatacaacgacggtgaaaaggtaagcatacagtcagatggttggtatggtctggatagcctgcaaaaaaccgcagataaagcctgtcagcaatatgggaagtctaaagcagtatatcagcatagcgcgaacgccaaccctcatctagcgcccggttcgggtgttcagaataccatctggaaatgtgagccttaa

SEQ ID NO: 17980 - DNA, 261 bp, Escherichia coli
atgtttcgtcctcgtccaataccgccgaaaataactaatggctatcagccgaatactccagaaatacaagggagcgaggggcttaaaccaccaccagcaccacgtattccgcctgtagcaagtagcgtatcattacgacgagagttaatattagccttgtcgcccgttctggctgcccgccaggattgggtaagtaatgatgacctggcagaaaaaattacatcgctggtggataaaattctgcataaagctgatctctga

SEQ ID NO: 17981 - DNA, 285 bp, Escherichia coli
atgccaacgaaagctgagttacaggcgcgcatggagattcttgaaaaagagaatgcgagtctaaaaggaatgctggcgcgggcggaaagggaattatcaggcaaattattgccagaagagctgccaccagcagatatacctgatcgagtgtcctggtggatgaagtatttccgtgcaccgtgggaggcgttttggtgctacgaccatcgcagatggtgtgatgaacttgatagcagttttccctactttgcggaagggaacacttgccctgagtgtaggaggtag

SEQ ID NO: 17982 - DNA, 681 bp, Escherichia coli
atggcgcaaaaagaaatgactactctaacgacagcatacttacagcaattggtattttttgcaggcgaggctacttgtcatcctgacacaaactatttattggaatttgagaggttagcgtcacccggtatcgttctggaactggcccaacaggtactggccttgagacaaaaagagcaacatgaaagtaatacatgtagattgaattttgagcagtggttggaacagcaacgaggaaaaatcgatgtggactgtggttgtgtgtccactgaaacatacatgcactggctgcgggtagcttacgaggctggcaactatccggatattccggatagttcggtgtcagcgccaggaaagggcgtcaccggtggacgtatccgcattaagccgcatgtttatcgcgaactggttaaccgtctccacgatacagcgatcaagtgtgctggcacccagcaattacgagaaagaattagccgtgttttgggcgacgttattacgccagatcatcataaacaagccgagaaaagtggcttggaaaggtgtcaccttgaggcggcattaaacattaagccggggcatacgcttggcataattgatgcactattggttcataagatggccagggctttattgccgctggtggctgaaaagcatgaggcggaccatgccaacgaaagctga

SEQ ID NO: 17983 - DNA, 375 bp, Escherichia coli
atgatgacattaaaacattttcttgaccgcccattatgggcggcagccgcaggctatgactttaattatatggattgcatgtcttatactgccaatgcatacgaccattcgttcagcctgctgtttaattctttaagaatattgccggaaacagaagttggagagcttcatttatggctattgggctttatcgcggctgtcgttggtattgctgtatggccttttattttttggctggtggctgttgtagtgtggtttaagtgcaagacataccggaaaaagtatttcttgggtgatggaatgactgatattgccaaaatgaacattgaaaaatggactaaggaatgtgaaaagaaatggcgcaaaaagaaatga

SEQ ID NO: 17984 - DNA, 306 bp, Escherichia coli
atgtggagaaatatgtggaaaggtaataatcatggcagaagccagatgatacttaccgaatatcagtttgaccacaaaaccaataaatcacgttcagtatatttgctccggcacaatagccgcgtaaggaataccgtgctggagcaaaatctgactgttgaaatggataattacgggggcttcaagccaacaatttcgcttgatgattttcctcgtggtttaagcgaaagagaagcaatgctgaaattagcagaatggctacaaagattaagcattgctattgaagataactggtctgaaccttaa

SEQ ID NO: 17985 - DNA, 123 bp, Escherichia coli
atgtcaaaagtagatgcttttatcttctcagcaattgtcggctttggctttactgctggagtgcagatttttattacgtggaaaataatttttaactacgcattaagttattttattcgatga

SEQ ID NO: 17986 - DNA, 234 bp, Escherichia coli
atgggaaaaataacttttgttgttgaattcgaggatggtaaagagccacctgttagcgccaatcttgatgttgctggtggcaggcttgtttcggttctatttggtgactaccgagatgatttcttccaatcagaagaagttgatgtagtgcgagaagcattaaatgagctaagtgttgacaacgatgatgctcatgcggaaatcatcaaaaaaatggaactgctaactcactaa

SEQ ID NO: 17987 - DNA, 759 bp, Escherichia coli
atgaccacttttactaaagaacaattaataaagatgattaagcgcaatataacggttatggatcgttatcctgatttagtaactgcacaaatggatctggaagtatacaaaattgcgctggcatcgctggaagcagagccgataggtttccgttgcaggcgcaatgataaccttggtgactggagttacgtatatcatcgagagccagatgattttgagcgcaaacatttagtgatagagggcatttacgccgcccctccagtgccagtagtacctgaagaaaaaccaatgcctaacgctctaagcatgcttgaaagagagatcacacaactgattggtgatgcgcaggaagccactgttactggctatgagttaatcgctgaagcttggcgtttgatggatggacaagaccctaaaaccagcgattggcatagcaaggcttcgaagtatttaaattccaatattgtagaaaaagttgatgatgaccgtattgaggctgttaaggctgttttgcgtagactggctggcaactatccggtaattccggatagttggataagctgtagtgagcgaatgccggataccaaaacagccgttcttgttgccgtggagtttgacaggaaaggtgactggcgaatgaaatgggcgacttacatccctgggcatcctgacgctaatgatgggtggatgattcctggtgcgtcgtggaaaccatcacactggatgcctctaccagaaccgccgcaagaggtgagttaa

SEQ ID NO: 17988 - DNA, 222 bp, Escherichia coli
atggctaactcgttacttgaaacctgcaacaactggcagattcagagggcggagattttatctcgcaatccagatatggcaatgacaattgataatctggacacgctaattgaacggaccgtgcgttctgcaattgatatagcacatcgagtgggttgggatttcagagaagcggagcggcttgctaaagagcaggagaaagcagcgggtaaaggagactga

SEQ ID NO: 17989 - DNA, 387 bp, Escherichia coli
atgatcactattaccaaagaacgcctgctgacaatccagcagtggcgcgaaacatacggacctggtagcaacgttgtactgccagcagaagaagcggaagaactggcacgaattgctctggcatcgctggaagcaaaaccaataggtgcattccacattgcagaacagcaagttgacggcacaagtgactacctcaaggatggagaatggcctattgataatggaattattgaggtctacgccgctccacccgttccagtagtaccggaagaaaaaccaatgcctaatcctcttagcatgtacgcggttgatgctgttgccgctattgcagaggtgagaggctggaacgcctgccgcgccgcaatgcttcagggaaaaggaaagtga

SEQ ID NO: 17990 - DNA, 495 bp, Escherichia coli
gtgagcgaaattaattatcaggcactgcgtgaggcagcagaacgtgcaattccggcaatggaacgcctgttaatgttgccagctgatgatgatttgttaagtgaacaggaacttaaagatttcggtgtggatattgatgcgctcaacgccttcaaatttctggccggaccagaaaccgtgctggcactacttgatgaacgggaagcagacaaaaagcgcattgcagaactggaagctcgggaaataaaaccagccaaaggtgaagttcttgtcgttgtttctggttttactggttgcgggaaaagcgccattgccggggaaatagaaatcgcgatgaaggctattggtgtaccggttcagtggactaatggcgatgcggaaaagcgcatgacaggagctgactggctgacagcgattgagatgtacaaaccaacagtgcgcatcgtggaagttaatgtgccacgcgccgcaggcattcgcatcaaaggagagtga

SEQ ID NO: 17991 - DNA, 702 bp, Escherichia coli
atgaaattttccaaattttctgagttggtgaatcgtattttgtccaacaaccacagccatcgtcgcgatatggatgtaacgatcgttgttcattcgcctggtcgcatcggttcaacaccatcagttgaggttcagtcaattcaggtgggttttgattgggatgccgggcaagtgatgatttttccagcacggccactgaccacgctaacaccagaacagattactgatatcactgatagtgtgcgcaaaggtcagtcttggcacgcatatcaggaatacaagaagcatcaagagcagttggaaaaattgtcgattgaactggatgccgcaaaacagcgcattgcagagctggagggtaatcgcacggcgctggcggcggagaatgagctggctcgtaaagcagttcaggcattttgcgatgttgttggcgacagcaccgaggtcatctgcgaggagattgggagagatggcgttctggttattttggaggccatgaaggcaacaggaaatatgccagccaccgatgcttttctggctgaagtacgggcgcagggcgtggagatgctggcaaaaaatcatcagagtatcgtcaatgcacttaagggagattctctcttttctgatggtgaataccgacatgcagctattgtttccgcagctgtatatttcgctgcagagcttcgcaaaggaggctgtcagtga

SEQ ID NO: 17992 - DNA, 291 bp, Escherichia coli
gtgaatatcgacacggcaataacgatcgatacgctcctaaataccggtctggcacttctcggttggctttacatcatgtcccgtacatggcgatggctgggttctattttcctaaaacagtggaaaaaacggcgcaaacaggaactacgccagaaggcattagaagcgttctatgacgcatttgagcttagccgcattgaaccaggaacaacagccaggatagcgacaaaaggcgacctgatgatagtgatgttccgacaggagagagcagataaaggggaatcagcatga

SEQ ID NO: 17993 - DNA, 699 bp, Escherichia coli
atgacaattgactatcaggtactgcgtgaggcggcagaaaaggcaacaccagacgaatgggtcgcatttatttcgacggatactggtacttatgcggtgcacacgcccggtgatgaacgatgtgaagacgttatcaaatggacaggctttgatggacagaaaaatgcagagaacaacgctcgtcatgttgccgcgttcaacccaaaggttgcactggagctgcttggtgaaattaagtgcttggaggacacaaatattgatgccacgtgccgaatttcagagcttgagactaatctcgctgcgctggtggcagagaacgctgggctgaaacacgcaatggccgtaactcttgagcatgtgtcggtcacggatgcagggcaggccggagttgctgcaatgattatcaacgatgccctgcaccacagcgaaactccagctaccgatgcttttctggctgaaattcgtgcggaagcacgcaacgaggggattaactataccgccagccgtcttgctgctgcgttcaatcacggatttatcaataagtctttgcgtgaagttttcgacgttacgcgcatgattttgtcagcgaaagaagagttggctaatgaagcgcatccgattgatggcctgtctggtgaatatgcggagaaatcccttgaagaatgggcggaacagattcgcaaaggaggcggccagtga

SEQ ID NO: 17994 - DNA, 645 bp, Escherichia coli
gtgagtaaccgtttttacatgatgtgcttgcgtgaaactgtgggtaataacgcctcattccattgccataacggcaatggttacagttctgatatcgatcgcgctcatgtttacacgcgggaagaagcccaaaaagcctggaattgtgggcgagatatcgatcagcctgtttgtgccgatagtgtggatgcaatggctgtgtggcacgttgattgccagtacatccctacagaaagcctgattgagtcagattgcactgcgtatgtggcctacaaaaaaggtagctggaacggcaacgatgtttactggcttcaacacggtggattgccaacagatgacttcagtaaagcgaccatctttagcgtcgccaacaaaaacgaaccaggaatagtttggttgccattttccattgctgatgcagcaaagcgccggacgttcaatatcaataactttaaccgcagaacaatggttcagggcgcaggtttggtcatgcctgactggttgaaagagcagaacagaagaaagaagtcgcgaagcgggaaggtgcgttggaattgtccgcattgcggaaaaataacctggcagtacagcccatatgattttgaaggctgtagtgattacaactgtgaaggatggcgagaatga

SEQ ID NO: 17995 - DNA, 213 bp, Escherichia coli
atgatgaagctggtgggctgggcgcaaagcattgtcactttccagggcggtgcatctacgcatcttgatggtgtcgcctttatattccgcgttcatctggtgcttggaatgactatctttctgctcttcccgttcacccgactggtgcatgtctggagcgcgccgtttgagtactttactcgtcggtatcagattgtgcgttcgcggcgttaa

SEQ ID NO: 17996 - DNA, 867 bp, Escherichia coli
gtggaaggtacagacgagttccggcttgaagtcgcccagctcgccggtatgcacggcctcaaggtcacgttcaccgatccggcgatggagcagatgcgccgcgagacggccgagcacaaggaaatggagaaggcctttcaggccgaaatcaaggcatcgagccgcgacgacttcgccgaactggtggacttcggcaaagcgccgttcgagcacgtcaagggcaaccgcaagagctacttcgtcacgctgcgcgacgggaacggcgaagaccgaaccctatggggcgtcgatcttgaaagggcggtggcaaatagcggtgcggccgtgggcgaccgcgtgcgtgtcaatcacatgggcagcgagagcgtgacgctaccggacggcaggacggtggagcgtaacgaatggcgcatggagatagcaccaaaaggaagccagacggccaagccaaaaccgaaccggccgacgcctacaccgaacgacatggatgcggcgtttctggccgaaactggcctgtccggcaagcagacgggaagccggacaagcggcaagcccgcgcagcccgtggagtctggcccggcggtgcaaaaatggattgaagaacgcaacaaaaatagagacaaaatatcgtctatagactatcatcggctttggcaatccaccgacgcaggcagggccacatatcaaggtcgcaggcgcatggaagacggtagcgaagtgctgttgttgaagcgcggcgatgaaatgttggtcaagccatccaccccccgcgtagtcgccaaggcggcgacatggaaactaggtcgcgtcgtccaattggacggacgtggacgattcactgacaggagtaacgaggtcgaactatga

SEQ ID NO: 17997 - DNA, 1959 bp, Escherichia coli
atgagcgataaaaattcgtcggcgggtaagctgcggcttatcggcggcgtttatttagtgctgttcatcatcggtttgaacagcatatgtacgcaatttattgcgtaccgggttggctaccacccggcacttgggccgtcactgttcgggcagctttatatgcccttcgactggtggcgatggctgttcaagttctacgactcagcgcccaattcctacaactatgcctttgtgatttttgcgctcggcgtgctggtcggcctactgacctatgttctctggatcggcttcaagacgcgcagctcgcgtaagcatgaagacgttcacggaacggcacacttcgccacgctggacgaagtacgcgaaaccggcctgctaccccgtgagggcaaacaagggcagggcgtctactgcggggcctatgacgaccccgaaacaggcaccacgtactacctgcggcacgacggcccggaacatgtttgcgcccttgccccgacccgttcgggtaaaggtgtgggccttgtcattcccaccctgttgagctggccccattcggtgttcgtgctcgaccgtaagggcgaaaactacgccatgacttcgggctggcgtcagaagcacgccaacaacgtgatcctgcgctttgacccagcgaagccgggcaccggctgcgcatggaacccgttgggcgaaatccagttccgcacccgctttcaggtcagtgacgcgcaaaacatcgcgctgatggtcatcgactccgatggcaagggcatcgagtccgaccacttccgtagtgccgcgttcgagctgctggtagggctgatcctgcacgcgctctacaagggcgaacaggtaggccgcacgccctgcttgcaggacattggccacatgctgaccggcgtgggcgacttcgccgcgccggacacggccaacgaccttgtagacgacccggacggcgacccgaaagcactggccgggctgttcgatgaaatgcgcgaggtgtccatcaatgacggcgacccggcgaaccgggaagcgcagcttgtcattaccggcgtcggcacccgcatggccaacaccccggcccgcgagctgggcagcatcatttcgacggcgaacaacgcccttgcgctgtaccgcgaccctatcgttggcgagaacacttcgcgcaacgacttcaagattgccgacctgatggatcacgaccggccggtgtcgctctatctcatttcgacgccgaagacgtccaagcgccttgtgccgcttacccgtctattgttgaccatgatcgtgctcacgatggccgacgaaatggagtttgacgacggccgggccaagacggcgcacaagcaccgcttgctgctgatgctggacgagttcccgacgctcggcaaaatcgaagtgttcgaggaagccttggcctacatcgccggttacggcatgaaagcctacctcatcacgcaggacgtgcagcagctctacaaggcttattcaaactacgaaagcatcatttccaactgccacgtccgcatcgcctacgcgcccaacaaggtcgagacagccgaatggatgtcgaagatgacgggcaccaccaccgtcgtcaaagagcaggtgacgacttcgggcaagcggttcggtgccgtcctcgacaacgtgtcgcgcagctatcaggaagtgcagcgcccgctgatgacgcccgacgaaatcatgcgcctgcccggcccaaccaaggacgccagcggggagaagatcaccgcgccgggcgaaatgcttgtgttcgtcgctggccagccggtaatccgcggccgccaaatcctctacttctttgacccggttttctccaagcggtcgaaactcaagcccgtgccgactgacgttgtgcgcgtggcccagcaatccaagcccaccccggccgccgccgggccgtccaacaacagcaacgggggctttgtcgtccaatga

SEQ ID NO: 17998 - DNA, 567 bp, Escherichia coli
atgaaaggtcgccgcttcggaatcgccgccttgtgcgcggccgcagtgatcggcgttgcgatcacgaccggctatcacgcaggcctgcgcctcaacttcacggactcggccccgcatgggctttggcttgtgcagaccgccgaagcggccagcatcaagcgtggcgagctggtcgaggtgtgcccgcctgcctcgccgattgttcgcctcatgggcgaacggggctacctcgcgcccggtgactgcgaggattccggcgtaacaccgctactcaagccggtgtcggcggtagcgggtgacgccatccagttcgagccgggccatcccgtgactgtcaacggcgtggccctgccgaacaccgccgctatgcccgcgctgccgggctggcctgccgggcgctacatcgtgcagcccggcgaggtctggctgttttccagctacagcgcgggcagcttcgacagccgctactttggccccgttgtgctggccagcgtgcgcggcattgcccgcccggtcgccgtgatcggcgacccggcggccatcactacgggagtaaccaaacaatga

SEQ ID NO: 17999 - DNA, 897 bp, Escherichia coli
atgatcggcctcgacatgatgatggcgtgcgcgccgaacgtggccccggccacgatagagaaggtcattcaggtggagagcggcggcaaccccttggcgctcaatgtgaacgtcaagtgggtgatcgagcgtgacgagaagggcaacccgatcatggtcacggccgcagacggccagaccaagccgaagcgccgcaaggtcgtcttcaaaagccctatcgccatcaagaccgcgcaggacgccgtgaccgttgcctacatggccatcgacgcggggcactccgtcgatatgggctacatgcaggtcaacagtaccaaccttaaatcgctcggctacaccgtcgaagatatgttcgacacttgcaagaacctcgcagccggtgcgcgagttctgaccgcgttctacagcaacgcgctgccgaaatatccgaacgaacaggccgcactccgggcggccctgtccgcctacaacacgggcgatttcaacaagggttttttgaacggctacttggcccgctacggcgtcggccaacaggtcgccgtgagcgttcccgcgctcaatccgtacacggccccgactgccgtgtttgtacgtcaaccgagaaaggaagaagccatgagcaccaaagaagaagcgagcagcacccagcaggtcgcggaagcgaaaaccgccttggccccgcgtgtcgatcccgtcgtgagcaagtcgcccgaagacagcggcacgcccggcgtgcaggtcgagcacacggcggccgaagcggaagccaacggcgcattcaaagaaacggccatgtccgaagccgaggcgtgggcctcgaacgcggacttgtccgctgacccggaaggaaccgccatcgtcgtgaacggcaaggccgtgcggaaggggggtaactaa

SEQ ID NO: 18000 - DNA, 2337 bp, Escherichia coli
atgaaaaaggaatacgccgaggaagtcgcggcgcggatcatagagcagttggagcagggcaccgcgccgtggcaaaagccgtggcagcccggcgagctgcgcttgccgtacaacccgaccaccggcaaggaataccgtggcatgaacagcctttggctgcacatgcagggccacagtgatccgcgctggatgacctacaaccaagccgccgccgaaggcgcacaggtgcgcaagggttccaagggaacccatatcgtctactggaagttcagcgaggaacgaaaggccaccgacgagcagggccgcccggtcattgacccggacaccggcaagcaaaagaccgtgaccgtgcagctcgaacggccgcgctcattcatggccgtggtgttcaacggctcgcagatcgacggcttgccgccgctggaagcacgacccaccgggccagagccggagcgtcacgcccgcgccgaggccatcttggccaattcgggagcggacattcgccacgaacccggcgaccgggctttttaccggcccagcacggacagcatcacgctgcccgagcgtaaccagttcccgaccgccgacaactactatgcgaccgcgttgcatgagctgggtcactggacagggcacccgtcgcggcttgaccgcgaccttgcgcacccgttcggttcggagggctacgcccgcgaagaattacgagcggaaattgcctcgctgatgttgggcgagcgcctcgaaatcggccacgatccgggccagcacgcagcctatgtaggttcgtggattaaagccttgaaggaagatccaaaagagatcttccgggccgcatccgacgccgaacgcataagcggctatgtgatggacttcgagcaggagcagatgcagacgcaaaccgtcgagcgtcagcccgtgccggaaatcgcgcccgaggttgcggccgagctgcaacgcgatcacgaaaatgccgtggaaggttattcgccgctggaaagctggcagatgatgaaagccgaggccgagcgtaacggctattccgcccgtatcggcttcgcgtctggcgagctgggcgacttctacgaaatcacctaccacgaccagcagggcgagccgtccggcatccgcacggaaatgtatggcgatagcaagctgatgaccgagtacaacggcacgcgcttgtcacagttcatatcgaacgacgacgaaagccagcctgcgacactccgcaccgctatccagcagcacgaagcggccaagctggcccggcaggccgagcagcagagtgcgccgtacacgcccggccaagagtcgcccgcttacaccgtgcagagccgccgcgtcgtgccggagaatgccgccaatcatgcaggccagaacgccgtctatgtgcagctcgatgacggccgcaaggcttggggatttggcgcgaccgacgaagccgccgagcaatccgccgtagaacgtgcgcagcgcgtcggcctcgatgccgaccgggcaccgacccgcgccgttctgcatgagcaaccggagaagcctatgcaatcgcgcacctatctggccgtgccctatgccgagaagaacgaggcgaaggcgctgggagccaagtgggataaggaagcaaaatcatggtacgcgcccgagggcgtggacgtagccacatcgggccttgcccggtggagcgtggacaaggccaacgtcgtcactgcatcggaacccaagcccgccatcgagcagttcaaggacgcattgaaggatgcgggcttgcagctcaagggcgagatcatcacggacgggaagatgcagcgcgtgcccgtcgagggcgaccgaggcggtgccaccagtggcgcatacgcctaccacgaagccgggcgcacgccgggcggtttcatccagaactacaagaccggcgaagtcgtgcattggaagcccgagggcgtagctcccgggcttactgctgccgaggcggcgcagttggccctagaagcggccgagcagcgcaaggcacgcgatgcggcccgcctgtcggagcacagcgcgaccgccgccgccgcgcaagcgttgtggaatgaggccccggccgcgaccgctgacaatgcctattgcaaagccaaaggcatcgccaacccggtaggcctgcgcgtcgtaccggccagtgtttcgccggagactgccgcgcacgggatcaagatcgccaagacggccaaagaagccaaggggctgcgcgaggctgacccggccaaccgggttttcaaagcgggcgacctgctgatacctggcacagacggcgaggggaaattgtggacgctgcaaagcgtcaatccctacttcaaatag

SEQ ID NO: 18001 - DNA, 978 bp, Escherichia coli
atgaagggcggccggaaagcaggcctctacaccgttgccggtgcttccgatccgcgcaaggcgctgtcccaagacggcgattctcctttggtgctcgccgaaggctacgccacagccgacacggtttcgcgtctgctgggcggtaagccggtcatcgtggcattcgatagcggcaatctcgacgcggtggccaccgagctgcgcgagcgtcacccgtcgcggccgctgttgatcgccgccgacaatgaccacaacgcgccgaaggagctggacgccaacggcaagcccaaggtcaacgtcggactggtgaaggccacagaaaccgcagagaagcacggcggcggcgtcatggccccgcagttcaacgacggcgagaagggttccgactggaacgacctcgccgggagccgtggcgacgaagctgcccgccggatgctcgccgagcaaatggcggtagccaagcgtgatgccgccataactgccgagcggttgaccacccttgcgcgtacccgcgacatggaagcccgcaacgacccgacgacgagcgccgacgatgcggccgtagcaacagagcgcgggcacgcggccgaagtgctggccggtgcgcaatccgcactcagtgaggtgcgcagcatggccgccgatggcgtgaccggcaacaccaaaggggcaacccgttcggccgctgccgtcaaagccgggatagaccggaagaccgaggcgatgcacgaccgcgccaaagaggaacgcgaggaagtgctgaaccacggccagaccggcccgctcgatggcgtcaccgctggcgtgtcgtggaaaaaactacccgagcaggccaagcaggcgctcatcgaggacgtgaaaaacggcaaggacgtgaccttgccgaaggacgccccggccaagctcaaacagatggcaggccttgaaccgacccccgcgccgcgctcgcgcagccgtgggattgatgcaggcctttga

SEQ ID NO: 18002 - DNA, 2016 bp, Escherichia coli
atgactacattggtaatcgtggaatcaccgaacaaagtaagcaaaatcagcgcgattctcggcgacggctacaaggtcatggccagcgttggccatgtgcgtgacctgccgccgaaagagctgggcatcgaaccgccgtctttcgagctgacctatcaaccgaccgagcgcgggcaaggcgtgttggccaaactcaaggccgccgtcgcgcaggccgaccgcgtgttgctggccaccgaccccgaccgcgaaggcgaggcgatttcgtggcatcttgccgacgcgctgcgcctcaagaatcccgagcgcgtgacgttcacggccatcaccaaggaaaaaatccttgcggccttcgctgcgccgcgcccgctcgacatgcagcgcgtacacgcacaggaagcccgccgggcgctcgaccgcatcattggctaccgcgtcagcccggcattgtccgatgccaccgggcagcgccttggcgcggggcgcgtgcagtctccggccgttcgccttgtcgttgaccgcgaacgggccattgccgcattcaaggtcactcagcactacggcgcagagctgattttcgagaatgacgacagcaccaaatggaaagcacagtgggacacgaaaccgcatttgccagagggcgaaagctacctgctggattccgcgctggccaagctcgccgccgccgttcgcaacgtatcggtcgccgaatacgaggacagcgagaagggccgggcacctgccgcgccgttcaccacctcgacgttgcaacaggccgccggtcagcgtctcaaattgaagcccaagcgcacgatggagctggcccaacgcctttatgagcaaggcgcgatcacctaccaccgcaccgacgccccgaacatggacgacgaaggccgggcagacattgccgcctatgcgcaaggcgcaggtctgccgctggccgagaagccgcgcaagtggaaggcgaaggagggcgcacaggagggccacgaagctatcaggccgacccatgccgccgatcttgaatgcggggagaacgacgacgagcgggcactgtaccgactcatctggcaacgtgcggtcgcgtcccagctcgccgatgcgacctatgccgtccgtaccgtgcgcctcaatggtgacgccgagggcacaccggtatcgttcaaggcgaccggccgcaccctgctgacgccgggttggctggccgtctacgccgacgatgccgaggacgaggacagcgaaccagacgaagccgccaacaatccgattccggcgctcgccgtgggcgcggagctggtagcggctgacggccgcgtactcagcaagaagaccaagccgcctgtccggttcaaggaacctacccttgtcgccgaaatggaacgcctaggcatcggtcgcccgagcacctacgccgcgatcctcgacaacatcacgacccgcgaatacatcgtggccgacaagaaaggctatttgcagccgtcgtctatcggcgaagtagtgcgcgatggtctggtagaccgcttcgcgtttatcgacctcgactacacccgaggccttgaggaacagctcgaccagatcgcagaagggcaggccgactaccttggcgttgtgtcggccgcttgggccgcgctcgatgacgagctgggcaaactggaatcggccgacctgccagttgcgcatccgtgcccgacgtgcagcaagccgctgcgccggatcaaggggcaacacgggttcttttgggcctgctcagatcgggaatgcaagaccacgctgccggacgccaaaggcaagcccggcgagcgcaaggccccgccgccgccgaccggcattgcgtgcccgaaatgcggcaaggagctggctcaccgtgtcgggacgagcaagcccgtcaaacgcggcatgaagccccggccgtatgacttctatagctgcaccggctttccgaaatgcgatgcgaagtacaacaccggcccggacggcaagcccgtgttcggtgatgacgagaaggccgcaggctga

SEQ ID NO: 18003 - DNA, 708 bp, Escherichia coli
atgttcgacaatctgcgccgccggttggcatggcgtgccgagctgcgcgagcttgaccagaaacaggccccggccactctggccaagcccgacgacagtaatcccggccgtcttctttggtgcctgccggttcccggcaagaccgatgttttcatggctttggaaaagggcgagcacgccgatcacgacaggttcgtggtgccggtgaacgccgtggcgttcaatcggctatggctggccggtggcctcaattcaagggagcggccggacggctgtttgttgcgccgggacatgcccgccgatagtaaataccgtcacgcggccgcctgctttgccgaggggccgcagtcgcccgttccgctggccagcgtctcgctggaacgcggtcgggacggcacccaatcggtcagcttcggcgacggcgtgacgcgcacgttttggctgcttgccaacaacgtcgccgcgtttcccgtcctgatcgcaggcgaggccgccgccaagcagctcgcgcagctcgccgggacggacggcagcaccttgcgcgtgtccgaggctttccgacaggtcgaaaaggccccggccagcccacagaagccggtcagcaccaaaaaggaaggggtagggcaggggcaggcgaacaatgcgcctcagcgggccgcacagggccacagaaggccgtcccgaggtggcggcataggtatcgactga

SEQ ID NO: 18004 - DNA, 450 bp, Escherichia coli
gtgagcaaacaacattggaaacagcttaacaacatcagatattcgctctaccggatggaacgaccatcactatcgccccgcttttcagccgctttgctcgcagccatcgcaacggcgctcgttgcgggcatggtgctgttgtggggagcttataccgcgtgcctgatcggggcaggcgtgggtatcgcggtctaccagttcgcgccgctatcgaagtcgtgggctgagacactggataaccaattgacggcctatgatccggtagacgtgcaggcctatgcagaactgcaaaacgtgacccgttcacttggcaggctcgatcttggcgaggtattccgatggttggacagagaacgccaagcccttagttacagtcggccagcggcatcacaaggcccacaatgtaaattcatcaacaggcaagtccgccaaaagcgtgacggtgattag

SEQ ID NO: 18005 - DNA, 318 bp, Escherichia coli
atgaataaggacaggaagctgctcttggcagcatcgggggtggccgccgctgggtggctctgtgttgccgtcttggtggccgaaataggctcgtccgaaaagcgcacacaagacgccttaaaggtggcggacggttggaaaaaacaggcaggcagggcctacaccgagctgctaaaagcacgcgctggcaccgacagcacggccgcgctcattcctgcgggtgctcgcatcgactgcaccatgcaaatgacgacggtggacggccgggcaatcgccaagtgcgaggacggcactatttacccgcctcgggactattaa

SEQ ID NO: 18006 - DNA, 726 bp, Escherichia coli
gtgaaagctcttaaatccacggccagcccgacgattcaggcctatggcgagctacaggcagcgtttgagcactacaacgccgctctgttcgatggccagctcccgcactgtctcatcacgatgcagcgcgaaaagcgcacctatggctatttctcgtcgcgccggttcgccaaccggcacgaaaagaccatgacagacgaaatcgccatgaatccatcctattttggtgtcgtgccgctgctcgaaatattgcaaactctggttcacgaaatggcgcacgcttggcagttccatttcggcgaaccgggccgacgcggctaccacaacaaagagtgggccgacaaaatggaagccatcggcctgatgccttccgataccggcaagcccggcggaaagaaaacgggcgagaagatggccgactatgcgattgacggcggccccttcatgcaagccactgaggcgctgctaaagaccgacttccgcattacatggttcgacaggcacccgcctgcaggaaccgaaatcgcggcgatcttcggtgacgccgacgacggcgacgacaacgacggcggcctgatccagcctgccccggccgggaacaaatcgaaccgggataagtaccgctgcccctgctgcggtgcgcaggcgtggggaaagccgggcctcaagctgctgtgtggcaatgacgattgcaacgccgcgccgttcgagttggccatcaactga

SEQ ID NO: 18007 - DNA, 231 bp, Escherichia coli
atgagcggtatttcaatcaacacccggcagatcgccgacctgctgaacatcagcgaaggcgagttagtccatgcgatgcggtcaagcgggaagctgcacggcgtgccgttccccgacctgctcggcaaccataaggccaaggtgcgcaagttcaatctcacggccgctttgcggttcgtggatcaggtcaacaaagcccgctcggaagggggaaatagtgaaagctcttaa

SEQ ID NO: 18008 - DNA, 678 bp, Escherichia coli
atgaacggtgattggctgataccggcgctttgcctgatgggcagcgtggtcgggattgttttcttggtgtcaatgattaggcgggatggcacggcggggcgcagcttatatgtcttcatgggcttggcactcggccttgtcgcccttgtgtatatcgtcgctgactcccggcaaaagaccgctccggcggccgaagagcagcaagtcgcgcccggtacgcagtcgccggaactgatcggtaaggtcgtccgcgttctcgatggcgacacattcgagctgctggtagatcaacggcccgtccgcatccgcgtgaccggcattgatgccccggaaaaagatcagccatttggccagcggtcgcggcagtctttggcgggcatggttgatggcaaccctgtcgcggtgctcgtaaaaggcaaagaccgctacggccgcacactcggcacggtctacgccaagatatgcgccccttctgtcccgtgccacaccgttcatgtcaacgccgaacaggtaaaggcgggcatggcatgggcttaccgtttccacggtcaagccgtcgatccggcaatgctgaaactcgaaacgcaggcccgtagcgagcgcgtcggcctgtggtcagcaccgaacgcagtggagccgtggaagtggcggcaccaaatggagagcgcggccaaatga

SEQ ID NO: 18009 - DNA, 339 bp, Escherichia coli
atgaacgtagagaaacgccagcgcatcgagcgccgcatcgcacgcgaggccatcaaaggactactcgccgagggctacaagatttccgtctttgacggcgaggaaaccgtactgaccaagagcgtcgatccggccgccatcgaaaaggccatgttcagcacggacgaggatcagtttcacgtcgagcgcgacggcggcgagaagccggaaaccggctgggtgctgttcgtctacggcaacgacggttgggacgtgatcgccgacaacaccgtgaacctcgaaccggcgttgaagggcgcgaccgaactggccgacaagatcgccgaggaagaagcgtaa

SEQ ID NO: 18010 - DNA, 408 bp, Escherichia coli
atgagcgggcgcacgtcactaatcgttgttgttggggcaggtcttgcattcgccgcgctggcgttcggcgtcatgcggcgcagcgaggcaaccacggatttccggcaagctgctgtcgctgacctgcacgcggccgagaactacaacgggttcattcatcaggtggccgaacatgccccggagggcatgaaaaagaccgtggccaccgcgtgggcgaactgcgctcgcatcagcaccaaatgggtaggccgtctgcccgtgtcgtctggcccttcgcagcacgaactagacgtgtgcgaggcgtcggccgtgcagttggccaccagtcgcggccacgacgccgcagcatcgagccaatacgcccaacgactccgcgctgccagcgcggcggtgcgggctgctaactaa

SEQ ID NO: 18011 - DNA, 624 bp, Escherichia coli
atgcgtaatgcaaaagaaggcgtagcactggcggccatcgtggccaaagaaaccaccgaagggaagtggagcggaaccggcggaggccttggattcggcactggcggccttggtctgttcgttggcggcatgagcggcaccaagcgcgagcagtcgcagcgggccaaagagttcgaggccccgccaaaggcgtcgttcaactggctgtatgtgttcgcgccgctcatcctcttgctgggcatcgccgcaatgttcggtttcggatcgagcttcgtgcagttcatgtcagacggtcagccagcggcgaccggcagcctcggccgcgctcaggaaggtcttggccaaatggttagcatcttgggccggttcgtgccgttgctggccatcgtcggcgcggccttgtggttcatctttgggcgcagtaaccgcgaagacgaggaaaacgcccgattcaaggccgccgaagccgccgaccgcatcaaggaaggcatctactaccggctgcgttacgtcgaggccgaccacgttgtgttcgatccaaaaaccggccgggaagtaccggccgaacgcaatcacatcctttcgctgttgaacgaactggccagcagtgagcaggccgagtga

SEQ ID NO: 18012 - DNA, 615 bp, Escherichia coli
atgttgttacaccttgtaccccgcctgttcgcgtgccgtgtcaacgagccggaatgcgccctgatcgactttcattgtcccgcgctcgggctgaagctgcgcaacggtatcgagctggtcgcccggcgaccgtacccgaacaagcactatctggtggcttgccgcaaagttgggcaaaaggccatgaacggctttctggtcgagacgaccgagcgcgtgcgcgagttcacgacgctgacccgctgggctgtcggagctgatcgcatcgtcaaccatcaagtgcagtatttcgtgctcgatgacgagctggacgccatcaccgactgcatggtgctctggtctgcaatgtcgccgagtctcggcggtttttcccggcgctggcccaccgtggccaacgactggacaccggccgccgcacagccgcgcatggaactggtcagccgcgaccgcgctggccattacgccgaccgcctcgatgacgcaggccgcgtgatcgagcgggccgaagtgtttcagttgcataccgtcgagcgtgagcgcgttctgtatcgcagcaattcatccatttatgaccgcatcccgaccgccgatatggcgttccgggccaccatctaa

SEQ ID NO: 18013 - DNA, 630 bp, Escherichia coli
atgcgtgatcctaacgaccccggcacgatggatatagggataaccaccctaatcggttatgcccgtgtctcgaccgctgaccagtcgcttgatatgcagattgaggccttgaaaaaggccggttgccatcaggtattcaccgacgtggccagcggggccaaggcggcccgaccgggcctagaaaaagccctcgcatacctgcgcgaaggcgatacgcttgtagtgtggaagatcgaccggcttggccgttcgcttccccatttggtgcaaaccgtggacgagctgcgcgagcgcggcgtagcgttccgctcgctgactgacgcgggaattgacagcgcgacccgaaacggcaaactgctgtttaacctgttcgccacgctagccgagttcgagcgtgacctgatacgggaacgaaccaaggccgggttggccaccgcagcggcccgaggccgccacggcgggcgcaggccggtagtaacaccggccaagctggaaagagcgcgtaagctgatggccgacaaggggctgaccgtccgcgaggcggccgccgctgtcaaagtcggcaagactgccttgtatgaggctttgaaggacgccggcgacggcgaccgcacggagggcgacgaatag

SEQ ID NO: 18014 - DNA, 249 bp, Escherichia coli
atgaactacaccgccctttactcgaccatctaccgcgtgcggaaccttacccgcaccgtcgccaaaatcctcgcttgggcgctcggtctacagctcgccatcctctacggactggccaccgtcgccgacgcgccgctgatgcagcttgcaggccccggccttcgcttcgcggccgtgctggccgtggtgatcttcgccccgcgagtcttcgacgccgcgctacgccgcatcgccacccgccgggcctga

SEQ ID NO: 18015 - DNA, 471 bp, Escherichia coli
atggcaagcacccctaacagcctgaacccgaccgggccagcgccgaagatgatgccggaaggctctcgcaaggtctgcgtcctgaacggtagtcgccagctcgaccaggtggtgaaaggcgagtggatgactatcaaggttctgccggaaaacggactgcccaagggcatctaccaactggccgaagccaccaagccggacaccggcaaggatggcaaggaatccgcctacaccgggcaggttctgcatgtcgatagcaaggcggtctaccagctttccggcaagggcattgtcgagcattcgcgctcggcctttgccgatctggaagccaagggcgaccagatcgttgccggtcgcacctacacggtcggctatgtgaacgggaagggcaccgcccggcccggccaagccgccagtctggcgcaacagcagcagcgcagcgcctcgaagggcggcggcatttccctttaa

SEQ ID NO: 18016 - DNA, 1461 bp, Escherichia coli
atgagcacaaacgataaagacaacgaccagaacaccgacctgccgcttgaggatgcggaagtgcataacgaccgcgaacacgacgacgatgccgacatgcacgacgatcctgatatgcgtgcggacggcaacggctcgcccgactatctggcgacaccaaaaagagggaagggggttcgccgcctgaacaacaaaccgttgttcgtggtcggtggcgtgatcctgctcgctgtggctggcgttagctacacgtttttccagcggcaggcggcgcaggttgcccccaaggccgaaggcgacgggccaccagtggcgacggtagcggccccccctgttcggccggacggcaacgactacgtgcccccggcaggtcagccgcagatgcccacggacacggcgcagccggtcgaaaccggcggccagccgaccgaagcccagcagaaggcggccccggccgcgccctctgaggccatgcaacgccggttgcggcagattcagcaggccgaagacaagcgactggccaagtgggacgaagccctgaacggtgacgcttcggtgcagggcttcacgaccaagggcggccagaacggcggcacccagcaggtggccatgcagcaggcgggcgcgaaccgcgtcaatgcggacgagctgatgaaccgctacttggccgcgaacggtcaggccgcaggtatgggcggcatgggcggcggtatgccgggcatgggcggtggcggtatgggtggcaacagcatggcggccgaaaaccagcaggatcgcaagcaagcgttcctcgcaggtacgccagaagctgaggtttatctggctcgccagcgcaagggggccgtcgctccgtcgcaggaaatcaaagccggttgggttatccccggcgtgatgatttccggtatcaactccgatctgccgggccaaatcatcgggcaggtgcgcgaagcggtgtacgacagcgcgaccagcacgcaatgcctgatcccgccgggttcgcgtttggttggcacctacgacagcggcgtaacgctcggccagcagcgggcgctcgcggtctggcggcgcatcatctacccggatggttcttcgatctcgattgacaacatgccgggcgctgatgtgggcggctatgctgggttcaatgacaaggtgaacaaccactatgctcgaatcttcggcagtggcttgctgctttcggtcttctccgcaggcatccagctttcgcagccgcaggccagcaacggcgagaactacagcagctcgcaaatcatcgccgggtcgctgggtcagcagatggggcagattggtatgcagatggcccaacgcaacatgaacattcagccgacgctcgaaattcgtccgggctacgagttcaacatcatggtgacgaaggacattatcctgccgacgtgggaaggccacccgatggccggaagcaccggcaagggctgcaattga

SEQ ID NO: 18017 - DNA, 459 bp, Escherichia coli
atggcacgccttcacctgattgcgccgctcgcggcggcgcttctcctgagcgcctgcgcaacgtcgcggcctaccatgtcctacgtcgaaccgaccgtgacggccagcgatgcgcagacgctcgcaagcgatacggtcgcctatctggctgatccgcttcctcctgcgcgaaccaccattgtgctcgatcctcctgccgcgaaggatcacgacgcactgacggcggccatgctgcccgcgctccgtgcgcggggctacggcgtgacgttggttgatccgcagaccggcaaggccggtggtgcgggtgtgcctctgcgctacatcgcatcgccgctcgatagcggcgtgctgctgcgtctgcaatatcagggcatcgaggccagccggtactacccgcgcggctctaatggccagctcctgccgggtgccccgttcacggttcgagggggtgcgcaatga

SEQ ID NO: 18018 - DNA, 939 bp, Escherichia coli
atgatgactggtgaatatatgaaaaagactcaatggatggcgggccttttcgttgccgcaattgctgcccccacgttcgcgcaagacgttccggcgctcgctgctggccaaggtgaagttctgccgccggtcaatctggtgtcgcccgatcaggtgcggctcgatggtaaggaggcctacggcatccgcttggccaatcagtggaaatcacaccctgaccgcccgcgtcgtggcgcagacggtagcgtgaaatacctttttggtgccactctgccgacgttggtttgcacccccttgcaggtctgcaatatcgaactgcaaccgggcgaaatcgtgaatgacgttcacgcgggcgacaacgcacgttggaaaatcaccccggccacgatgggcagcggggcgaacgctacgacggtgattgtggtcaagcctaccgacgccggactggtcactaacctgagcgtggccaccgaccgccgcctgtactcgatcaagctggccagcacgcaacgcgagtggattccggtgctgtcgttcgactaccccgacgacgtagaacgccagtgggccgcgtaccgcgagcagcacgccaaacaggtctacaacaacaccatgccgaccgggcagaatctggccaacctcgatttcggtttccgcattggcggtgatagcccgagctggaagccggtgcgtgtctacacggatggcaccaagacctacattcagttcccgtcggccagcttcggcggcgaggccccggcactggtggccaagggcaacgacggcggcctgttctcgaaggctaccgagaagctcgtcaattaccgcccgatcggcgatcgctacgtggtcgataaggtgctggatcgggcgtctctgattgtcggcgtcggccgcaaccaaaccgaagtcaccattacgcgcacggggggcaaataa

SEQ ID NO: 18019 - DNA, 699 bp, Escherichia coli
atgcaacccaatagcaagaaaaagggtcagcgggcaccgaaagccccgcccggcacgccttacctcgcagcccgccgcgagtggaacgagcgttatggcagtcatatcatcgacgcccgcaactggcggacggccgcgtttgtcgttggtgtcgcgctgattctctcggcggccgggaacgtcattcaggcctccaaagagaaaatcgcggtctactacgtcaacaccgacgccaacggcaaaagccgcgaaatctggcgggccgatcaggccacgccggggccgaagaccgaacaaatccgcgctgcgctgcaagattgggttcttggtgctcgcacggtgtacgcggacaaccgggctaccaagcgcgtcgtcgatgcgacctatgcgatgacgctgcccgacagcgccgcttatcagacgctggccacgtatcaccgggaacacaacccgtatcagcgggccgccaatgaaaccgtcgaggtggccatgcaaacgcctgtccagctctcgaaagacacttggcaagtcgagtggacggaaacggtgaaaaaccgcacttccggcaagctgatcggcacccaaagctatcagctcacggccaacgtcctgatcgctgcgccgaaggatgaagcccagcttatggccaacccggttggcctctacgtccgccaattctcttggcccgttcgcaactaa

SEQ ID NO: 18020 - DNA, 306 bp, Escherichia coli
atgatcgccgaactcgccttgttcttcctgcccttgctggccatgtttttgataggccttggactatgggcgttagggcagtggttgcgccgtagaggctacagtgaccagctcgacaaaatcgacgcgaaagtgtccaccgcccagcaaaaaacgcgctggctgttccgccctctgagcggcgcaatggtcagtgtagggcgcggactgagcagggttcccctgttcggcaaccgtcgcagccgcgacatgtgggacgacctcgaagaactgtcgaagcatcaacgcaacaatcgccgggactaa

SEQ ID NO: 18021 - DNA, 1719 bp, Escherichia coli
atggcacggcgcgagcaacatcagttcttgttgtgggtcgtgctgctgctgctcgcgtcgttcgcctttgcgagtaatgcgtcagcggcagacctgcacgaccccagcggctcatttaccggccttctcgatctggtgaaaaacagtgcggcgcagtgggatggcaagctgcgaggctatgccaaaacgctgttctggctgctggcatccatccagttcgtatggacgttcatgcctttggtgttccgacaggccgatttcggcgagattgtcggcgagctgatccgtttcattttggtgattggcttcttctacgcgctgctgctgttctcggcagattgggccgacaaggtggtggacagcttccgaacggcgggcgcgtcggcggccgggctgggtacgtcccaaatccggccgggcgacattttcggtacgtctatcgagctggccaacactatcggcgacgtggaaacgtggaacccgctaacggccactatggtcgcgctggccgggcttctggtgctgctgtgcttcgccttcattgcggcgttcatgggcctgaccatcatcgaatcctatgtggtcatcaatgcgtcggtgctgtttatgggcttcggtgcctcgcagtggacacgcgaatatgcgttggccatcgtgcgttacgccgtttccgttggtgccaagctgttcgtcctgaccttgatcgtcggcttgattgtggactcggcaaagacgtggcaggcggcctacaaccacgacgacgcgagcatgtggacgatggtggggctggctctggtctgcgcctatctggccaagactatccccgagctggtcgcgggcatgattagtggcacctcgatgggcggcggttcggccatcggtggcatggcagcggccggtgcagccggtgcagcggctgctattgcaaccatcgccacggccggggcggccgctccggcggcggccggtgctcttggcgcggccggtagtggtggtgcagccggtgcaggtgcagcgggtgccggtggcattggtggcggcggtctggctgctgcgatcaattccagctttgccggtggcagtgcgcccgcagcggccgcaactggcggcagcggggcagcttccggcctcggtgcaagcactggcggccaagcggcggccaagggcgcgtcatcggcaggtgcccgagtgggcggcagcgccgcgccacaatcgccggggccagcgccgcagcagccgagcagcggtgtgcagcaggccgccaagcaggccgggaaggccgcgcagggtggtgacgacgacaagggccagcaaacggcggcaggggcgcaaacgcctccggccggtaatgcggacgcctcggcgtccagctcggcccctagcgcctctgcgcagtcgccagcggcccaagctggcgaagggcagggcgaagccaagagcggcgtttctggccatcaaatcgcgtcgggcattacccgtggtgcgggcatcctctccgcgattgccgttcccggcatggaaggcgcggcaggcctgtcgctgggtgccggtgcgccgcagccggtgcccggctccggtgctgacgctgatggctcgatggctcccagctcggccccgtccagcgcagaaccgcagaacgtcattcgcccggcagaaccgtcgccagcatcgccaagcgatgcaggcccggccaagccagacaccaaagggggggagtaa

SEQ ID NO: 18022 - DNA, 204 bp, Escherichia coli
atgctcaatctcaaactgtcggtgttcgtagcctccctgatcgccgccgcagtcgtcggcggcgtcggttcgagcatcgttctcaacgtgttttcccctgaaccgaagccggtcgcttgcgaaccggcaccggctccggctccgggcaaaaacaccctacgccatgttgatccggtcaacactggccgcgataaggggtactga

SEQ ID NO: 18023 - DNA, 789 bp, Escherichia coli
atgaacagtatctttcgcgcaaagctgcgtaatggcgttctttcggcggccgtgacggccagcgttgcccttggtgccgggttctttgcagctccgacaccggcttacgctatctactgctccaactgctcgacgttctatcagcagatgttcgagtacgccgaagcggtgaataccaccctgaacactgcgcaacagctacagacgcagattcagcagtatcaaaacatggttacgcagggcttgagcctgcccaattccatgttcggcagcatcgcggccgacctgcaaagcgttgccagcatctacacgaagtcgcaggccttgggccgccaaatccagaacatggattcgcagttcaacatgcagtttcccggctttcagtcgtacctgaattcggccgcggcctcggccaaggctccggcatcgagcacgatgccagaccgttacgaaaagtggtcggaacagggccgcgacaacgtgaaagcggcgatggaggcggcgaacctcaataccagcactttcgagtctgaggacgcccagctttcccggatggtggcacgctcgcagtcggccgctggccggatgcaggcgattcaggcgggcaatgaaattgcctcgcagaacgtgcagcaactgcaaaagctgcgcgacctgatcgccacgcaaatcaacatgcagggcaactacatggcgcaagaacaggatcgcatccagctcgatgacgctctgcgtcagcagcgccgtagcggcaccatcacacaaaccggcagcaacaaggggtattaa

SEQ ID NO: 18024 - DNA, 2508 bp, Escherichia coli
atgcttgcgttagcacccttccgtagcaaggccgctggcttgcccgatctgctcaactatgccgccctcgttgatgagggcgttgtattgggcaaagacggctcgctgatggctggtttcttcttccgtggtgacgacgcagcatccgccaccacgtcagaacgcaactacctgaccgcgttggtcaaccagtacctggcccggttcggttcgggctgggctgtatggactgacgcttcgcgcttggcctcgccgggctatccagcccctgagcagtcgcactttcctgaaccgattaccgccttgattgacgcagagcgtcgggcggccttcgtcaaggaaaatacgctgtttgaaagcgagtacgcgctagtcctgcaatacctgccgccgacgcggcgggattccaagctgggcgaactggtctacgacgatgacggcgtagacgacagcaacccggccgaccggctgttgctggacttcaagaaaaagctcgatgacctgcaagacggcctcggcgatctgatgcacatgcgccgcatgggcaccatcacggtcggcgagggcgacgatgcctaccagagcgatgagctgtgcaattacctgcactacgtgctgaccaatgagcctatcgcgctgcgcatccctgattgcccgatgtatctggatgcgtggctgggctatcccgagctgtggccgggcgacacgccgaagctgggcaacaagttcatttcgtgcgtggctatcgaaggcttccccggcaactccttccccggcatcctcgacatgctcgacggcctgccaatgtcctatcggtggtcgtcgcggttcatcttccttgaacagcacgaagccgtcgccgcgctcaaccgctaccgcttgaagtggcaacagaagattcgcggattctggtcgcaagtcttcaagtcgcagaagggcatgattaacaccgacgccctgaaaatggcgcaggaaacggaggtggccatcaacgacgccaagtcgggattggtcgcttacggctactacacgccggtcgtggtgctgatgcacgaagaccgcaatttcctgtccgaacaggcccgctacgtcaagcgcgagcttgaacgcaagggcttcgcggcccgtatcgagacggtcaacgcgctggaagcgtggcttggctcgctgcccggccagacctacccgaacgtgcgccgtcctttggtgcataccctcaacctcgccgatctgctgccgctggccagcgtctggcccggcctgcgcgaaaacccgtgcgatctgtacccggccgggtcgccgccgctcatgcacacggtaacgaccggcgcaacgccgtttcgtctcaacctgcacgtcggcgacgttggccataccctgattttcggcccgaccggggccggtaaatcgaccttgctggccaccctgcaagcgcagttccggcgctatcgcagccgtcgccgccgcgatggcagcacggcaccggcaaccgtgacggcgttcgacaaggggcgttcgctgtatgcgctgtgcaaggcgactggcggcgttcactacgacattggcaacgatgaggccgacaccccggcgctgacgccgttggtggacattgatagcgagtcagaagccctgtgggccgaagaatggattgcgacttgctacgagttgcaggccaaaaagccgcctacgccgcagcaaaaggccgagattcaccgggccatgaacctgctgcgcgaggcaccccgcgagttccgttcgctcaccgattacgtcacgacggtacaggatgccgaagtgcgggacgcgctgacgcactacaccatttccgggtcgatgggccacctgctcgacggcaaggaagacggtctgaaattcagcaattacacggtgttcgagattgacgacctcatgaaaatgggcgacgcgaacgccattccggtgctgctctacctgttccgccggttcgagcgttccttgaatggccagcccgccatgctgtcgcttgatgaggcgtgggtgatgctgggccatccggtgttccgcgagaagctgcgcgaatggctcaaagagctgcgtaagaaaaactgcctcgtcatcatggctacgcaaagcctctcggatgcggtcaagtccgggctgctcgatgtgctgctggaacagtgcccgacgaagatccttttgccgaacaaggaagccgaccttcatggcaccaaagagacacccggcccggccgacctctacgccatgttcggcctgaacagcaaggaaatcggcatcctgaaaaatgggcagtacaagcggcagtattactacaagtcgccgctcggccgtcgcgtgttcgagctgggcttggggcctcttaccaaggcctttgtagcggtatccgacaaggaagacttggcggaggtgcggaacctgatcgccgatcatggcgatgactggccgcttttttggttgcaacacaaaggagttgattatgaacagtatctttcgcgcaaagctgcgtaa

SEQ ID NO: 18025 - DNA, 315 bp, Escherichia coli
atggaagtaatggaatcgcgtcgtttgacgccattccaccgggcgctccatcgcccgcagcaaatcatggggggcgaacgcgaattgatgctgttctccatgcttgttgcgggcggcctgaccgtttcggccctgaactttgtggccacggtcatcggtgtagcgatctggttggtatgcgtctacgccctgcgcaagatggcgaaggctgatccgaacatgtcgaaggtctacattcgccagctcaagtatgggcactattacgggccgttctcgcggccctatcgggtggccaagtcgccacgtatttactga

SEQ ID NO: 18026 - DNA, 441 bp, Escherichia coli
gtgccgtccaaagcgcgtgcggtgctgaccaatccctacttctggctgatggccgctctgttcttggtgcttctctttggtgccatcgaaccggcgcacgcggctgacgcaaccgaaggcggcggcgcaggcctgccgtgggaaggcccgcttaccaagctcaagcagtcaatcagcgggccggtggccttcgtgatcgcgctgctcggcatcatcgcgtgcggcgctacgctgatctggggcggtgaagtctccgagttcacccgccgcatcatctacgtcgttctggtggtctgcatcatcgtcttcgctaacacgctgctgactggtgcgctgttctctggcgctgtggtgccgcacgacgctgcaatttctgccgctgatgtggccgcctacgcgaaggctcacgccgcagccctgaccggggtagggggtcgctga

SEQ ID NO: 18027 - DNA, 165 bp, Escherichia coli
atgtctgacattgtcagggacctttcgcgtctgggctggacagatgagcgtattggcacagagttgggcatggatcaggatgaagtgctgaggctcaaacagattagcgggctgacagagctgtttcaggaagagaatttcagcccggcatggacggttcgttga

SEQ ID NO: 18028 - DNA, 873 bp, Escherichia coli
atgaatccgtctgatgccattgaggcaattgaaaaaccgctctcctccctgccttactcactttcccgtcacatcctggaacatctgcgcaaactcaccagtcacgaacccgtgcctggcattatgggtaaaagcggggccggtaaatcctcactctgtaatgcgctgtttcagggggaggtcaccccggtcagtgatgttcacgccggcccccgggaagtgcagcgcttccgtctgaatggccatggtcacagcatggttatcactgacctgcccggggtgggcgagagccgggacagggatgcagagtatgaagccctgtaccgtgacattctgctcgaactggacctggtactgtggctgattaaagccgatgaccgtgccctgtctgtggatgagtatttctggcgacacatcctgcaccggggacatcagcgggtactgtttgtggtgatgcaggccgataaaacggagccctgccatgaatgggatatggccggtattcagccttctcccgcacaggcacagaacattcgcgaaaaaacggaggcggtattccgtctgttccggcccgtacatcgggttgttgccgtatcggcccgcaccggctgggaactggatacgctggtcagtgcgctcatgacagcacttcccgaccatgccgccagtcccctgatgacccgcctgcaggacgagctgcgcacggagtctgtccggtctcaggcccgtgaacagtttaccggtgcggtggaccggatatttgacacggcggagagcgtctgcattgcctctgttgcacgcacggttctgcgcgccgtccgtgactcggtggtctctgttgcccgcgcggtatggaactggattttcttctga

SEQ ID NO: 18029 - DNA, 384 bp, Escherichia coli
atgcgcgctaaagaaagacttccccggaaacactattcccctgaattcaaaatggaactggtcaggctggctcttgaagaagaaggcagtattgccgcactggcccggaaacatgacgtcaatgataacctgctctttaaatggataaggctctggcagcgtgaagggcgggtctgtcggccccgaaaaaactcatcgtcgcttcctgccctgatacccgtgcagcttcaggcgggctcttctctcccaaccttcgaactaccatcctgctctcctcccgctacctgccacataaaatgtcggggaggagaaataacactgactcatccctctgctgaactcatgagcactgtcctgcgcgaactgatgcgggggcctgtatga

SEQ ID NO: 18030 - DNA, 1473 bp, Escherichia coli
ttgatccacgccctgcaggaaaagctgagcaaccgggaacgcgaaatagaccatctgcaggcgcaactggataagctgcgccggatgaacttcggcagtcgttccgaaaaggtatcccgccgtatcgcgcaaatggaagctgacctgaacctgctgcagcaggaaagcgatacgctgaccggccgggtggatgacccggcagtgcagcgcccgctgcgtcagacccgcacccgcaaaccgttccctgagtcactcccacgggatgagaagcggctgctgccgactgagccgtgttgcccggagtgcggtggttcgctgagttacctgggtgaggatgccgccgaacagctggagctgatgcgcagcgccttccgggttatccggacagtccgtgaaaagcatgcctgccgtcggtgcgatcgcatcgttcaggccccggctccttcgcgccccatcgaacgggggatcgccggaccggggctgctggcccgagtgctgacctcaaagtatgcagagcacataccgctgtatcgccagtcggagatctatgcccgccagggtgtagtgttgagtcgttctgtactgtcgggctgggtggatgcgtgttgtcgtctgctggcaccgctggatgaagcccttcagcactatgtcctgaccgacggcaaactccatgctgacgatatgcctgtcccggtgctgttgccgggcaataagaagacgaagaccgggcgcttatggacgtacgttcgagacgaccgcaacgccggatcagcgctggcccccgcagtgtggttcgcttacagcccggacagaaaaggtatccaccctcagacccatcttgcaggcttcagtggcgtactgcaggctgatgcctacgccgggttcaacgagctctaccgcgacggccatataaaggaagccgcgtgctgggcccatgcccgccgaaaaatccacgatgttcacgtccgtaccccgtcagccctgacggaggaggcgctgaaacggatcggcgagctgtatgccatcgagtcggagctcagaggtaaaagagcagaggaacggcaggcagtccggcaccaaaaagtgctgccgctgctggcgtcactggaggggtggctgcgggagaaacagaaaaccctctcaaggcactcagaactggcgaaggcgttcgggtatgcgctgaaccagtggccggcgctgacccgctatgcagaagatggctgggtggaggtggataataacattgccgaaaacgccctacgactggtcagtctggggagaaaaaactggctgttcttcggctcggatcatggtggtgagcgcggtgcgtcactgtacagtcttatcgggacgtgcaaattaaacggcgtggatccggaacgctatctgcatcatgtacttgatgtcatcgccgactggcctgtgaaccgggtgggtgctctgctcccgtggcgggttactctgcccgcctga

SEQ ID NO: 18031 - DNA, 570 bp, Escherichia coli
atgacctacaaatacaaccccttctggcagcaacgtattcgtgagacggtgcggcacgcactgaatgttcatccccgcctgacggcattgcgggttgacctgcgtttcccggatgtaccggcagcaacggacgcagctgtgatatcccgcttcatcaatgccctgaaagcccgaatcgacgcttaccagaaacgtaagcatcgggaaggtaaacgcgtgcatcccacaaccctgcattacgtctgggcccgggagtttggggagtgcaaaggtaaaaaacactatcacctgatgctgctggttaaccgggatacctggtgtcgtgccggtgattaccgtgctccgggatcactggccgggatgattaaacaggcgtggtgcagtgccctgggagtggatgtcgggtgccatgccacgctggtgcatttcccggcctggccggcggtgtggctggaacgcgatgatgacactggctttcagcaggtgctggaacgtgctgactatctggcgaaggaacataccaaagctcactgcaccggtgagcgcaattttggctgtagccggagttga

SEQ ID NO: 18032 - DNA, 456 bp, Escherichia coli
atgtcatatcatatgcacatactattagataatgaatacaacccggatatggatatttattcctttaaggaaatactggtaaaggaatatttaaaaacatggttaggtgagcgaccttctatggaatactctcgtgttccctttggtcctcgtagcaattatgattctctgatattgagatggtcagatacatggtggataaatatttattttgaaactattgatactaatgaaaatatcaaacaagatattgaacatattgcccacaaatgtgtgaatcatgaaagagcgatcgctatcagtaaaatgacacgaagaatagtttttttaacaaaggctgacccggcacctgaatatgcacatacggattacattatcgaattaatgactttttttgaaaatatacccggtactgtcatattcgatccgcaaaatgacaaaataatctatgcctaa

SEQ ID NO: 18033 - DNA, 567 bp, Escherichia coli
atgaaaaaatattggtttttttggctggtaatgttcattggttttcgtgccatagctgattgtgaaatacaaactaaaaattatgattgcttcaccgttttcactaagggcgttgttttttccgcattcccagttttaaaaaacaaaccaatatgggagtggtatcagagtgaggacattggtgaatattattggcaaacagaattaggtacgtgtgaaaataataattttacttctaataattcgaggctcttaattcgtgttggaacagttcgactaaatgaaacgcctcccgctaaaggaacctttcagaaattgctaaatgtagcagaaaaaactgcatttcttggtgatcgatttaggagtcccataagagctgagatctatcaaaaaaagagtagtgacccacagcagttgttggtaatccttgataatccaattatggtaaattatttcaaagatgataaaccaacttatgctcgcatgatagcacaccttccgaataaaaatgagtcttacgaatgcataacggaaatacatcatgaattgctacgtagtgagaaataa

SEQ ID NO: 18034 - DNA, 588 bp, Escherichia coli
atggcatttgagaaacccaaaaagcagaatatgcccacgctacgacccgaagaattacctaagctgatgcgttctctggtaatgtcgaatctgtctgttccgactcgctgtcttatcgagtggcagctcctgaccctagtgcgcccttctgaggcttctggtgctcggtgggtcgagatcgatctcgaggccaaactctggacgattcccgccgaacgaatgaaggctaaacgtgaacacattgtccctttgtcacctcaggctttaggtattttggaagtaatgaagcctatcagtggtcaccgtgaacatattttcccgagcagaaacgatccaaaacagccgatgaacagtcagacggcaaacgctgccttgaagagaataggttatggcggtaagttagtggcccatggactaagatcaattgccagtacggcaatgaacgaagcagaatttaatcctgatgttattgaagcagcattggcgcattccgagaggaatgaggttcgaaaagcttacaatagaagtacctatttagaacaacgtatagagttaatgaattggtggggattgcaaaccactctttaa

SEQ ID NO: 18035 - DNA, 2727 bp, Escherichia coli
atgtctgaatatcttgatacgaaaactagtatgatagtttatgccttagaaaaagcattggcggcgtatgttgttagtgaggatgcaggaggtaaaagtaggttaagcgaacatttcgaacctcgttctaaactagaactggagcgtgggagaggtcccgttttcaatacgcaaactcttatccaagcaagttatatcggtgaaattttcaattatgccctgcaattagctaagggtacatctgactatgataaactgtcagaactgaaagagttctgtacagctgttgatttattttttataagaaatcaaattagtcatccaacccgaccattccatgagcattactggcattgcgctgcagctatagcctcacatccatatatagaagtacttggtttaaaaagtgtgaaggatgcttattattccgcatctactggtcaattaaaagcacctccagaagaatggttttctactattagctgggaaattaataacaacctgcctgataaatttgatcacgacattaccagccttataggccgtaaaggtgaaaagaaagagttattatcagcaataaataacgatcgaactccattcattgcggttgtagctcctggaggcgtaggaaaaaccgctttaattttagatttcttaaaagaattgagcatctcaccaaaagccaatgagaaattcaaaaacatttgctatttaacattaaagaaacatcatctcactgctgatggtatttctgagttaaaaaacattgacaccatttctgaaataaaaaaagaaatagtgggtttttttaatcctgatgaagagatagaaaactatgatgatctatattcagaaattataaacgaccaagatatagaaagcactctcctatgtatcgataatctcgaaactttattaagagatggtcctgatgagttcattcgtttccagtatactcttccttcgaattttaaagtggtagtcactagtcgaataatggttgacggagcttacccaatttcacttaaggaattgcaatctggtgtggctttccatctagccaaatcatattcagataaacgagggataataaacttaaccccagaagaactcacgagaattactgaagtgactcattttaaccccttagcaataaggcttacaatagattccatttataatggaatggctttacctgactcaatagaaaaatccaaaaaagatatcgctgcattttcatttaataatctattagatgttttaagtaacgatgcaatatctattcttgaatgcttgtttgtcaccggagcatcatcaagatcatttttaactcatttcttagattcagatcccgactcaatagcaaaagcgattaaagaaatattgaacacatctttagtatcccggaaaacatctaatacgggagaagaagagttttctttaagtgaatcaatcaaagaactattaatcacatcaccaagaaataacaccgtcagaaatattattgctgaaaaagcaagaaaacaacgaactgaaatattgcacttacaaaaattccaacaagataaagaaatagatcggtttgattatcgattcatccctaataatagccctgactccttgcaaatagctgttaacagagcaaataaaattttaggctacaaaagcgttaacaaagataaattaaatgttatttatgaggattttaaaacactcgctcaaatatatcaaaaaaatcctctatttatgcgaacatatgccagaatactacataagcagggtgataatttaggtgctatttcttgtataaagtcagcaatagacatagagtctgaaaatccactaaacaacttaactctgatgtatatctataaagatattggtgattttatagaggctcaaaaagtatctcaggaattgattgattctggattcgacagagttgagcattcaggcgaagtactgtcttctataataatgcgagagtatttaggtgttcatctttatggtaaagaatacccagacattcttgaatacactgaaaaatggaaagattcacattcacctcaagagcaagcttactttagagtcgccgcattaaagcgttcttgtgaaaataacttcgacattaaccctgagtctgtagaaaaaaacatatctgaagttatcgacatattggaatttatatttgaaaaagaaaacatcagcgatcgactttctgacgaagctattaaatctttaaatcttttttgtgacacgatcaaaaacaacattgataaactatctcaacaattcattataaaagtaattgattttgctgaaagcaatcttgccgacattacaaagttctctaaagattttaagatatcaagtaaagaagtagttaatatcatttcaacaatgagagcaacaaaaataccaaacaacccattcacctcccccaaatggagtgcttttagctcatctaaaacaattgccgaattcgaacaaatcacatggaaaaataatggatattctatagcagaaatatattcagatcttacattaggaaaaggatttgtttttgccagagactctgatggaaaagaaatattaattcatagggacagttgccttggtgaagaaaaatataactggtctaattacattagaggaaaaacacttgctatcaagtttgttaggacaaaaaaaggtcactctgcaactgagtcacacctaatcaactaa

SEQ ID NO: 18036 - DNA, 477 bp, Escherichia coli; identical to SEQ ID NO: 5326

SEQ ID NO: 18037 - DNA, 477 bp, Escherichia coli; identical to SEQ ID NO: 5326

SEQ ID NO: 18038 - DNA, 141 bp, Escherichia coli
atgcaaaactgcctgatgcgctacgcttatcaggcctggaaagatgcacaatcgagtaggacggataaggcgtttacgccgcatccggcatggatgacatgtactttgttatcaatctggggccagcaaatgctggcctga

SEQ ID NO: 18039 - DNA, 330 bp, Escherichia coli
atgagcacaccagagaacgaagcgaccgaatccagcttgatcgaggtcaacgaccagagcagcgcgatagtagatttcgacgatatttacgagagtcctacgatctctcgtttgccgatgaaccagaggccaaaaccctcaacggtctgcgaacgctgtccggctgccgtatggttcgcgcttccgaaagaacttcggtgctattgccgggtgatacacgcggtgatctacagcaacgaggaaaagaacgcgctgacggcctgcgacggccgggacatggcgatagaacagctattggccaagcaggaagcagcggacgcagccgggtaa

SEQ ID NO: 18040 - DNA, 405 bp, Escherichia coli
gtgaaccttgttgatggccacatgcacatgcaggtgatcggtgtcgatatggacggccgacactcgttggtggtcgccgaagccgatggcttcgcaaagctcatcctcgatggcgtgcaacacttcaatgtcgggccgctcaccgggcgggaaggaatagacaaggtgataggtcttttccgtcttcgacctagtgttggccccctgcgtggccaagatcaggattgcagcatcggcggggtcgtccgtgccgcagttggtgacgcggtagctggcgaccttctcgcccttggtggtgtcgttcgcggtgtccagaatgtagtcggccgtgcgttcccagctcgtcgggtcgatgccgcccttagccgcaaccatgtacctgaccagcttggccgggttcgatga

SEQ ID NO: 18041 - DNA, 369 bp, Escherichia coli
atgacagatgaggcaccaaagaaaggcccacacggaggccgcccaagagggcaacacattaaggtttgggtgaacaacgacgaaaaggccgagctggccgaccgggccgctcaggccggtttatcgttgtccgcttatatgaaggttgccggacttaacgcgccaatccgggcacgctccgacttgtcggccgtgaccgaccttgtgcgcgtaaatggcgaccttggccgggtggccgggctgctgaaattgtggcttgcggagaagcgcgggcagggtgcccgcccggtggacgtggaagccatgatgaaggactttcgcgccctacaggaagaactccgctcgatcatgatccgggtggccagatga

SEQ ID NO: 18042 - DNA, 384 bp, Escherichia coli
atggcagacacgccaagcaaaaagccccgccggggcgcaggacgtgtcgcgtttctggcccgcttagagcagttccgggaactgctcgcagcgggtaacgaacagcgcacgatctatgacgactttggcggcgaggcggaattgggcatcagctactcccaattcaatcgctacgtcgtccggtacataacaggagcaaaagacgatgggcaccaaagaaaaggcaccgggcaaatcgccccgccaagcccctccccggcccctacaggagccgcaggaggccaagcaaggggtagcagcaccccggccgaaaaacccggccaaaagcgccccggattccagcacaacccaaacagcggcaacgaccgcgacgacctcatctga

SEQ ID NO: 18043 - DNA, 756 bp, Escherichia coli
atgaacgacgtaaccactccggccctgaacaccctcgcccgtcaggttcatttcacgctgcaaggcaagggcggcgtcggcaagtcctttatctcgtccctgctcgtccagtacatcgacggcaagggcctgccggtcacagcagtggacaccgatccggtcaatgccaccctcgccggttacaaggcattcaacacccagcgccttgagctgatggaaaacggctcgctgatcgagcgtaatttcgaccgcctgattgagcaggttgttgaggaagacaccaatttcgtgatcgacaacggcgcggcgtcgttcatcccgctgtcctactacatcgccgaaaacgacgccatcaacctgatcggcgagaacggcaagaaggtcatcattcacacagtcatcaccggcggccaagccctgcgcgatactcttggcggcttcgcctctctggccgagcagatgccgggcaatgccgagctggtcgtctggctcaatgagtttttcggcgacattgaggccgagggtaagaccttcgaggaaatgaaggtctaccagaacaacaaggatcgcgtgcgcggcatcgtgcgtatcgctcgccagaccggcagcacgttcggcgaggacgtgaaactgatgctcgatagcaagatgactttcgatgaaatcaaacagtcaccagacttcggcctcatgtccaagtcgcgtctctcgaaggtcaaaacagcgatcttcgagcagttggccaccatcatctaa

SEQ ID NO: 18044 - DNA, 456 bp, Escherichia coli
atgatcgactttgacgagatacggaaacaggtggcgatcaagcacaacgtgctgatcggcaaggacgatccgatactggtcacggtcacggtcagcgaaatggtcttgggccgctacctcgaactggtttccgaccagtacgacgaagccaacagggccttgaccgtgagcctgcaacagcaggtcgaacagtccaaggaaacggccgggaaggtaatcaccgacgcggccaactacgtcagcgagcaggtgcggcaggccgtgactgccgcccttgccgacgctggcaacgacgtgcggcggcagatagccaacgcgcaggccgcaagccgcgatgcggtggccagtggtcgggatgcgcaggcagcgaagaccggcgcatacctggctgcggccttggccggggtcgccgctctggtggccgtggcggccttggtggtcgttcttttgaaatga

SEQ ID NO: 18045 - DNA, 369 bp, Escherichia coli
atgggcgtagccattgaacaattaagcccgtgggtgctgggcacctacctcacatgcctgtttgtcgtttttgggtggatcgcatggtgtgctttccgcgacgatgagctgccaattttccccggccttctggcggtgatgctgttgggcggcggctatgccacagtctacaaaccccagcccgacgagtgggaaacattcaaggccgcgcataactgcaaggtggtggccaagcgtgacggtcatagcaacgacgggatcggcgtcaccactcgcggcaccgtgggctacatcatcggcgacgatacgcccgatcaggttgcctaccagtgcgatgacggcgtgacttactggaaaaacgcgaggtag

SEQ ID NO: 18046 - DNA, 291 bp, Escherichia coli
atgaacaaacaaacagccatcgagctgctgcaagagcaggtaagagactacgccagacaacgggccaaggacgtggcgcgaggcgcagaaacgccacgtctggcggccttgcttgtgcagaaatacggcaagggcgtggtcgatgctctggccgtggtctttgacagtcctcgggcggccgatccggtcatgaccgtggtggacgaggaagtaagccggattgatccgctatggcgggaacacgaccgggaacgctgggacggtcgcccggctgatgtggttgccaactaa

SEQ ID NO: 18047 - DNA, 312 bp, Escherichia coli
atgaaagatcgagcacacgacacggctatggccgaagtgttccgcaacgaccccgcctacgcggtcgagctgctgaacagcatccttgaggatggcgagcaaggcgaactcttgattgccctgcgccagatggccgaggccttcggaggcgtgcggcaggtggccaagtcggccgagctgaaccctaatcagctttaccgcacgctgtcacagacgggcaacccggaggtgcgcagtctgaccgcgatccttcgcgctatgggcctgcgactggccatccagccgctgcaccctactccggccgcccactga

SEQ ID NO: 18048 - DNA, 327 bp, Escherichia coli
atgcagcagatacggcactacctcgaccccaacggacgcgaccacttcgccgagtggcgcgatcaggtgcgcgataccaaagcgcgaatcgccatcgaccggcgcatcatgcgcttggaacttggcaacttcggcgatcacaagcccctgcgtgaaggcgtgtgggagctgcgtatcgacgtagggccgggctaccgcgtttattacgccaaggctggcttgaccgtcgtgctgctgctctgcggcggcgacaagcgcaagcagaacgccgacattgaccgggcctgcgcctattggcgtgactggcagcaacggacaggagattga

SEQ ID NO: 18049 - DNA, 444 bp, Escherichia coli
atgcagatacgtgaacagggccgcaaaattcagtgcatccgcaccgtgtacgacaaggccattggccggggtcggcagacggtcattgccacactggcccgctatacgaccgaaatgcccacgaccgggctggatgagctgacagaggccgaacgcgagacgctggccgaatggctggccaagcgccgagaagcctcgcagaagtcgcaggaggcctacacggccatgtctgcggatcggtggctggtcacgctggccaaggccatcagggaagggcaggaactgcgccccgaacaggcggccgcgatctggcacggcatgggggaggtcggcaaggccttgcgcaaggctggccacgcgaagcccaaggcggtcagaaagggcaagccagtcgatccggctgatcccaaggatcaaggggagggggcaccaaaggggaaatga

SEQ ID NO: 18050 - DNA, 1242 bp, Escherichia coli
atgaacgggcctaaaccaattagtgacattgtagggggcaatctgctggccagactggagcagacgcaccagaggtatcgtgaaaaagtggaggccgcagccctgcccggcgagacgttcgagcaagccgagaagcgcctacgtgaagaaggcgagcgcgaacagaggcggaaaagcaacgaggttgcccagctacaagccgaggcaactatggccgcacagttgcgcgatagaagccctatcccgcgaagcccaatccctaacacatcgtcccccagtggacagagcaaacggagcaatcaagcctcaatgcgtcgccctcccgagagcgaccgacagcccgactttttcgtgccgggtctgtacgacgtagccaccaaggacaaccgtagcctgatggacgttgcgctgttccgcctgtcaaagcgcgacaagcgagcaggcgaagtgatccgctacgacctgccggacggcttcgttgaagtgaaggccgggccggatggcatggcgtcgatatgggactacgacattgtgctgatgctcatctcacacctaaccgagtcgatgaatcttttcaatgccgggcgtggtgccatgccgggcaagaaattcgtcccgcacgcctcagatattgccaagttctgccgtcgtggcgacggcggccgtcaggccgacgagctggaagccgcgcttgaccgcctgctaggaacgaccatcaagagtgtgcgcgagacaccatcacgcaacggcaagcgcgttgtgcgtgagacggaagcggaaagcctcattggcccctaccgcgtcgtgtcccgcaccgataccggcaaggtggccagcattgagattgaggcaccaaactggatttaccgggaagtgaccggcggcagacagccggacgtgctgacagttcacccggactacttcctgatcgaaccgggccttggccgtttcgtgtaccgcctcgctcgccgggctgctggaaagagcacggccaagtgggcattcaagaccatctacgagcgcagcggtagcaccggcacattcaaagagttctgccgcatgatgcgccgcatgatcgacgccaacgacctgcccgagtacgacttgcgcgaggaagacggtcagagcggcccgctgctacttatcacgcgccgcaccgacgcgatggagctggccgccaaggacgaacccgaagcagacggcgacgagcaggagaacggcgagaatgcggccggtgtgtaa

SEQ ID NO: 18051 - DNA, 261 bp, Escherichia coli
atgcctagccgacgcgacaccgatagcaacgaaaacgaaaagccggtgccagcggagcggctgatctttgcccgcaatttccgtaaggcacgcaaggccgcaaaactaagccagcgcgcagtcaaggataagacggggttcgcacagtcatggatcagcgaggtagaaacgggaaagtcaccgctcaacatcgacaacatggccgaactggccaagtgtgtcggtgtgccgctgtggcagcttctcgttcctccgtcgtaa

SEQ ID NO: 18052 - DNA, 984 bp, Escherichia coli
atggacgaaattacatccgatccgaagtctcccagcatcgcatcaaatcgtgcagaacacgataagcgcataacggaaaaattgcggcgcgaactcgggccgcaaatatgcgagctgctggaagactcgacagtgatcgaaatcatgctcaaccccgacggtacgttgtgggttgaacggctcggggcaccaatggaaaagattggtacgctcccggcctctcgggccgaatcgctcatgggtacggtggcctcgacgctgcgcacccaaatcacggccctgaatccgattctcgaatgcgaactgccgttggatggttcgcgctttgaggcgttgattcctccggttgtggccgggcctaccttcacgatccgtaagaaggcgtcgaagattttcacgctcgataactacgtggagtcgggcatcatgacgcaggcgcagtgcgaggccatcgaggccgctgtacgcaaccgccgcaacgttctggtcgttggtggcaccggcaccggcaaaaccaccctcacaaacggcatcatcgactacatggcgaaggcctgcccgcaagaccgtatcgtcatcatcgaagatacgggcgagctgcaatgcgccgccacgaacgtcgtcattctccgggcagtcgatcacgtcgatatgacccggctactcaaggcaaccatgcgtctgcggcccgaccgtattctggtcggtgaagtccgcgacggcgcagcgttggccttgctcaaggcttggaacactggccaccccggcggggccgccactgttcacgcaaattcggcacctgcgggccttatccgcatggaacagcttgtggctgaggccacgcaggcgccgatgcacgcgctgatcgctgaggctgtggacttgatcgtctcgattgagaaaacagcaggcgggaggcggatcaaggaagtcgtcacggtcgaagggcacgacggcactcaatacctcactaaacccatatag

SEQ ID NO: 18053 - DNA, 1059 bp, Escherichia coli
atggatgacagcactctgaaagagttcatcaaacaatatatcgcagcgtctggcaatcaggtctattttacctggcaagggggtgaacccactctggctggcctggattttttccgtaaagttattcactatcaacaacgctatgcaggccaaaaacgtatttttaatgcattacaaacgaatggcattttattgaataatgaatggtgtgcctttctcaaagaacatgagtttctggttggtatctcgatcgatggcccccaggagctacatgaccgttacagacgcagtaattcaggcaacggtacttttgcaaaagtgatagcagccatcgagcgtctgaaatcatatcaagtagagtttaatacgttaaccgtcattaataacgttaatgtccattaccctcatgaggtttatcattttttaaaatctatcggcagtaaacatatgcaatttatcgaattgctagaaaccgggacgccgaatattgatttcagtggtcatagtgagaacacattccgtatcattgatttttctgtgcctcccacggcttatggcaagtttatgtcaaccatttttatgcaatgggttaaaaacgatgtgggtgaaattttcatccgtcagtttgaaagctttgtcagccgttttttggggaatgggcataccagttgtattttccaggaatcctgcaaggataatctggttgttgaaagtaatggagatatttacgaatgcgatcattttgtctatccacagtacaaaattggaaacattaataaatctgaactcaaaacgatgaacagtgttcaactgacagcgcaaaaaaaacggatttcagcgaaatgtcagcaatgtgcatataaacctatctgcaatggtggttgccctaagcatcgtattactaaagtaaacaatgagactgtttcctatttttgcgaaggttataaaatccttttttcaaccatggtaccttatatgaacgccatggtggagttagctaagaacagagtaccgctttaccacattatggatgttgcaaaacaaatggagaataattaa

SEQ ID NO: 18054 - DNA, 531 bp, Escherichia coli
atggccggtggtgttggcgagcggattttcctgtaccagaatgctcagatgcattgcccggacaagcgcctcacaggtttcattcagggcgtgttccagctcatgctctgcatacagactcagaaggtgatgatgtgccttccggtaggcggtggccgtgctgtcacacgcccctttcaggcgttcacgttcgaaattcagcaccacggccagattgtcatattcctgtaccagctcccggcgtgccacgcgctcaatgtggcgctgtttcagctcgtcgctcaggacaccaccggctgcacgaaaggccgtgcgccagtcgtcagcgtcgtttccgtcggcctgcgtcagcgcatttttttcctgctctgcccgttcaatggccgtgacggtctcatccatcaggcgggcgttctcaaggtgggcggctctggccttttccagttgtgccagtgcgggttgcagatattcagggatggtgttgtcagacattttccggctcctcgtcacttcaggttaagaaaattgtga

SEQ ID NO: 18055 - DNA, 999 bp, Escherichia coli
gtggcgctgtacaatatcgcaaataaagaactacatgctttagaaaaaacgacctttactctggaaggattacaggaacgttatgatttacaggaagcaatcaaaaaaaatatagatattattgctcctgattgtctggtgatttccgaagagttttctgactgggaagatagccgtcggcgaattgatttattggcaatcgataaacaggcaaatttagtggttatcgaattaaaacgtgatgaaacgggggcgcatatggagttacaggcactacgatatgcggcgatgatttccacaatgagttttgcgaaagcatgtgaatatttccagacgtatttgaaaaaacaaaactgcgatgccgatgcgaaagaaaaaatacttgaatttgttgaattggatgaaactgagcttgttgatttcggaaaagatatcagaattgttttggcatcatcggattttagcaaggaactgactaccactgcgatttggttaagagataagggggtagacattcgatgtgttcgtctgacgccttatagatttaatgatgatgttctaatcaatgcagagcaaatcataccggttcctgaattggaagaatatcaagttaaatttcgtgaaaaacgtgatgaacagctaattagcagtcagaaaaaagagaaggactatacgtggtatatatataaagataaagaacttaataaacgtaaattagcgcttgaattattacgtgattggataagacaatttaatcctgcaagttataatgatttaataaatggattaagtgatgactttaaaaaacgtacggttatgcttatcgatcagataccagagaagcaaaaaagtcgctatcatattaatgaagatgcgttgattacacttccctctggtgaaattgttgctatttctaatcaatggggcattgttaatattgaactcttgattgagtttgtacggcaaaatggttttgttgttgaaaaagctgaacaataa

SEQ ID NO: 18056 - DNA, 1044 bp, Escherichia coli
atgatctggctatcccgactggagtcgacagccaataaacatcgtcttgccgctggtaaggccgcgcgtacagtgaaagctaatgcggtgctggatgaggtattacgcgcacacaatcaagaggccttgagccaggaggtgcctgatttgctgagtcaggctgttacgcaactgcttgagagggactggcgggctcagcctaagcacaaagcgagttggcagcgctactggcggggtatgagcctgccaagtacttttgtttacgaaggtgccatcgttcctacgaagacaacatcagaaatagcctggcatccctggttggcccgacgtattacaggacaacttacccagccaatcaaggcacgcttacaacagctgaatacatatctttttcgccaaaccgggggcgacaagtcgctattcccgggcttgcttggacatcgtgagcggtctctgcttatatttggtgacgaaaaagctctggactccttgccacctgatggctggaagcatgtcactctgactttggctgatatgggcgcgtttcgacgtgcgccgcctttaccgtatgagtcatctcgttgccatgatcttccggctatcattgttgaaaactccgatgtgtattatcggctatgccaacttaatcgagcacagactcgctggtcactggtcatttatggcgcaggtaacaaagtttccggtcaggcggagtgcgtgtcacaactccttgaggtcgaacaggtagaacaactactttattttggcgatctggatgttgcgggcttaaaaatcgctcatcagttgcgttgtaagttgcttaatgattacggtatcagcttgcatttagatgaatggctttataataaactgatcttaaatggcctgatgacagcggaagggaacgccaacaacgaacggtttgatttcgagttacagtgtggctggatgccaaagtttgttttacgagaaatgaagactcttctggcgatccaccagcgtctaccccaagaaggtgtggcttctttaggtttatttatatag

SEQ ID NO: 18057 - DNA, 468 bp, Escherichia coli
ttgacagctgatttggttcagtcggtatttggcgaaggggaactggaggtgcgtttgctgaagacgaatgccagccgtccacaatggactcctgtcacccgacttgaaggttcgggtggacagcgccttacatctgcctttttactgtttgtgacggttggtaaagtacgagagtacgatacgggtatttcaagtgcaggattcttgttagccgataacccgctgggtaaatcgaatgccaatgatctaatgcgcattcaaacccaaatggccaaagcctataaaatccagctcatctacctgactggtatttcggatgaaaacgcccaatcaatgtttgataaccatctcttcctgaataaagttcaaaaactgaggcggcgcgatttggtaaccgttgataaagaacgccatgccctgtgggcggcttctctggctgctaagccacagttcgatccagtcatttaa

SEQ ID NO: 18058 - DNA, 1281 bp, Escherichia coli
atgaaaaaatttgtacatttgcaatttaattgtaataacaaatcagaacatgcaaaaaacactttgttgattgataataatcaaatacctatacatttaaaaaaaggaatatggttgacaaacatttgcgtagatgagaagtccagtgtatctttaaaagtcaaaaacgaaaatataaaattaatcatcacaaaagataaaatttttcatcctgatcaacttgcattcgataaaaaacattcgattgtttcacataaattattgggagagtctgtatattattcactttgtggagacatatattccccaaaaaaaattcttattacatttcctggtgtttctaattttgataatgtgcaccatcgtcttagtgcattgagttcattacattccagattaaaaaatgttcttattgtagcgttccaagataaagaaggtgtatatgggaactatatgtataaaacatcaactaaccaaaggattcagcctattgtaataagccttatttctgggctgaaggctagatttagtttatgcgaccatgatattattttttatggaaattcaaaaggtgcaactattgctatagattacatatcttttttccccaactcatacttttttattgatatacctcaacttgacctttataataaatcacataatgctctctttaagtttacattaggagaggatgcaagaaattattacgtttttaaagaaactttatcgtcattaaaaaatgaaaaagtttattattcattcgccgaaaatgatcatgactcttctcgctcaattccaatgaggaatttccctggaattaatgtatcgatgttaaaggatatggggcattctggtagtgcaatagagttagttaaaaaaaacttcgccaaaatttttcagttaattactgaaaagaatgccatcaatagaccaaacgttaatataaactactcttttaagaatggaaaattatatgtcgacagggtacttcctgcttttgataaacagcaaaaagcagatcaggtatatgcagaaatcaaatttcaacctattactcagtccccacggcaggctctcagcgtttcattaaacaaacatttcgatcacatattacatgtttactggaaacatggttttgatatattgaatcatttagaccaaggtgagtatattattagcttacatgtatattataactttgatgaattcatatatcctttaaataaaagaataattgtacactcaaataacatctctattataaaccatgaagggtaa

SEQ ID NO: 18059 - DNA, 447 bp, Escherichia coli
atgaacccgttattgccgccctgtaggccgcggctgagcgatatccgctatacggctttccgaagcttttccagattctgcgacggcaaggatactcgtggaatcacacgtatttactgtctgctgaagctgaattttagccgtagggcaaacaacgactgccggtacgcaatcccccaccactggctacatcggaagcgccgaaccatagctggtctgtcgattttatgcatgatgctctggcctgtggccgtcgttttcatacgttcaatgtcgttgatggctttaatcgtgaggcgttatcgattgaaaatcgatcttaatctgccagctctgcgagtggtccgtgtacttggcaggatcgcggcaaactgcggttatccagtcatgcagcgcatggacagtggtctggaatttatctcttggcgctggctgaatggacagtga

SEQ ID NO: 18060 - DNA, 1542 bp, Escherichia coli
atgcaacaacctgtagttcgcgttggcgaatggcttgttactccgtccataaaccaaattagccgcaatgggcgtcaacttacccttgagccgagattaatcgatcttctggttttctttgctcaacacagtggcgaagtacttagcagggatgaacttatcgataatgtctggaagagaagtattgtcaccaatcacgttgtgacgcagagtatctcagaactacgtaagtcattaaaagataatgatgaagatagtcctgtctatatcgctactgtaccaaagcgcggctataaattaatggtgccggttatctggtacagcgaagaagagggagaggaaataatgctatcttcgcctccccctataccagaggcggttcctgccacagattctccctcccacagtcttaacattcaaaacaccgctacgccacctgaacaatccccagttaaaagcaaacgattcactaccttttgggtatggttttttttcctgttgtcgttaggtatctgtgtcgcactggtagcattttcaagtcttgaaacacgtcttccgatgagtaaatcgcgcattttgctcaatccacgcgatattgacattaatatggttaataagagttgtaacagctggagttccccgtatcagctctcttacgcgataggcgtgggtgatttggtggcgacatcacttaacaccttctccacctttatggtgcatgacaaaatcaactacaacattgatgaaccgagcagttccggtaaaacattatctattgcgtttgttaatcagcgccaataccgtgctcaacaatgctttatgtcggtaaaattggtagacaatgcagatggttcaaccatgctggataaacgttatgtcatcactaacggtaatcagctggcgattcaaaatgatttactggagagtttatcaaaagcgttaaaccaaccgtggccacaacgaatgcaggagacgctccagcaaattttgccgcatcgtggtgcgttattaactaatttttatcaggctcatgattatttactgcatggcgatgataaatcattgaatcgtgccagtgaattattaggtgagattgttcaatcatccccagaatttacctacgcgagagcagaaaaagcattagttgatatcgtgcgccattctcaacatcctttagatgaaaaacaattagcagcactgaatacagaaatagataacattgttacactgccggaattgaataacctgtccattatatatcaaataaaagcggtcagtgctctggtaaaaggtaaaacagatgagtcttaccaggcgataaatactggcattgatcttgaaatgtcctggctaaattatgtgttgcttggcaaggtttatgaaatgaaggggatgaaccgggaagcagctgatgcatatctcaccgcctttaatttacgcccaggggcaaacaccctttactggattgaaaatggtatattccagacttctgttccttatgttgtaccttatctcggtgatgatgccaacttactgatttag

SEQ ID NO: 18061 - DNA, 1263 bp, Escherichia coli
atgattaataaaattgatttcaaagctaagaatctaacatcaaatgcaggtctttttctgctccttgagaatgcaaaaagcaatgggatttttgattttattgaaaatgacctcgtatttgataatgactcaacaaataaaatcaagatgaatcatataaagaccatgctctgcggtcacttcattggcattgataagttagaacgtctaaagctacttcaaaatgatcccctcgtcaacgagtttgatatttccgtaaaagaacctgaaacagtgtcacggtttctaggaaacttcaacttcaagacaacccaaatgtttagagacattaattttaaagtctttaaaaaactgctcactaaaagtaaattgacatccattacgattgatattgatagtagtgtaattaacgtagaaggtcatcaagaaggtgcgtcaaaaggatataatcctaagaaactgggaaaccgatgctacaatatccaatttgcattttgcgacgaattaaaagcatatgttaccggatttgtaagaagtggcaatacttacactgcaaacggtgctgcggaaatgatcaaagaaattgttgctaacatcaaatcagacgatttagaaattttatttcgaatggatagtggctactttgatgaaaaaattatcgaaacgatagaatctcttggatgcaaatatttaattaaagccaaaagttattctacactcacctcacaagcaacgaattcatcaattgtattcgttaaaggagaagaaggtagagaaactacagaactgtatacaaaattagttaaatgggaaaaagacagaagatttgtcgtatctcgcgtactgaaaccagaaaaagaaagagcacaattatcacttttagaaggttccgaatacgactactttttctttgtaacaaatactaccttgctttctgaaaaagtagttatatactatgaaaagcgtggtaatgctgaaaactatatcaaagaagccaaatacgacatggcggtgagtcatctcttgctaaagtcattttgggcgaatgaagccgtgtttcaaatgatgatgctttcatataacctatttttgttgttcaagtttgattccttggactcttcagaatacagacagcaaataaagacctttcgtttgaagtatgtatttcttgcagcaaaaataatcaaaaccgcaagatatgtaatcatgaagttgtcggaaaactatccgtacaagggagtgtatgaaaaatgtctggtataa

SEQ ID NO: 18062 - DNA, 777 bp, Escherichia coli
atgataagaagtggatttgaagtgcaggtggcggctgttaaagcattgttttttagagaaattcgaactcggtttggtaaatttcgcttgggatatttatgggcaattttagaacctgcatcgcatttgttaatattgttagggatattcagctatatcatgcatcgcactatgccggatatttcattccctattttccttattaatgggctgattccattttttatttttagtaatatcagtagacgttctgtaggggctatcgaagcaaatcaggggttatttaattatcgacctgttaaaccaatagatactataattgcacgtacattacttgagtcatttatttacgtctatgtctatgttttcctaatgttcatcatctggcttgctggtgaatattttcaaataataagacctttacaactgataggggcttggagtttactgatcgttctttcatatagtattggagtaatatttatggttatcggaaaaaaatcccctgaaatgcagaaaatattgccaatactaattaagcctttatattttatatcatgtattatgtttcctctacatgcaatcccaaagcaatattggtcataccttctctggaaccctttaattcatgtagtagaattaagccgagaggctgtaatgccgagttatgtaagtgaaggagtaagcataaattacttactaatatttagcttagctactctattcattagtctagcattatatatatactatgaagaggatatgttgacctcatga

SEQ ID NO: 18063 - DNA, 1227 bp, Escherichia coli
atgcaaggtaatgcactaaccattttattatcgggtaaaaaatatctgctattgcagggaccgatgggaccttttttcaatgacgttgccgaatggttagagtcattaggccgtaacgctgtgaatgttgtgttcaacggcggtgatcgtttttactgccgcaatcgacaataccaggcttacaaccaaacgccgaaagaatttcccggttggttgcgagatctccaccggcaatatgactttgataccatcctctgctttggtgactgccgcccattacacaaagaagcaaaacagtgggctaagtcgaaagggatccgctttctggcatttgaggaaggatatttacgcccgcaatttataaccgttgaagaaggcggagtgaacgcatattcatcactaccgcgcgatcctgatttttatcgtaagttgccagatatgcctgcgccgcacgttgagaacttaaaaccttcaacgatgaaacgcattggccatgcgatgtggtattacctgatgggctggcattaccgtcatgagttccctcgctaccgccaccacaaatcgttttccccctggaatgaggcacgttgctgggttcgtgcatactggcgcaagcaactttacagggtaacacagcgtaatgtattgccgaggttaatgaatgagctggaccagcgttattatcttgccgttttgcaggtgtataacgatagccagattcgtaaccacagcaattataacgatgtgcgagactatattaatgaagtcatgtactcattttcgcgtaaagcgccgaaagagagttatttagtgatcaaacatcatccgatggatcgtggtcacagactctatcgaccattaattaagcggttaagtaagaaatatggcttaggtgagcgcgtcatttatgtgcacgatctcccgatgccggaattattacgccatgcaaaagcggtggtgacaattaacagtacggcggggatctctgcgctgattcataacaagccactgaaagttatgggaaattctctttatgatatcgttgacttaacataccaaggaacattagatgacttctggttaacaaaattcaaaccagacataaagttgtttaaaaaatttaaagagtatttattgtttaaaacacaaataaatcatgttttttatggaaacgagaaaataaataagagcataaatatcaatagttttattggttcacacaaataa

SEQ ID NO: 18064 - DNA, 504 bp, Escherichia coli
atgtccggcagtgcttttgccgttacgcactacgccttcagtagcggagcaggaaggacatctgatggaaatggaagccacgcaagcaccttaaaatcaccatcatacactaaatcagtaagttggcagcattaccaatgcatccagcgcgcaaatgaagtgcataccatgacatcattgtccgggtttgaagcgttattacatggcaagcaagttcattgttacggcctgcccttctatgccggttggggtttaaccgttgatgaacatcactgcccgcgccgcgagcaaaaattaacgttagcagatttgatctatcaggcgttgattgtttatccaacctatatccacccaacacggctacaacctattacggttgaagaagctgcggaatatttaatcaagacgccgcgcaagccgatagtaattagaaaaaataatattgacagagttattaatatttaccgtaagttaatcatgttctgcagagtcagactgggttaa

SEQ ID NO: 18065 - DNA, 276 bp, Escherichia coli; identical to SEQ ID NO: 11424

SEQ ID NO: 18066 - DNA, 378 bp, Escherichia coli
atggtaccggtgagtccgctcatcatccgtgcggataaccccttccgggatgaggtcggttttctccgtcagcctgccgtgacggtcataccggtaaagatagtgcgcgtcacgggcgatacggttatccggccacatgctgagggtgctgtccgggtgcagctccgggtcgggcaggcggttacctgccgggtctgtggcatacgggatgcggatatccagattcgctgcggtggtgtgaacgccggtcagcctgccggagtcgctgtagctgtaactccgggtctggcgcgggctgctgatgcgaatgagttcgccgttgtcgttccaggtgtaatcgcggtcatactgcaggctgttcaggtgctggctctgtaa

SEQ ID NO: 18067 - DNA, 384 bp, Escherichia coli; identical to SEQ ID NO: 8120

SEQ ID NO: 18068 - DNA, 267 bp, Escherichia coli
atggcgacgctggggcgtcttatgagcctgctgtcaccctttgacgtggtgatatggatgacggatggctggccgctgtatgaatcccgcctgaagggaaagctgcacgtaatcagcaagcgatatacgcagcgaattgagcggcataacctgaatctgaggcagcacctggcacggctgggacggaagtcgctgtcgttttcaaaatcggtggagctgcatgacaaagtcatcgggcattatctgaacataaaacactatcaataa

SEQ ID NO: 18069 - DNA, 594 bp, Escherichia coli; identical to SEQ ID NO: 10350

SEQ ID NO: 18070 - DNA, 612 bp, Escherichia coli
atggataatgcgatattaaatagcgaacttatagccatacaggcaggaaacattatcgtttataactatgatggtggtaatcgggaatatatttctgcatcaactgaatatcttgctgttggcgttggtattccggcaaattcttgtttggatgctccaggctcacataaagcaggttatgcgattctccgttcagaggatttaagttcatgggagtatgtgccagatcatcgtggcgaaactgtctatagcattgacactgggaatcccgaagaaatcacggtgttgggtgactatccggaaaatacaaccactatcgccccgctaacaccatacgacaaatgggatggagagaaatgggtggttgatactgaggctcaacatagtgcagctgtagaggcagcagaaacaaaacgtcagtcattgattgatactgcgatggcttccattagtctgattcagttgaaattacaggctggacggaagttgacacaggccgaaaccacacagcttaactccgtgctagattatatagacgagctgaacgcgatggatttaaccacggcaccagatctcaactggcctgaaaaacaactttctgcagccagttga

SEQ ID NO: 18071 - DNA, 219 bp, Escherichia coli
gtgctgacgtatcagcgctgcatgctcacggcgggtattttccctctgaccgtattctgcaagaacggtgatatcacgaatcccgagctgtctggcggtaaaatgccggacgccggaaggaatatgattcatatcggtgaggaaggtgcccagaaaacggacacatccaatttgcagggcaatgcccagacggttgtgatggcactgttgcaaagttag

SEQ ID NO: 18072 - DNA, 306 bp, Escherichia coli
atggaccgtctgtgcgaagactactgcggtggtatctggaatctgtacactctgaacaacggcggggcatttatggcccccgaaccggatgacgatgatgacgaaacatgggtactgttcaatgccatgaacggcaaccgcgctgaaatgagcccggaagccgctggcattgctgcctgtctgatgacgtacagtcatcacgcctgtcgtacggagtgttatgccatgacggtccattattaccggctgcgggattacgccctgcagcatccggaatgcagcgccattatgcgcatcatcgactga

SEQ ID NO: 18073 - DNA, 573 bp, Escherichia coli
gtgcttacgtgccggggtacgttggtagtcaatcttaccgttgtgaatgtatcccagaggaccgtagttaacagacttgaaggtcgctacgtcggtggtattggttttggtgacatcgcgaccgtccagtacggtgtcgttcattaccaccagcacgccacgattagcggaggctttatcagctgcggtcactaccgcgttatacaggttgaatggaccgtctgcgctcatggacgtggacgggcgcattgcgccgaccatcaccaccggtttgtcgcatttcaccgtcaggtcgaggaagtaagcggtttcttccatcgtgtcggtaccgtgggtaatgacgaagccgtcggttttatcgcagtcggtgttaatttttttcgccagtgtcagccagacattatcgttcatgtcctgggagccgatattcactacctgctcgcctttaacgttcgcaatgtccttcagttgcggcaccgcattaaccagattttctacgccaactttacccgctgtgtagttagatttggttgcggagtcaccaccaccggcaatggtcccgccggttgctaa

SEQ ID NO: 18074 - DNA, 459 bp, Escherichia coli
atgagggataaaggtataaacacaccaactttacatgcctgcctcaactctagagagttattatatgatgaattttatatagaaattgatacaccattagtccattcatacattccactaagaaaaagcctgtataatgaagtgttcaataagtttcacgctgaaatttctgcattttcagaaaataaattcaggacaaatcacgatctgaatatggcgacatttcttgtcccatggtattcatacttaaaagggtactcagcgccatacaaagatatttgttattattttaacatccgttcagcaacggcacaacaaatatataaacaattaaaacaatcaaatataatgccacattcaatatgtgccaatgatatatcacaaaaaggatgctctaatattaacatgcaaaatgaagaactaaacaaaacattaacatctgcgctgtacaaactataa

SEQ ID NO: 18075 - DNA, 534 bp, Escherichia coli; identical to SEQ ID NO: 5124

SEQ ID NO: 18076 - DNA, 258 bp, Escherichia coli
atggcatttaaatttgattactacattgtggatgaagttactgctgttggtgatgccaagtttagaacaaaatgttatcattattttaaggagcgtcgttccgaatcaaatttcttaatggtttcccataatttaaatgtcctgagtgaatattgtgatgcagccttattatttacaaaagataagcaagtaatttattatgatgatattaaaatagctattaacaagtatattgaagataatgaattaacgagataa

SEQ ID NO: 18077 - DNA, 300 bp, Escherichia coli
atgatgcgctgccctttctgtcgtcattcagcgcatacccgcaccagccggtatgtgagtgacaatgtcaaagaaagttatctgcagtgccagaatatttactgttcggcgacatttaaaacgcatgagtcaatttgtgccgtgattcgttctccggttacggaggaaaaaccagcaccggtaagcacagcaccggctgttgtccgaaaagttaaaggctgttacagctcaccattcaaccattcaaccattaatcaggagaaggggtgtgaccacaatgtcattacagcaggcttttga

SEQ ID NO: 18078 - DNA, 156 bp, Escherichia coli
atgaataataagcgaggcgaatcaaccaacggttgtaatagctccgataccatcatgggtaattcggcgatcgtaataagccatgcagataccgcagcagaggccaccaggaacatcaccacggatgtggtttttgccgcgttaatcagcacatga

SEQ ID NO: 18079 - DNA, 216 bp, Escherichia coli; identical to SEQ ID NO: 5123

SEQ ID NO: 18080 - DNA, 279 bp, Escherichia coli; identical to SEQ ID NO: 4619

SEQ ID NO: 18081 - DNA, 267 bp, Escherichia coli
atgaaatacaataacattattttcctcggtttatgtctggggttaaccacctattctgctttatccgcagatagtgttattaaaattagtggatttgcccctatatttccagacatctgttatcacttaacccattacaagcccgctgccgcagatattcccgtggcgagcgataacccagcgcactatgcggatgccattcgttataatgctcgaacgcctctgcaaggttctttgctgccgttaacccgtctggtttgggcatga

SEQ ID NO: 18082 - DNA, 273 bp, Escherichia coli
gtgtttgtaaccgctgagcgggtgaagcgcggaaaaccagaacctgatgcgtatctgttaggcgcgcagctgctggggcttgcgccgcaggagtgtgttgtggtggaagatgctcccgctggcgtgctttcaggtctggcggcgggttgccatgttattgcggttaatgccccggcagataccccgcgcctgaatgaagtcgatttagtcctccacagtctggagcaaattactgtgaccaaacagccaaatggcgatgttattattcagtga

SEQ ID NO: 18083 - DNA, 387 bp, Escherichia coli
gtgcggtgcaaaggttttctgtttgatcttgatggaacgctggtggattccctgcctgcggtagaacgggcgtggagcaactgggccagacgtcatgggttatcgccggaagaggtgctggctttcattcacggtaaacaggcgatcacctctctgcgccattttatggcgggcaaatccgaggcagacattgccgccgagtttacgcgtctggagcacatcgaggccacggaaaccgaaggtattaccgcgcttccgggggcaatcgccttactcaatcatttgaataaagcaggtattccgtgggctattgtgacttctggctccatgccggtagcgcgagcgcgtcataaaatagcgggcttcccgcgccagaggtgtttgtaa

SEQ ID NO: 18084 - DNA, 252 bp, Escherichia coli
gtgatactggttgtctggagattcaggggggcagtctactatggtcgccgttataatgaagcctttagcgccatttaccccaaactcgccaaagagtttgatgttccgctgctgcccttttttatggaagaggtctacctcaaaccacaatggatgcaggatgacggtattcatcccaaccgcgacgcccagccgtttattgccgactggatggcgaagcagttgcagcctttagtaaatcatgactcataa

SEQ ID NO: 18085 - DNA, 270 bp, Escherichia coli
atgaataagtttcagcatcagggagcggaattgcgcaacagagccaaagaattggctttatccgtacttaaaactcacccagatgcccaaaaaaacggcaacggcgttaagcaagctgaggtatttcgtctaagcggcctcgattggggagaaaaacggaaagccacaagttcgaaccaacaatattgggttgttgcactattgcgtgaactagaagaggaggggttagtcgaacagattgaagataggggcccatggcgtctaaggtaa

SEQ ID NO: 18086 - DNA, 1119 bp, Escherichia coli
atgtatcttttcaagtattaccgtccggacttcttcttcgagaaagctattcgttataatgaattatatttttccgctcctgcgcaattgaatgatcccaatgatctcaatatagattatcgcttcgataataaattgaaattatgggatattttattgcgttctccttgcgataaatcctataaaaatttgagtcacatattggatttgagtaatttgaaaatacataagggattgaatcgtatttttagaggaaaaaaaataaaaagtagcattgagtcattagatagcctgtttgactcacacgttgatgagatacgtaagatcatagatgatggtttactacctatcaatgtgattaattctgctatttatggaaatattcctgaaccacgccaatatttggtttcactttgcgagaacagtatcaaagaaaggttgtataggaaaatagttcctgcagtattcagtgtgtcattttcagctaatgcgttagatcgtatgatgtgggcgcattatgctgctggctttagtggttgtgttgtgatttatgaaacgcaggattttaatattgatggtataccctatactggaatgaagctaagagaaaatttattttcatcagataaatttaattttccagttaagccaataaaatatagtaatcaggctaaagaggtttcacttctagacccaagcgcaaatgttgcagagttatttttaactaaaaatagattttggagatatgaagctgaatatcgaatgtttattccggaggcaaatgcaggaatagggagtgagcggcatgttcaaagacgcgtaaatcgaaatattggacatatttttcatcatgatgctaatgttgttaaagggatcatttttggtcctagaatgtgtgaaatgaaaaaagaaagcatatggaattgtatcaagtcaaatatggagaattcaaattcaacaatatgttatttttttgactctgagttatcagcatcaggaaagattactatttcaaaagggcaacgagcggaaaaaatgaaaaatttcactttgttcaggaacaagttaagtcagacggaaatggctaaagttttgaaggaaattggcattacgaactaa

SEQ ID NO: 18087 - DNA, 1740 bp, Escherichia coli
atggaattgcacgcatatactagaaccatatcagaattactttctgttaatagaaaatatgttgttccaagatttcaacgcgaatattcttgggtaaaagaacaaattaatgagctttggtacgatgtaatatctaatataaaattagagagtgatttcacatattctaataatgagtattttattggttctttagttttggttggagatgaaacaggaagggagatgcaaatagttgatggtcagcaacgacttacaactcttacaatttttctttccgttttatgcgaggcgttcaaatcaaacaatcaatcagatttagcgtctgccctatttgaaaattatattgaaggtcgtgatgatgatggtaagaaattctttaaattaataaatgaaacgcctaaacctttttttcagaaaaatatccagcatattaataaggcagatgacatcccacagacacaagaagagcgaaatctcttgtcagcatataaagaaattacatcgttagcctcaaaggaaaagttggaaaaatatttttcagtagaaattaatactgaggataattattccagtgtattaaaggcaattagagatcagattttaagattcctaaagataattttcattactgttaatgaagaggacgaggcgtatacaatatttgaaacattaaatgctagagggatgaatttaagttttgtagatttaatcaaaaataaattatttaaagcgttaaatgacccacatccaaatgatgatgcaaaagataattggaaggctatacgtactactttaatgcaaagaaatggtgtagggacttttgagaattacatgaggcactggtgggtgtcgaagtatgcttatgtgagcaatgaaaatctttataaatcctttattggcaaatggcgtaagggggaaattaatccggcaacctttattgacgaattgaaacaggatgccgaattgtatgtacgcttgtcatctcctttggagagtgattatccacaaatggaagacaaacagttatttcattcgttgaatgcaattagactatttggtataacacagtgtagaccttttttattagccttactaaaggcgaagcagcaaaagagattacgtcaatgtgatcttttaaaagcagttaaatatattgaaaattttcattttgtatttaatgcggtatgttcattaagaccgtcagggatagaaggagcatattctaaggccgcaagatctataaattcaccaaatgctacaaaagcaactaatggaacaacaattgaccagttatgtatgttgttgagtaatcgcaagccggaaatttctgtatttactgaacattttagggatatattgtttactgatgacaactccaaacaaaaaagattagttcaatatattataaataaatttgaaatggcccgtcataatggagatgagtatcgtcctaattctatttctttagaacatgtaatgcctcaaagtgctggcgacgataaggaaataggaatggttggaaatataatccccctgtcaaaagaacttaatgagcaagctggtgataaatcattggcacaaaagctttctatctattctcaatcggagtttagattgacagaagagtttgttagtgaacttgaaaccatttaccataatgaatggaatctccagtctattattcagaagacggataggatggctggtgaggcttatatgattatttggagtcattaa

SEQ ID NO: 18088 - DNA, 1029 bp, Escherichia coli
atgggaaagagtaagaaaaaccgcgctgcggcgacgaaacagatccagcataaaaaccagacttcagccgaagcattcagcttcggcgatcccgttcctgttctggaccgccgagaactgctggattatgtggaatgcgtacagatggaccgctggtatgagccaccagtgagtttcgacgggctggcgcgaacctttcgcgccgccgtgcaccacagctcaccgattgccgtaaagtgcaacatactgaccagcacctacatccctcatccgctgctcagccagcaggcgttttcacgttttgtgcaggactatctggtatttggtaacgcctacctggagaaacgcacgaaccgcttcggtgaagtgatcgcccttgaacctgccctggcgaaatacacccgacgcgggttagacctggatacctactggtttgtgcaatacggtatgacaacccagccgtatcagttcacaaaaggcagcatttttcatctgatggaaccggatattaatcaggagatctacggcctgcccggctatctttctgccatcccatccgctttgctcaacgagtccgccacgctgttccgccggaagtattacattaacggtagtcatgctggcttcatcatgtacatgaccgatgccgcgcagaaccaggaggatgtgaacaacctccgtaatgcgatgaaaagcgccaaaggcccaggtaacttccgcaacctgtttatgtactcgcctaacggcaaaaaggacgggcttcagatcatcccgttgtcagaagtcgcagcgaaggatgagtttctgaatatcaaaaacgtgagccgtgatgacatgatggctgcgcaccgcgtgccgccacaaatgatggggataatgcctagtaatgtcggggggtttggggatgtggagaaggctagtaaggtttttgtaagaaacgagttaattcccttacaaaaacgcatacacgaattaaacaaatggattaagaaaccgataatttcatttagtaattacgtgttagagtag

SEQ ID NO: 18089 - DNA, 885 bp, Escherichia coli
atggatatcagaacgctgcgttattttgtcgaagtcgtgcgccagcaaagcttcacccgcgcagcggagaagttgtttgtcacccaaccaactatcagcaagatgctgaagaatctcgaagatgagctgaactgtatattgttgatccgcgatggtcgtcggctgcttctcactgatactggtcgcgtcgtatttgagcgcgggctggctttactggctgagtttcggcaactggaagctgagcttagcgatatcaatcagcttaaaaccggcgttttgcggctgggaatcccgccgatggttgggatgttgatggccgggccgattggcctttttcgccagcgttaccccggcgtagaattgaaaatttcggagtttggtggtctgacggtacaacaagcggtgatgaacggtgaactggatatggcactgacagccctgccagtagaagaaagcggcctgacaacgttatcgctgtttagtcatccactatgtgtactgacgccacattcaggtaaatggcttgaatgtgatgccgtctcaccggagacattggcggaacatcctctacttatctataacgaagattttgccttaagtaagcaattgatgaagttattcgatgaacatggcgttaagccgagaattgcagttcgcagcgggcaatgggattttctcgccgcgatggttcaggccggtgtcggaatagccatattgccggaacccatttgccagcgattagataaaaacaccttaaaatggctaccgctggaaagcgaactaagctggaaattaggaatgatttggcgtgagggcgtttacctttcccactctgcccacgcgtggctgagctgttgtgaaggatactggttaacgccagagtaa

SEQ ID NO: 18090 - DNA, 381 bp, Escherichia coli; identical to SEQ ID NO: 3044

SEQ ID NO: 18091 - DNA, 123 bp, Escherichia coli
atgaaaactttgttatttatcttcatgaccatagcaatgttgctatggtttttaagtacgctaagacgtaaactagactggccccctgaatctccagacaaccaatatcacttatttaagtga

SEQ ID NO: 18092 - DNA, 3282 bp, Escherichia coli
atgactccagtaaaagtgtggcaagagcgcgttgagatcccgacctatgaaaccgggccgcaggatatacatcccatgttcctggaaaatcgcgtttatcagggatcgtccggcgcggtttatccctacggcgtgaccgatacgctgagcgagcagaaaaccctgaaatcctggcaggcggtgtggctggaaaacgactacatcaaagtgatgatcctgccggaactgggcggtcgggtgcatcgcgcgtgggataaagtgaaacagcgcgattttgtttatcacaatgaagtcattaaaccggcgctggtgggactgctggggccgtggatctccggcgggattgagtttaactggccgcaacaccatcgcccgaccacctttatgcccgttgatttcaccctcgaagcccatgacgacggcgcacagacggtgtgggtcggcgaaacggagccgatgcacggtttacaggtgatgacaggtttcaccctgcgccctgaccgggcggcgctggaaatcgccagtcgcgtctataacggcaacgccacgccgcgtcatttcttgtggtgggccaacccggcagtgaaagggggtgaagggcatcagagcgttttcccaccggatgtgactgcggtgtttgatcacggtaaacgggccgtctccgctttccccatcgccaccggcacttactacaaagtggactactccgccggagtggacatttctcgctataaaaatgtgcccgttccaacctcatatatggctgaaaaatcacagtacgattttgttggcgcgtggtgtcacgatgaagatggtggtttgctacacgttgccaaccaccatattgcgccaggtaaaaaacagtggagctggggacacagtgaatttggccaggcgtgggataagagcctgactgacaataacggcccgtatatcgaactgatgaccggtatttttgccgataaccagcctgattttacctggcttgatgcttacgaggagaagcgtttcgagcagtatttcctgccttatcattctctgggcatggtgcaaaatgcctcccgcgatgcggtgataaaactccagcgtagtgagcgggggattgagtgggggctgtatgccatctctccgttgaacggataccgcctggcgatccgcgaaatcggcaaatgcaacgcgttgctcgatgatgccgtggccctgacaccagcgaccgccatccagggcgtgttgcacggtatcaatcctgaaaggctgaccattgagctctccgatgccgacggcaatattgtactgagttatcatgaacatcagtcgcaagcgttgccgttgccggacgtcgccaaagcgccactggcagcacaagacattaccagtacagatgaagcctggtttatcggtcaacatctggagcaatatcatcacgcgagccgttcaccgttcgattactacctgcgcggcgtggcgctggatccgctggattatcgctgtaacctggcgctggcgatgctggaatataaccgtgccgatttcccgcaagcggtggcgtatgccactcaggcgctgaaacgcgcacatgcgctgaacaaaaatccgcagtgcggacaggcgagtttgattcgcgccagtgcttacgaacgtcaggggcaatatcaacaagccgaagaggatttctggcgtgcggtctggagcggcaacagtaaagcaggcggctattatggtctggcacggctggcggcgcgtaatggtaactttgacgctggtctggatttttgccaacaaagtcttcgcgcctgcccaaccaatcaggaagtgctttgcctgcataacctgctactggtgttaagtggtcgtcaggacaacgcgcgtttgcagcgcgagaaactgctgcgtgattatccgctgaacgctactctgtggtggctgaactggttcgatggtcgtagcgaatctgccctcgtacagtggcgaggtctttgtcagggacgcgacgttaacgccctgatgaccgccgggcaactgattaactggggcatgcccgccctggcggcagatatgctgaacgcactggactgtcagcgcacgctaccgctttacctgcaagccagtttgctaccaaaagctgaacgcggagaactggtcgtaaaagctattgatgccttcccgcagtttgtccgtttcccgaatacgctggaagaagtggcggcgctggagagtatcgaagagtgctggtttgcccggcatttactggcctgcttctactacaacaagcgtagctacggtaaagccattgccttatggcagcgttgcgtagagatgtcgccggagtttgccgacggctggcgcgggttggcgatccatgcgtggaataagcagcacgattatgagctggccgcgcgttatcttgataatgcttatcagcttgcgccgcaggatgcacgtctgcttttcgaacgggatttgctggataagttaagcggtgtcacaccggagaaacgactggcgcgtctggaaaataatctggaaattgcgctgaaacgcgacgacatgaccgcagaactgctcaatttgtggcatctcactggtcaggcagacaaagcggcggacattctcgccacgcgcaaattccacccgtgggaaggtggggaagggaaggtcaccagccagtttatcctcaaccagttattacgcgcctggcagcatcttgatgccagagagccgcagcaggccagcgaactgcttcatgccgcgctgcattatccggagaatttaagcgaaggccgtttaccggggcaaactgacaacgacatctggttctggcaggcagtatgcgccaacgcgcagggcgatgaaactgaagcgatgcgttgtttacgtctggcggcgaccggcgatcgcaccattaacatccacagttattacaacgatcagccggttgattatctcttctggcaaggaatggcgctgcgactgctgggcgaacaacacaccgcacagcaactgtttagtgaaatgaaacagtgggcgaaagagatggcgaaaaccagtatcgaagcggatttctttgccgtctcgcagcctgacttgttgtcgctgtatagcgatttacaacagcagcataaagaaaaatgcctgatggtggcgatgctggcggccgcgggattaggggaggttgcgcactatgaatctgctcgcgctgaattgatggcgattaatccagcctggccgaaagcggcattattcaccaccgtgatgccttttatttttagctacgttcactaa

SEQ ID NO: 18093 - DNA, 660 bp, Escherichia coli
atgaacctatatcaacgcatcaatggcgctgactggtgcaatatcttcgtcgtcggcgatctgcatgggtgctacacgctgctgatgaacgaactcgacaaagtttcattcgacccggcgcgcgatttgcttatttccgttggtgaccttgttgaccgcggcgctgaaaacgtcgaatgcctggatttgattactatgccgtggttccgagctgttcgtggcaaccatgagcagatgatgctggatgcactggtcaacggcggaagtttcggacattggatgtcaaacggcggtggatggtggcgccaacttgattctgagcaggatgtgcaactcaaataccttctgccaaaggttaccaacctcccgatgattatcgaactggttaccggcaataagaaggtcgtcatctgccacgcagactacccccacaacgaatacgcattcgataagccagtaccggaagaaatggtgatatggaatcgtgagcgggttagcgacgcgcaggacggtattgtctcggagataaccggtgccgatttgttcatcttcggtcatacgccagcacatcacccactagtgtatgcaaaccagatgtacatcgacaccggcgcagtgttctgcggaaatctgacgcttaccaaagtccaggaaggatag

SEQ ID NO: 18094 - DNA, 402 bp, Escherichia coli
atgatgaaaaatccattagcttattttcatattgccacctttttattgtcaggtaaaagtcgtaatctgtcagaatactggaaagccgaagtcatcatgcgggataagtttgtcttacaccgcctgataagaaacgggttgcagagacaacgaggctttctgatgtggtggcgcctggccaatgagatgtttatctctggaaaccaaaaacaaaggaaatgtgcgataaagataaaaaatgcacttatggaacggtatggatgtgatatcggcctgggcgcgcggattggtaaaggcctcatgttacctcatcatgcaggaggtaatgactccaacttattgatagtgttttatgttcagataatgcccgatgactttgtcatgcagctccaccgattttga

SEQ ID NO: 18095 - DNA, 537 bp, Escherichia coli
atgatgcttaccctagacgagataggtcaatctgtacgtaacaatatccagttgattattgatcatgtcggcttacctcttgctgttggtccgctcagtgatgatgattacaagattctgtgtggtggctatggtgagcttgaatgggactatgcgttaagcacctatggcaactccagagaaaagtatgagttctgcataaaacttgttcagcaaggtcgggttcagggaataccatcaggagcagcaatttgtgtttatggggttgaagaaaacatctttcgtatccatatgatcgaaaggttttctagagaagatgaatctcacccattgaaagggcgcatggttttactcactcttatgagtgcttttatattttgtaaagctgttgaatgtaaagttgtccacattgtagagccagtaccagaactggtgcagtattacgagtcttttggtttccgcatggaacagtgcggttatgtgatgtctgcagtcattgatgagctgcaggatatctttcttaaatttgctcagtag

SEQ ID NO: 18096 - DNA, 264 bp, Escherichia coli
atggcaactttgacaaaaaaagaacaagcatggttgagcgaattacaggacgttcttgatcgctgcccatcaccgaaaaaaattggtttttacaccattggcgataaaagcatttacctgtatgacctgcgccgcatggatgaaatcatggaggctcttgataatcgttcgtcaatggattggtgtgttgctgttcatgatatgaatgccggatttgatgaaaagattttattcccctcatcagttgaaagtacagcaggataa

SEQ ID NO: 18097 - DNA, 537 bp, Escherichia coli
atgagcaatattgactatcaggcactgcgtgaggcggcagaacgtgcaattccggcaatggaacgcctgttaatgttgccagctgatgatgatttgttaagtgaacaggaacttaaagattacggtgtggatattgatgcgctcaacgccttcaaatttctgaacggaccagaaaccgtgctggcactgctggatgaacgggaaagaaaccagcaatacatcaaacgccgtgaccaggagaacgaggatattgcgcttacggttgggaagctgctcgttgagcttgaagcagcaaaatcaaaactcaacgagcagcgcgagtattacgagggtgttatctctgatgggtgcaagcgtattgctgaactggaagcgcgggaagttcaattaccgactcgctacgaccttcgatatggacacccgataaatgcagatgagcgacatgtcatgatacctaaagaaaatggcagttggctttacctgattgacctggaacacgcattacgcgtcgctgacattcgcatcaaaggagagtga

SEQ ID NO: 18098 - DNA, 300 bp, Escherichia coli
gtgactgtatgtcttattgataaacgtcgacgtgggcaacaaataccatctgttgaaatgccgaatcacacatggttttgcgtacttgatatcgatggtatggatacgttgatcgacactcgtcattactgcgataccgcaacagctactccggcgaaagcaaagaaaatggctgctctgatagaaaactggactccacctgatggttggtgcaatgggaatgatcgggattggcatgaaaaaatgaagagctatatctgcgatttcttacgtaaatgcaacggattcagggtgatgtga

SEQ ID NO: 18099 - DNA, 234 bp, Escherichia coli; identical to SEQ ID NO: 6574

SEQ ID NO: 18100 - DNA, 174 bp, Escherichia coli
atgaaagataaacttttggtcatttttattctaatcattccattgattctatgctcttgcgataaaaaagatgaagattgtttatcgacgccagagaataaattgaacgaacataactatgataaatgtgccctgcgcagtaataacaatcctagccctaagcgagaatggtaa

SEQ ID NO: 18101 - DNA, 795 bp, Escherichia coli
atgaagttaatgctccgagtattttcatcaccgagagggattttagcagctaaaaaatcattagcagcttccttcctggcgtccatcatggcattaccggcgacagccggtatccctgtaatcgatggtactaatgtggtgcagaccacaatcagcgcagtcaacaacgttcaggctgtggctaaacagatccagcagtaccaaacgcagctgcagcagtatgaaaacatgctgaaaaatacagtcgcacctgcggcatatatctgggatcaggccaattcgaccatcaacaaattgttgcaggcgcaggacacccttaattactacaaaaatcaagccggaagtcttgattcatatctaaaacgttatcaggacgtgaattactaccgctcatcaccgtgttttaacagtaatgttgaatgtactacggatgaaattagcgcactgcgtaaagctgagcagaacagttctgaggcacgtaaaaaggccaatgacgccgtgtttaaggctctcgacgaacagcaggaaacactgcaaagcgatgctgataaccttgcagatttgcaaactcaggcaaccagcgcacaagggcaaatggaagctattcaggccgctaaccagcttgccagtgctcaaacgaaccagttgctgcaaatccgctcgcttctggtatcccaacaaaacgctgcagcaacactggcacaggctcaggccgataaagaggcccaacaaatagtagctgatgaaaaagcgttagctggcaagaacacaccaagcccgaagcgaatttggtga

SEQ ID NO: 18102 - DNA, 354 bp, Escherichia coli
atgaccgtttctcagactagaaaaaatagtacaccaattaaagtttattgtttgccagatgaaaaagcgcaaatccaggaaaatgcagaagcatctggcttaagtgtagcgagcttcattcgtaaagtagcaatgggttatcaggttgagtctattgtagatattgaacaggttgtagagcttagccgagtaaatgctgatcttggtcgacttggtgggttacttaaactgtggttagctaacgatccacgcacagttgatttttcaccctcattgatcaaaacgttgcttgctaaaatagaatcaaccagacaagaactaagaaatattatggatagaatcttggacaaataa

SEQ ID NO: 18103 - DNA, 282 bp, Escherichia coli
atgaaaccagttatgcctgaacttataaccgtcgaagagttagcttttgctttgaagaaaacagtgaaaagtatccgtagtgatgcaactcggaaccctaaatgcctccctcccagatgccgtcttcctggcaataagcgacttttgtggcgtcgagaagatgttaaagagtggatagataattctgttgaatcagagctggaaaaccgcgatttaatgcagcgtgctgaaatggttcaaaagaaacgaggtaggccaccgaagataaaaccgaaagaataa

SEQ ID NO: 18104 - DNA, 1746 bp, Escherichia coli
atgttcataaaatctctccagatagccaataaagatggggttatacgcttaataaagtttcatgctggtttgaatttgatcgttgatgaaacgccagttgatgaagcatcaaccgagtcaaccaaaaccactggcaataatgttggtaaaacaacagtattaatgttagtcgatttttgtttaggcgcagatgctaaaggcatttatactgacccagaaactaaaaagggcgaatatacacttgttaaaaacttcttgattgaaacagaggttttaataaccctaacacttgttgaggatttagatgatccgctagctaagaccatcgtcattgagcgaaattttctctctcgtaaaaaatgtatcagaagaattaatggactacaaaaaacaatcgaagagtttgaagaaacgttaacagacgtattagtttctggccattatggtaataagcctaccttttcccaaataatatctaataatataagatataaagagctcagtgtcacccatacgctgagaacactaagctcatttactcgtgatgatgaatatgagacccttcatttatttcttcttggatgtgattttggaaaaggagctcttaaacaaaatttgttagctagcatccgaatggaaacaaccttcaagaataggttggagtctaaacaaactcgcactgcatatgagacatcactagcattattgatttcggaaattaatgatttagatctgaaaaagtctactttctatatcaaccctaactttgaaaatgatctcaatgctttggatgatattaagtatcaattgagcactataggttcaaaattaagtaagcttaaattacggaaagaactcatagttgaggcggtaaaagatattgaaagtggcaagatggaaattgacactaatcaattgaaagatctatatactgaagccagtaataatataaagaatattcaggtaaaatttgaatcattactttccttccacaaccaaatggttgaagaaaaagttaaattcatatcaaaagaattacctgtaataactagtgagattagtaaaactcaagaagatttaactatacttcttgccaaagaaaaagaattagttgaaaatataaataaaagcggttcgtttgatgaacttgaagaactagtcttagaattgaatgaaaaacaccgaaaaaaaggtgagttcgaagccattattaaccaaattgagaaaactgaaaagaatatcgaagagttaaacgctcaagttgatgctattaacaataatttattttctgatgattttgagttagaggttcaatctcaggtaaataagttcaataaatatttttcaactgtgtctcaagagttatacggtgaacaatatgctttgaaatatgatattgttacagcatcaaaaacaggaaaaaaaatatacaaattcagttcgtttaataccaattttagttcaggaaaaaaacaaggagaaattgtttgttttgatattgcatatattttatttgcagatgaagaaaacattccttgtttccattttttgttaaatgacaaaaaagaacttatgcatggcaatcaactggtcagaatagctaatcttgttgaacgttacaaatctcaaattcagtatgttgcatctatattgaaggataaacttccaaaagaactgagcgatgagaaaaacttcattgtgaaattgtctcaagagaataaattattccgcattgagaataattaa

SEQ ID NO: 18105 - DNA, 249 bp, Escherichia coli
atgttgttaccaaaggacattcatcctaaagatagcttatattataacggtgggtttattatagatacgctgaaacgtttcgatgaaattgaattgatagatcttttttacgaaacaaagaaaaaaattgaaatgtctatatcaatttttgttttatctcttgactggttatacctagcaggaatagttgaattaaatccaaaggggaaattggaatatgttcataaaatctctccagatagccaataa

SEQ ID NO: 18106 - DNA, 981 bp, Escherichia coli
gtgaacagatctatttattttgatttatgtgagaaaaggcttacgttgctatgctatagcgttgaattaagagggaagttaaatattcttaactataatcttcattgtgaagatttttatgttcacttctttaatttattatttgggtattccctaaagaatactaatcaagagaagcataattttgagggtatcgatcttatcgatgagaatgggaagatagtattacaggtttcatcaactgcaactaaaacaaaaattgattcagccttgaacaaagacttaagattatataaaggccatcagtttaaatttatatcaattgcaaaagatgctagtgatttaagaaataaaacttacactaatcctcatgctttggtttttataccgcagcaagatattcatgatgtaaaatcgatacttaatgttatttcacatcttgacataacaaaacagaaagaaatacatggttttctaaaaaatgagttacaagaggaatctgatgatgttttaatcgaaacaaatattgctgctgttataaatatattagctaaggaggatttttctaatgttgaaactactgacttcccgcaaccattcgatgtaactgacaagattacatttaataatttgaatgcagctgaatatattattgaagattacaaaatccatcatggaaaagtatcccgcatttattcagagttcaaccagatgggtaaaaactcaagcctttcagttttgtcttcctttagaactatcttcgtaaaattgagtacacaatacactggagatgagctattttttaaaataattgacagctctgttgaaatggtcagaaaaagtgcaaattttacacaaataccattagaggaactggagctttgtgttagtatacttgcagtggacgcgttcatacgctgtaaaatttttagggaccctaacggagtgaatgatgttgttaccaaaggacattcatcctaa

SEQ ID NO: 18107 - DNA, 2415 bp, Escherichia coli
atgattgcacgttggttctggcgcgaatggcgctcgccgtcgctattaattgtctggctggcgcttagcctggcggtggcctgcgtgctggcgctgggcaatatcagcgatcgcatggagaagggcttaagccagcaaagccgtgagtttatggcgggcgatcgggcgttgcgcagttcgcgcgaagtgccgcaagcatggctggaggaagcgcaaaagcgcggcctgaaagttggcaagcagctgactttcgccaccatgacctttgcaggcgacacgccgcagctggcgaacgtcaaagcggtggatgatatctacccgatgtatggcgatctgcaaactaatccccctggcctgaaaccgcaggcgggcagcgtattgctggccccacgcctgatggcactgcttaacctgaaaacgggcgacaccattgacgtgggcgatgccaccttgcggattgccggagaagtgattcaggaaccggattccggttttaatcctttccagatagccccacgcctgatgatgaatctggcggatgttgataaaaccggagccgtgcagccggggagtcgggtcacctggcgctataaattcggcggtagcgagaaccagctcgacggctatgagaaatggttgttaccccagcttaaacccgaacaacgctggtacggtctggaacaggacgaaggcgcgctggggcgatcgatagaacgttcgcaacagttcctgctgctttcggcgcttctgaccttgctgctggcggtggcggcggtcgcggtggcgatgaatcattactgtcgcagtcgctacgacttggtggcgatcctcaaaacgctgggggcagggcgagcgcaactgcgtaagttaattgtcggtcagtggttgatggtgctggtactttcagccgttaccggtggggcgataggtctgttgttcgaaaacgtgttgatggtgctgctcaaacccgtgctacctgccgctttacctcctgccagcctctggccgtggctgtgggcgctcggcaccatgacagtcatctcgctgctggtggggctgcgaccataccgcctgttgttggcaacgcagcctttacgcgtgttacgtaatgatgtggttgcaaacgtctggccgctgaagttttatctgccgattgtcagtgtggtggttgtgctactgctcgccggactgatgggcggcagtatgctgctctgggcggtgctggcgggcgcggtagtactggctttgctgtgcggtgtgctgggctggatgctgctgaatgtacttcgccgcatgacgctgaaatcgctacctctgcgcctggcggttagccgcctgttacgtcagccgtggtcaacgttaagccagctttcggcattttcgctctcctttatgctgctggcactgttgttggtgttgcgtggcgatctgctcgatcgctggcaacagcagctaccgccagaaagcccgaactactttttaatcaacatcgccacagaacaggttacgccgctaaaagcgtttctcgcggaacatcagatagtcccggaatcgttttatccggtagtgcgggcgcggttgacggcgattaacgacaagccgacagaaggcaatggagatgaggcgctcaaccgcgagctgaatctcacttggcaaaatgcgcggcctgatcataacccgatcgtcgccggtaactggccgccaaaagccgatgaagtgtcgatggaagaggggctggcgaaacgcttaaacgttgccctcggcgataccgtgacttttatgggcgatacccaggagttccgcgctaaagtgaccagcctgcgcaaagtggactgggaaagtctgcggcctaatttctattttattttcccggaaggggcattagacgggcaaccgcagagctggcttaccagtttccgctgggagaatggcaacggcatgttgacgcaactcaaccgccagttcccgaccattagcctgttagacattggcgcgattttaaaacaggtcggtcaggtgctggagcaggtaagtcgggcgctggaagtgatggtggtgctggtcaccgcctgcggcatgttgctgttgctggcgcaggtgcaggtgggaatgcgtcagcgtcatcaggagctggtggtgtggcgcacacttggtgcggggaaaaaactgctgcgcacgacattgtggtgtgagttcgccatgctcgggtttgtatccggcctggtggccgcaattggtgcggaaacggcactggcggtactgcaatcgaaagtgtttgatttcccgtgggagccagactggcgattgtggattgttctgccgtgcagcggtgcgctactgctgtcgctttgcggcggctggctgggtgcgcgactgcttaagggtaaggcgctgttcaggcagtttgcggggtga

SEQ ID NO: 18108 - DNA, 543 bp, Escherichia coli
gtgaaagaaagcaatcagcgatggtgctctgacgggttcgagttctgctgtgataacggagagagactgcgtgtcacgttcgcgctggactgctgtgaccgtgaggcactgcactgggcggtcactaccggcggcttcaacagtgaaacagtacaggacgtcatgctgggagcggtggaacgccgcttcggcaacgatcttccgtcgtctccagtggagtggctgacggataatggttcatgctaccgggctaatgaaacacgccagttcgcccggatgttgggacttgaaccgaagaacacggcggtgcggagtccggagagtaacggaatagcagagagcttcgtgaaaacgataaagcgtgactacatcagtatcatgcccaaaccagacgggttaacggcagcaaagaaccttgcagaggcgttcgagcattataacgaatggcatccgcatagtgcgctgggttatcgctcgccacgggaatatctgcggcagcgggcttgtaatgggttaagtgataacagatgtctggaaatatag

SEQ ID NO: 18109 - DNA, 234 bp, Escherichia coli
atgcttccccgttttgccgatatttttcagcagggtaaccgctggcttaactggctggagaaacagccggaaggttcagtgcgtccggtggtgactgagtcagtgacaaaaatcatggcatgcgggaccacgctgatgggctacacgcaatggtgctgttcgtcaccggactgttgccacaccaaaaagatctgcttccggtgtaaagccgctcctgtccgaactgcggggtga

SEQ ID NO: 18110 - DNA, 1011 bp, Escherichia coli
atgtttcagttaggtattgatgtcagtaagaaaacgctggatttgtgcctgctgcgcgaaggcgtaaaaggcagcgttaaaacccgaaagcttcagaatgatattaatgctgtcaacgcggtaatagcctggctcagtaagcaacattgtaaacctgaagatgtccatatcatcatggaagccactggtgtttatcatgaatcactggcttacgggcttcacaaagccgggggccggatatcacttgccaacccacacagggcaagagagtttgcccggggtatgggaatgctgaccaaaaatgaccgggttgatgcttatatgctggcttgctatggcgcgcttaaagcaccggagccatggcttcctccaccggaagaagtccgccatctcagtgcactgctccgcagacgtgatgctcttgtggctgacagcactcgcgaaaaaaacaggctggaaaaatacctggcaacagacacaccttctgttatagctgaatccgtagaggcaatgattggtcagttgaacgcagaaattaaacgtctggacagactgatccgttcacaccttaaccagcatcctgaattaaaaaaggattttgacctgctgacgtcaataaaatccgtaggttatcagttaggtctgaatatgcttgtcatcctgcggagccatgatttcgccacagcagaacaggcggctgcatttttaggtgtcgttcccgttgaaaaatattccggcacctcggtcagagggtgtccgaaactgtcaaaaattggtccgccggaaatccgggcgaaactgtatctggcttcgttgtgtggtctgagatttaacccattgatgaaagcgatgtatgagcgattatgcctgagaggtaagggcaaaatgtgtgccattggtgcgctgatgagaaaactcgtgcactggtgctatggcgtactgaagacccaaaaaccgtttgatgtgggctatttgtcttcatatgcgcgtagcgcatgtaaggcggcatga

SEQ ID NO: 18111 - DNA, 258 bp, Escherichia coli
atggaaaagaaaacgatttctgactataccgaggcggagtttctggagttcgtcagaaaaatctgccgggctgaaggtgaaactgaggctgatgatgataaattagtggatgaatttcgtcgattagctgaacaccctgatggttctgatcttatttattatccaagggatgaccgtgaggacagtcctgaaggtatcgtaaaagaagtgaaggaatggcgagccaaaaacggcaagccgggctttaaacagggctga

SEQ ID NO: 18112 - DNA, 234 bp, Escherichia coli
atggaagtggggaaagatccggagttactgaagcagttcaaaaatcagaataaggttctggttacaaaaggtaaatcttcgtttgttcctgaatcagagcgtgtaggtgaacgagaacgtttcgaactgcaccatatcaagcgcgttacggatggtggcgctgtttatgatatcgataatctcagggtagtgacacccaagcatcatattgaaattcacagaggaaataagtaa

SEQ ID NO: 18113 - DNA, 246 bp, Escherichia coli
atgtcacacaacctagagcaccagaaagtccacaccagaatggtgaaagaggttctgaaagccgtcgccagagccaataatcacccttatcagtccgtatttacagactttatcgccggtcatccctcctgcacggtctgtttctgggaaaccttcaacaaaatgtacccggattcaccgtacgaatacgtcacgttctgccatacctgccgtcgtttgatttatacgaaacagaagcggagatga

SEQ ID NO: 18114 - DNA, 723 bp, Escherichia coli
ttgacggaagcaggatgctgggctcatgcgcggcgcaaaatccacgatgtatatatcagtaccaaaagcgcgacggcggaagaagcactgaaactaatcggcgaactgtacgccattgagcacgaaatacgcgggttgccggtgtctgaacgcctggcggtcaggcaaatgcagagtaaaccgctactgacttccttgtataagctgatgcaggagaaagaacacacgttatcgaaaaaatgccgtctgagagatgcgttccggtatatcaggaagcactgggttgcgttgtgcaacttctgtgatgacggtctggcggaggcggacaataacacagcggaaagagcgcttcgtgcagtctgtctcggaaagaaaaattacgtgttcttcggtagcgatcacggcggcgagcgtggtgcactgctgtacgggctgatcggcacctgccgtctgaacggtatcgatccggaagcgtatctgcgccatattctgagcgtactgccggaatggctttccaaccgagttgacgaactcctgccatggaacgtagtactcaccaatatgaaccgccccgggtttcctggagagtgttttatctgtgaactcaggctgccagatcatcgtttccgatggaagcataataagctttttctgcttctgccggaggagtatggcccagcctttccagcaatcgtcgattgttataccagtccacccacgtga

SEQ ID NO: 18115 - DNA, 408 bp, Escherichia coli
ttgcagaagaacgggagtgttcgtttccgtgaccgtcggacgggagagtttgtctgtacggattatggtgacagggttgttttccgtaatcaccatgaccgcaatgcgctggcagataaactggatttgattgcacctgtattgtttgagcgtgatcccagaatgggctttgaaccagaaggaaacgacaaacaatttaaccaggtctttgctgaaatggttgcctggcataatgtgacaggccgtaccggtcacgaagactacaggattacacgaccggatgtggatcatcaccgggaaggaagtgaacgctactaccgcgattatatcgcggcgaacagcaacgatgacgcatcactgcctccgccggagcaggataaacgctgggaaccgccatctcccgtatga

SEQ ID NO: 18116 - DNA, 867 bp, Escherichia coli
atggctataaatgacgccggaatgttcaccgtgaaagaaatcaatcgcctcaaaatccttcaggatgtcatcgatcgcaatatccgtcctggacaggctgccgaaatgctgggcatcacgccacgtcattgcagccgtctgctcaaacgttatcgccagtatgggccgcttggcatgaacaaccagagtcgtggccgcactggtaaccgtctgttgccagcgtcactgacagatcaggcactcagtataatccgggagcactaccgtgattttggccccacgctagcgcgggaaaagctggaggaagttcacggtctggtccttggaaaggaaaccatccgacgtctcatgataaaggccggactctggattccccgcagacaacgcgcaccgaaaattcatcagcctcgttaccggcgtccttgtactggcgagctgatacaaattgatggctgcgaccaccactggtttgaaaaccggggtcgaccctgttctgccctggtctatgttgacgatgccaccagtcgcctgatgcacctgctgtttgtgaaatctgagtccacatttacctattttgaagctacacgtggctatatcgagaaatacggtaaaccgatgatcctctacagcgataaagccagcgtattcagagtcaataataagcatgccaccaccggccccggcgaaacccagtttgccagggccatgcgctgccttaatattactcctttgtgtgctgaaaccagccaggcaaaaggccgcgttgaacgtgctcatttgacacttcaggaccgactcgttaaggagctcaggcttaaggggatctgtacaatagaagcggccaatgcatttgcagaaggattataa

SEQ ID NO: 18117 - DNA, 882 bp, Escherichia coli
gtgactctgttcatagttatcgtcggcgccggatacagcatctaccctgctcagggcagacgctatggcttgtattttccgtccgccactggtactgccgtaacccggcttgttcacgtaaaatttttgccgggtcgcttgcccccttcgccggttcactcccagcattcttcacaggtgttacaaaatttacaacatcaactgggattaatagccggaggtgaggccgggaaacaggcagcaacggcagtggggctccgttgcagtgctgatactcttcttcgcagggttattaataccccggagacgaaacagtcgggcgcgcctcatgtcggtattgatgagtgggcgtggcatcggggccaccattacggcacgttaatcgtcaatcttgatactcaccgtcccctcgtcctgcttcccggttgcgatcagagtacgctggcgacctggttcagaaaatatccggaaatacaggttgtctcacgtgaccgtggcggagtctatgcgacagcagcacgtgaaggtgcacctcaggccagacagatagctgatcgatggcacctgctaaaaaatattggcgatgcgcctgaacgaatgatgtacagacagatgcctctgatacgtcttgttgccagtgggttgtcaccaaagaaatcacctaagccagtactgtctgtgcctgtagcatcgctccgtcgtccggaacgccttaaacagcaaacccgccaaaaacggcatcagcgttggacagaggttatggcactacataacaagggatgtgggttcaggggaaatatcccgtattacaggcttatcccgtattacaggcttatcacgtgtgacagtcagtctctgggtgtgttcaggaacattccctga

SEQ ID NO: 18118 - DNA, 963 bp, Escherichia coli
atgaaagaacttgtggtcgttgccattggtggcaacagcattatcaaagataacgccagccagtcgattgagcatcaggcggaggcggtgaaggccgtcgccgatacggttctggaaatgctggcttccgattacgacattgtgctgacccacggcaacgggccgcaggtcggtctggatttacgccgcgcggagatagcccacgagcgcgaagggctccccttaacgccgctggcgaactgtgtggcggatacgcaaggcggcattggctatctgatccagcaggcgctgaacaaccggctggcgcctcacggcgagaaaaaagccgtcaccgtggtgactcaggtggaagtggataaaaacgatccggggtttgtccatcccaccaagcccatcggtgcattctttagtgaaaaccagcgtgatgaactacaaaaggcaaaccctgactggcgttttgttgaagatgccggacggggctatcgccgcgtggtcgcctcgccggaaccgaaacgtattgtcgaagcacctgccattaagactctgatccagcaaggctttgtggtgattggcgcgggcggcggtggcattccggtggtgcgtactgacgcaggggattaccaaagcgtggacgcggttatcgacaaagatctctctagcgcgctactggctcgcgaaattcacgccgacattctggtgatcaccaccggcgtggaaaaagtgagtattcattttgggaaacccaaccagcatgcactggatacagtggatgtcctaacgatggcccgttacatgcaggagggtcacttcccgcctgggagtatgttaccgaagattcttgccagtctggagttcctggaacgtggaggtaaaagagtgattatcaccacgcctgaatgcctgtccgcggcactgcgtggcgaaacaggcacccatattatccactcccaagaggagacgtaa

SEQ ID NO: 18119 - DNA, 1551 bp, Escherichia coli
atgaacagcataaaactagaatggaaacgtggtgactgggcggcttactttggactgatgaccaacaatctgactaacctgctgacaatgatgggtctgctaatttttgtcgtcggaatccctactgaaattgtctatggacgcattgcgcctgcctttggtcttgcagtgctggcggccagtgtctgctactcctggtttggtctacagatggtgaagaaaaccggtcgtagcgatgtaacggcgctgccgtctggaccgagcgcaccctcaatctttaccgtgacattcctggtgctgatgccggtttatcagcaaaccaaagatgccaactttgctattcagataggattggtgtggtgctttgtcgaagcgttgatcctggtcggtggatccttcctgggtgagactatccgcaagatgatcccgcgtacagtgctgctttcttgtctgtccggactggggttattactgctggcaatgaacccgatgctgcaagcgttcgaagcgccgacagtttctttcatcgtcctgttattgatcttcattaactggttcggtaagaagccgatttttccccatattcctaccggtttgctgttgctgattgctggtacgtccctagcgtggatatccggtttacaaagcccggaagacattaaagcgtcgatgtcttccttcggcttcaacccgccggaaattcatgtaaggagcttcctgcaaggtttgccgcacgctctgccatatctggcttctgcagttcctttgggcctggctaactacatttttgacctcgagaacattgaaagtgcgcacgcggctggtgatgaatacaacacccgtaaggtcatgatggcgaacggctttgcctccatgctcggttgcatgctgggtaatccgttcccggtaaccgtatatgttgggcatgcaggctggaaagctatgggcgctagtatctgctataccctcgcatcaggcatcactatgtttctggtgccattgtttgggttgggcgcgtttatgctcgccattattcccatgactgctatagtgccaattctggtttttatcggtgtggtaaccgccaatcaggtggtgcgagaaactcctaaagtcgaggttcccgtcattttcatctgtctgttcccatgggtcgccaactgggcattgaccatcgttaacagcgtgatgggcgcagccggaacatccgctgagaaacttggtagcgacctgttgcacagcaaaggcgtctattacgatggactgatgcatctgggaagcggtgcaccgctggccagcatgctgtggggatgcattgctatctttgccattatgaataagccgctgcgcggggcgatagctgcatcctttggagcactgttatcgctgtttggcgtgattcactccccagcggttggctttgcggaaggcagctcgattgtgtttgttgtggcctacctgatgatgcttgctatgtttgccctcaagcatgttattgatagccgtgaaacagtggctgcgtctgagcaggaagagactaaaacgacctga

SEQ ID NO: 18120 - DNA, 1419 bp, Escherichia coli
atgagccagacactgtttaatcagccgctgaacgttattaatgtcggtatcgaaatgttcagcgatgacatgaaaaagcagaatgtaccggtaacccaacttgactggacaccgccaggccaaggaaacatacaagtggtaacggcactggacgacattgccgcttcaccactggcagacaaaattgcagctgctaatcagctggcgctggaacgcattatccagtcgcatcctgtgctaattggctatgatcaggcgatcaacgtcgtgccgggtatgacccgtaacactatccttcacgccgggccgccaatccactgggaaaaaatgtgcggcgcaatgaagggcgcagtaaccggggctctggtatttgaaggactggcgaaagatctggatgatgccgccgaactagctgcttcaggtgaaatcatcttctctccgtgccacgaacatgactgtgtcggctcaatggcgggtgtcacgtctgcatcgatgtttatgcacatcgtcgagaacaaaacctatggaaaccgcgcatataccaatatgagcgagcagatggcaaagatcctgcgtatgggcgctaacgaccagagcgttatagagcgtcttaactggatgcgagatgtactgggacctatgttgcgcgatgctatgaagctggcgggcgaaatcgatctgcacttgatgttagcgcaggcgctgcatatgggcgatgagtgccataaccgcaacaacgccgggacggcgctgctgattcagacgctgacgccgtggattattcagactggctaccctgttgagcagcagcgtgaggtgttcgagtttgtcctcagtagtgattacttctcaggaccaacatggatggcaatgtgtaaagccgcaatggacgctgcgcacggcattgaatacagcaccgtggtgacaacgatggcacgcaatggtgttgagttcggtcttcgtattagcggtttgccgggccagtggtttaccggtccggcgcagcaggtgattgggccgatgtttgcgggctataagctagaggattccggacgtgatatcggtgatagtgcaattaccgaaacctacggcgttggcggtttcgctatggcgacggcaccagctattgtgtcactggtgggcggaacagttgatgaagctattgatttctcacgtaaaatgagagaaatcactctcggagaaaaccccaacgtcaccattcccctgcttggttttatgggcgtaccgaccgctatcgatattacgcgtgtaggcagtacaggcattctgccggtaattaacacagccattgcgcacaaagacgcagggatcggcatgatcggcgcaggaattgttcacccgccgttcacttgttttgaaaaggcgatcctcaactggcgtgaccactactgccaataa

SEQ ID NO: 18121 - DNA, 1548 bp, Escherichia coli
atgtcaatcaggatagttgtaaaaaaaaacacgtattttgattctgtttcactgatgtctatctccacgcgcgcaaataagcttgatggagttgagcaggcatttgttgctatggcgacagagatgaataagggggtgctgaagaatctcggtctgctgacccctgagctggaagaggcgaaaagtggcgatctgatgattgtcattaaaggtaccagcgaggaggcgaacgagcggacgctaatagcgattgatgagctgtttgcgcataaagaacagggaggccagcacgaagcacgctatgccacgattgccagtgcgaagaagcatgctccagagagtaatctggcggtgatctctgtcaatggcctgtttgctgctcgtgaagctcgtcaggcactacaaaataacctcaatgttatgctgttttctgacaacgtctctcttgaggacgagctggaactcaagcatctggcacatgaaaaagggttgttgatgatggggcctgattgtggaaccgccatcattaacggcgcagcgttgtgttttggcaatgcagtgcgtcgcggcaacatcggaatcattggtgcctccggtacgggtagccaggagctgagcgtacgcattcacgaatttggcggcgggatttcccagctgattgggacaggtggacgcgatatgagtgaaaaaattggcggcctgatgatgcttgacgcgattagcatgctggaggccgatccacaaactgagatcattacgcttatatccaaacctcctgcaccagcggtagcccgtaaggtgctggaacgtgcgcgcacctgtcacaagcctgtggtggtgtgtttcctcggacgtgagtccacccctgcggatgaagaaggcctacagtttgcccgcggtactaaagaggctgccttgaaagcggtactgttgactggtgtgaaaaaagagagtctggatttgcatccgctcaactggcagctgattgaagaggttcgctcccgtctgactccacaacaaaagtatatccgtggcctgttctgtggtggcacgttatgcgatgaagcgatgtttactgccatggaaaaactctcggatgtgtatagcaatattcacccgaatccggcgttccgccttacagatctcaaccgtagcgtggcgcataccttcctcgatttcggcgatgattattttaccaacggcaaaccacatccgatgatcgatcccaccaatcgcattacccggctcttgcaggaagcacaggatcctgaagttggcgtgatcgtgatggacttcattcttggatttggatcacatgaagatccggttggagtgatgctggatacaattgttgaagccaaagaaattgctgccgcagacggtcgcccgcttgagatcctcggctatgtgctgggaaccgaccttgatacaccgtcgctgaaaaaacagtgtcagatgttgaccgatgccggggttatttgggcaagcagtagcaccaacaccggattactggcacgtgaatttatatttaaaggggaggaaggctga

SEQ ID NO: 18122 - DNA, 849 bp, Escherichia coli
atgggccaggttgaacaggttttttcccatgcggtaaatctgttaatacctgaacagcagcgactgctgacgttactgagtgaggattgtgataacgcacctaacagttgtcgtttagcactgacacattatgaagacctttttcaccccggtgaacaggtcaattttagcgggtctggaataactgttggaaatgataaatggatagaaataaccggttgtcagatgtggcgaataccacggtggacatctgattcagcaagccttgccaaagtcggctggcagcattgggaagagtttatccgccaacaactaagaagcaacgacacattatttctgtaccagggtgacaatccattttatcaggaaatttctcgccaattactcaaccgccgaaaaaatttgctgaaggcgttgtgtacaggagaaaacatcactgcggcagtcaaccagttaattggtcttggaatagggctgacgccatcatcggatgattatttagtaggtttaagcactattttatttattcaaggacatccactaaggaagtatagatacgatttcttagcagcattacaacttgcaggaaataacataacgcttctcagcaaaataacgttagaggaagcatttaatcagcgttatcgggaaagagtcggacggctactgaaccaatttattactgagccacaacccatttctacgcaatatgttactgacataaaaaatataggctcaagttctggatgcgacatgctgtatggcatggcggatgcctgcgccctgagccacaggtccggaggtaattatgtcaatcaggatagttgtaaaaaaaaacacgtattttga

SEQ ID NO: 18123 - DNA, 606 bp, Escherichia coli
atgtccaataaagaactcattacagaatttctgctggcggcagaacaaggtaattccgatggattaaaatcatgccttgataaaaaggttgatattaatgcgactaaccgcgaggggcgtactgcaattattattgccagtctgaataaacattatgactgcgtttctttattgatttccgcaggtgctgatattaataaacaagatcaaacttgttttaatcccttcctgattggctgcctgaataatgatttaacactgttgcgtacggtattaccggctaaccccgaccttaattgcctaacccgttttggcggtgttggtattacacctgcctgcgaaaaaggccatgtcgagattgtacgtgaattgctgatgcgtactgatatcaatgtcaaccatactaattttgttggctggacgccgctcctagaggccatcgtgctgaatgacggcggtgaaaagcagcaggagatcgtcaaactgttgcttgagcatggcgcaaacccgcacatgacggataaatacggtaaaaccccgctggagctggcgcgagaaaaaggctaccacaaaattgccgagttgctgatttcggctggagcctga

SEQ ID NO: 18124 - DNA, 930 bp, Escherichia coli
atgaattcaatatttacggaagaaaacttactggcatttactatggctgcccgctatagaagtttcagcaaggcggcgaaggaactgggcttaaccacatcggcaattagttacactatcaagcgtatggaaatggggcttgacgtggtgctttttacccgaactacccgtagcattgagctgaccgagcccgggcactaccttttttgcaaagcaactgacctgctcaacgattaccactccatcatacgtagagttgatgccatcgctcagggaattaaatcccgggtgcgcatttgtattaatcaactgttgtatacccctcagcatacagctcggcttctgcaagtgctcagggaacactttccaacctgccagatagctattactacagaggtgtataatggcgtctgggattcactcattaataaccaggctgatatcgccattggcgcgcccgatacgttactggacggtggtggaattgattacattgaaatcggcatgattcgttggttgttcgcgatttctccggctcatccgctggcgtttattcctgagcccatttctgagagtcagttacgtctgtacccgaacatcatggtggaagacactgcaaacactataaacaaaaaagtcggctggctgttacacgggcaagagtcgattctggttcccgactttaatactaagcttcagtgccagatcttgggggagggaatcggttttctgccagactatatggtgcgtgaagcgatggaaaagtcattgctggtgacacggcagatccacaacccacgtcaggattcacgaatgctgttggcaaccaggcattcggcaagcggtcaagtcactcagtggataaaaagagaatttagcttacaaggaatactgacggggatttatcaggatttgatgcatcgagcgtga

SEQ ID NO: 18125 - DNA, 252 bp, Escherichia coli
atgctcctggcgggcatttttgtactgatattttccgggctgagcacttctcaggttcagatgcttcatcagcctcctggcacgataactgctcatcgggataccattttgaatcagcatatctgccagagcacgcgcacctgcggaaccccgactctggttccagacccggactgtttcgctatacaatttgattcgcgccggatcaatcgtattgagccgattctgccagtgccggaactgctgcaatga

SEQ ID NO: 18126 - DNA, 138 bp, Escherichia coli
atgcacgcaggtgtctattttaacgtaattatccggaaagaacagtatattttaatgcgggagttgcatgagcggtatacgggagaaactatcagaccatgggagctacagaggtgcttaagtctcgtaacattataa

SEQ ID NO: 18127 - DNA, 690 bp, Escherichia coli
atgtgtttaaaatcaggggaaaacctaaacgacgatactaaccagactgttgaagcttctgaaaatgcaggcatgaacgaacaggacaagattgctctcgataaaatcgggaagttacagggcgcgcagtttcaacattgcgaaatgacagagaccgcaggaactgagttgtttcggcttcaagtgggtagccacggcggaagcagtgtctttttcaatcgtaatggtacggactgccgttacagtcttaatgatggtgtgaacggctcaatgtacttggcccgaactcctgatacggcaatgaaggaagtgtttcagcacaaaaaaggactcagggaatcggacctcgataattacataatgggaaaagtaattattgagaaagatatccgtgtccttcaggtcagtaagctgattaaaagtagcgacttgacgttgcatgaactgacgacagcaacacgagcagttactcagcttctggctgaaaaggttcattctgcagggtttggcggaatggagtttccgtcaaatgtcaccggtgacccatgccttgttctatggcatgacgatccggccggaaccgggctggccacaacccgtagccagacaagtctcagtcagtttgaatatcagggtaaggaagcggcggatattcttgtttatgaactgggcattcctgttgaggaatag

SEQ ID NO: 18128 - DNA, 690 bp, Escherichia coli
atgaacacaccaactcaaaaacgaaacggtaatgatcgttcctccactatgcgtaatttttcggacacaggagttgctgctgcacgttttcagaattttactgagattctggcggacgaaatccgggcgggtgttaccccggttacgcctgaaagtatggcagagaccgacgcggttttcgccattgataccatactgaaattcatgaaacaccgcgcagttaatagcctgacgccggaaaaaaaacgccatcagcgacggttatacagtaaggcacagttcctgcagacactggaaaaagacggtggcgtgtacagttctgccgaggctgcagacgttcttggccgcagtaaaccaacggtgaaaacctggaaggatactggccggttacttgccctggatattgatggtgagttctactacccggtgtttcagttcactgatgaggaagggatctcggataaaggtgtgctccggggtgtggccgaactgctgcctatgctgagcagcttcagtgacagaatgaaatattcgttctttatggaagagagaaatacggtcctggatggactgactcctgcaggacgtacgtttaccattgcggaagttctgaaaggcaatccggatgcaaaagtgatggatgaattacgccgactggctcgcaactacggcactcagaacgccgtttaa

SEQ ID NO: 18129 - DNA, 1038 bp, Escherichia coli
atgagacgaacatttacagcagaggaaaaagcctctgtttttgaactatggaagaacggaacaggcttcagtgaaatagcgaatatcctgggttcaaaacccggaacgatcttcactatgttaagggatactggcggcataaaaccccatgagcgtaagcgggctgtagctcacctgacactgtctgagcgcgaggagatacgagctggtttgtcagccaaaatgagcattcgtgcgatagctactgcgctgaatcgcagtccttcgacgatctcacgtgaagttcagcgtaatcggggcagacgctattacaaagctgttgatgctaataaccgagccaacagaatggcgaaaaggccaaaaccgtgcttactggatcaaaatttaccattgcgaaagcttgttctggaaaagctggagatgaaatggtctccagagcaaatatcaggatggttaaggcgaacaaaaccacgtcaaaaaacgctgcgaatatcacctgagacaatttataaaacgctgtactttcgtagccgtgaagcgctacaccacctgaatatacagcatctgcgacggtcgcatagccttcgccatggcaggcgtcatacccgcaaaggcgaaagaggtacgattaacatagtgaacggaacaccaattcacgaacgttcccgaaatatcgataacagacgctctctgggacattgggagggcgatttagtctcaggtacaaaaaactctcatatagccacacttgtagaccgaaaatcacgttatacgatcatccttagactcaggggcaaagattctgtctcagtaaatcaggctcttaccgacaaattcctgagtttaccgtcagaactcagaaaatcactgacatgggacagaggaatggaactggtcagacatctagaatttactgtcagcgccggcgttaaagtttacttctgcgatcctcagagtccttggcagcggggaacaaatgagaacacaaatgggctaattcggcagtacttgaaccgccccggaaatcctggagactaa

SEQ ID NO: 18130 - DNA, 228 bp, Escherichia coli; identical to SEQ ID NO: 4959

SEQ ID NO: 18131 - DNA, 549 bp, Escherichia coli
atgaaggttaataaaaagaggcttgccgaaattttcaacgtggacccgcggacgattgaacgctggcagtctcagggactcccttgcgcctccaaaggtagtaagggcattgaatctgtatttgatactgccatggcaattcagtggtatgcgcagagggaaactgatatcgaaaacgaaaagctccgcaaagaactggccgatttgcgtgcggcagcggagtcagatttacaacccggcaccattgactatgaacgctaccggctcacaaaagcgcaggcagatgcgcaggaactgaaaaatgcccgtgaagacggagtggtgctggaaactgaactgtttaccttcattctgcaacgtgtggcacaggagatttcggggatacttgtgcgtgtgccgttgacattacagcgtaaatatccggacatttcaccatcacaccttgatgtggtgaaaactgaaatcgcgaaagcctccaatgttgcagctaaggccggtgaaaacgtgggcgggtggatcgatgatttcagacgcgcagaaggcagctaa

SEQ ID NO: 18132 - DNA, 531 bp, Escherichia coli
atgttataccgagatcttttgcctattttctcagaaagacccatatttaaagctcctgaggctgaaagaatacttcgtgagcaatattctatcgccgcccccactcctgtaattcaggagatttattatggattggcaggttatgacagatttcaggagctttatggggatcttaatattgaccaaatcgaatggaaattgattgaacttcccactaaaaattttttaactatcggggataatgctacttaccctgattttttgcatgaggtcgttgaagatttcacaacccgtaaaggcgatgtatttatggatgatgaaataaaagcgcattggtgtaattttggcacatggtgtgaacctccattttttatagatcgagctttgctgaaaagtaatacaacagggcttcatttaatggaagggcatacaagagttggaaccctgttaggggcagttaagtataacttcgttaagcttgctaatactcataaaatttattatgcgcaagcaaaagaatgtattaaataa

SEQ ID NO: 18133 - DNA, 1062 bp, Escherichia coli
atgaaaaacactgtaaaaataaacagtattgatttaatcaacgctgattgcctgcattttattcagtccctgcctgatgattccattgacctgattgttaccgatccgccttacttcaaggtgaaacccaacggttgggacaatcagtggaaaggggacgaagattaccttaagtggctggaccactgtctggcccagttctggcgggtgttgaaacctgccggaagcctttacctgttctgtgggcatcgcctggcatctgatattgagatcatgatgcgtgaacgtttcaacgtgcttaaccatatcatctgggcgaagccgtccggacgttggaatgggtgtaataaagaaagtctgcgcgcatattttcctgccacagagcgcgttctgtttgctgaacattaccgggggccatatcgcggcaaaagtgacggctatgtggcaaaagaaagggaactcaaacagcacataatggcaccgctgatatcgtatttcagggatgctcgtgccgaactgggtataacggcaaaacaaattgccgaagccacaggtaagaaaaatatggtttcccactggtttggtgccagtcagtggcagttgccgaatgaggctgactaccggaagttacaggcactgttttcccgtatagcggcagagaagtttcaggaacaacaactggaacaaccacaccaccagttggtggcatcttatgattcactgaatcgcaaatattctgaattgctggatgagtttaaatctctccggcgctatttctccgtatcagtctccgtgccttataccgatgtctggatgcataaacccgttcagttctacccgggtaaacatccgtgtgagaaaccggcggatatgctcaggcaaataatcaatgccagtagtcgacccggcgatctggttgctgatttctttatgggatccggttccacaataaaagcagcaatggcgctggggcgtcgggcgttaggtgttgagcttgagacagagcggtttaatcagaccatccaggaaatcagtatgttatcagcaaatacaattttgtga

SEQ ID NO: 18134 - DNA, 195 bp, Escherichia coli
atgatgcatggtgccgggtgcctcccggtgagtccggcatcagcatacgaacccgcgattatcccagaactgactgctgattcgccccgccgcttagggggattcaccatgcgtttttttatttacaaactcttcgccagacaaacaaccattaactggctgaattgtgaggtatttcaatttttagaaaactga

SEQ ID NO: 18135 - DNA, 1086 bp, Escherichia coli
atgattaatgaacgtactgaagcgacagatggggtagcagatatgatttccaccaatacaaaatatttagtatggaacaacaaaggtggtgtaggaaaaacttttcttacatataatcttgccgttgagtttgctatatctcatccggatcaagatgttgtggttattgactcatgccctcaatcaaacgtttcagaaattattcttggtggcaatggtaccggggaagaaaatctaaataaattgcgagacagaaatgttacaatcgcaggttatatcaaggagcgttttagcaaatctcctttgtctcgtttaggaaatgaatcttcttactttgtacgagcccatgatgttaatacaaaaatgccagagaacttatatattcttcctggtgatgtcgatcttgatatctgttcacgcttaatatctcacattggctcatccccagtaaaagaagcatggaagaaaagccgatctttgctggtagatctaatagcatcttttgaagccgataaaaacatttctgacagagcaaaaacattttttattgattgtaatccaagttttgccagctacacagaattgggagtagtcgcggcaaatagaataattatcccttgcactgccgatgctgcatcaattcgcggaataaaaaaccttgttaaacttatttatggagtgtctattgacaagtcagaacaagatgaaatgttcttagatttcaacaaagaagcaaagcaaaaccttatcgaactacctgaactacaccttttcgtacaaaaccgctcaagaactaatgaaagtgatgcagcaaaagcattcaaatcacatgcagaagagatcaaaagaatcacggatgacctgttaaatacacatcctcatctgttcacaaatgtggctactttcgagagagttcaaaatgtcaaagatggtaatactcttgcagcaataataaaccatgagggatgccctttaagtaggctgcagcataagagttacactatctatggtatggcgacccaagctaatagagcacaaattgaagcactagaatctgatgtttcaacagtagtcaagtgtctgtaa

SEQ ID NO: 18136 - DNA, 690 bp, Escherichia coli
atggattataaaaataagttagttgatgcatcaccaaaattaaacaaccctcaactattggctataatatacttaataccttttggatacttgattgtagaaaacccattatggctagaaaatatatacattgccgctccaattttcctatcatctatagctttattaaccagtgtatacataggatatcgtgatttattaaataaagtatttaataatgcagtagttaaatggggcgtaactggctttacatattccgtatgcttatggatcgcaaagtttaagcttgacatagcttatggtatagtcccagaaaaccttaattactcgacattagcttatgctttcatgctctcatttccaataggggcaatgatttgtgcaattacagtctatatatacatatttttgcgagatgtatccccagcaaaaatagtaatatcctctatgatttcagtatatattggaagcttggctcaacatcatatacaggtgaacaatcttcctgaaaaaataatattaataggacttataattatggtcccctataacatggtcaatttagctagttcattagttattaaaaggaaatttaattttaatcgtttagtatcaggcttatccctttttgctgtgtcagttgctctttttattattagcatgacagcggtaatgactccaacttattga

SEQ ID NO: 18137 - DNA, 774 bp, Escherichia coli
gtgaaagaaagcaatcaacgatggtgctctgacgggttcgagttccgctgtgataacggagaaaaactgcgagtcacgttcgcgctggactgctgtgaccgtgaggcactgtactgggcggtcactacgggcggcttcgacagtgaaacagtacaggacgtcatgccaggagcggtggaacgccgcttcggcaacgagcttccggcgtctccagtagagtggctgacggataatggttcatgctaccgggctaatgaaacacggcagtttgcccggatgttggggcttgaaccgaagaacacagagttgagtgcgtctatcctggaggacgttgctgttgtgcctcacaaagccgttctggtgcagggaactattcgtgataatattctgtatggaaccgatgacattcttcccgatgatgaactgttttgcatcctgaattcattagggttaattaaagaggactgcggagaacatttccttgctttcctagaccgggatattaatcctctgggtagtggtttgagtggtggagagatccagcgattatgcatagcccgcgccctagcccgtaagaaaaagattatcgtacttgatgaacccacggcctctattggcgaagaactcgcgataaagatcattacctatatccggcagcattgccctaccgttattattacaactcataatccacgaattctggagctcgccgatcatttttttgatggtatgtcaaagtcttgcgtcattgctggagaaggcagagaccaataa

SEQ ID NO: 18138 - DNA, 828 bp, Escherichia coli
atgatgcaatctgcaggcattgtcgttaatgatgttactgtcacctggcgtaacgggcacacagcactgcgcgatgcatccttcacagtaccaggcggatctattgccgctctggttggggtaaacggttccggaaaatcgacgttgtttaaagcgattatgggatttgtgcgtctgaccagcgggaagatatctgttctgggtattcccacacgacaggcgctacagaaaaacctggttgcctacgtccctcagtccgaagaggttgactggtcatttcctgtactggtggaagatgtggtgatgatgggccgctatgggcatatgggtatgttgcgtatcgccaaaaagagggatcgtcagattgtcaccgatgcgctggaacgtgtcgatatggtggattttcgccatcgacaaatcggcgagctttccggtggacaaaagaaacgcgtctttctggcgagagcgattgcacagcagggtgatgtgatcctgctggatgaaccttttaccggcgttgatgtgaaaaccgaagcgaaaatcatcagcctgttgagggagttacgcgcggaaggcaaaacgatgcttgtctcaacgcacaatctcggatccgtcacgacattttgcgattatacggtcatggtcaaaggcaccgtcctggcaagcgggccgacagacaccacttttacagccgagaacctggagctggcttttagcggcgtactgcgccatgtcacacttaacggctcggaagaaagcattattactgacgatgaacgcccttttgtggcacatcgaccgtcagcggtgcagagggaagaaagatga

SEQ ID NO: 18139 - DNA, 372 bp, Escherichia coli
atgcgtgatattcaaatggttcttgaacgttggggggcatgggtggcaaataatcacgaggatgttacctggtcgtctattgctgcaggatttaaaggactaatcccttcaaaagtaagatcccgcccgcaatgttgtgacgatgacgcgatgatcatttgtgggtgcatggctcgcctgaaaaagaacaacagcgatttgcacgatttattagtggattattatgtaggtggtatgacatttatggcactggcgcggaagcatggatgctctgatacctgtataggaaagagactccagaaagctgagggggttgtagatggcatgctgatgctgctgggggggaagcttgagatggattggtatatttaa

SEQ ID NO: 18140 - DNA, 408 bp, Escherichia coli
atgttcaggctccttcttgttgctctttgtttttctctgagttttaatgccagcgctgacagtgaatggacggggtccaaaaaagatggcatgtattcagaagttgtaattcaggatatccatacaggaatggttgactcaaaaccatatttttgtattaaggctgttaaaacggaagtaaatctctcagcatgtctggtttctgggtattcaatatggtctccggcatttgatactttttataatcaggctatgtattattattccactgggcagagagtcagggtatattatgaaccaaatatctggaaacatgaggagttttctaaaataacaacaaatgctatagctggtttctcaacctgctttaaggaagatcaatgctttggtccagagcgcaagcgttaa

SEQ ID NO: 18141 - DNA, 732 bp, Escherichia coli
atgaaaacttttatatttttcatatttacgcttctttcatttaatacagatgcagtacagtttgtgtatcgtgttgattcccgaccaccggacgttgtattcagagaaggatttcgatcacacggagctaaccgcaatttacagcaacatgtaagaggagattcatgtgctgcagggtctagggatagcgcctttattgcaacaactgcagacataaatgagacttatagtatagcaaggcaatatttctccagttctacatttcatggtaacttatatcgctacaggatcagagcgaatcatgagttttattcgcttgagccatctgttcagttactgagaggacgtggagtaacatttagcagatttgaagatataatgatgagggagcaaagtgaaatcgttgccgacggttttattccgactgagaatatagctgaagctattcaattacgttacgatcgaacctctggtgttgtcagtgatggctcaggtaccagtaatcccagatatctaaatatttctactgactcgaatcctggcgttattcctaatattcctgttcctcaggtgagtgtacgagcacgtattaatgcatttggttcactcctgacagcatgtttttcactaagaggcactcgtgatggtggtgtgtacagaagcagtaattattatgaggagttttatgatgccagaccattattgaaagtactattggtcaacggatcatga

SEQ ID NO: 18142 - DNA, 279 bp, Escherichia coli; identical to SEQ ID NO: 4909

SEQ ID NO: 18143 - DNA, 597 bp, Escherichia coli
gtgaacaatattatacctggtgattttctggtgtcatttattcaagattttgaacggcaattcacatcaacaacactgacggtagatattgaagtatacaacggctgctgggatgcgctgtacagtaaacgtgctgatctggtctacggtgctcctcatgcagtaccaagcagtgaaggcatcattagcgaaccggtcggacaaatagaatgggattttgtcgtcagcccacttcatccactggcagtgaagcggaatccattagaaaacagtgaattgcgtcattatcctgcggtttgtatccgggatacctccgttaacttccccccaatgcaagcctggttgttggaaggacaaaaacctatttttgttcctgacttcgccatggcaatcagcttaatagaacaaaacgtcggtattggttatattccacatcatctggcattgccgttattgaacagaggtaaattgcttaaaaagccaatgcgcgaacataaacacgccaccaagttatttcttgccgctcattccgatggtataggaaaagcctgtctgtggtgcatgtcgtatttaagaaataagcaattcatggcgtaa

SEQ ID NO: 18144 - DNA, 390 bp, Escherichia coli
atgataaaacaaaaggtatttttctcaggtactgtactagctatttttttatctctcagcaacgtatctttggcttccggcctggataaaaacatgcagtctcttgccaaaagtatgagtattctacaatcttccaatgataaatcatcactattaaatgctcttgaaatgatggataaatctgtagattcttctatgaatattattcctgaaaagatagatgttaatgataaagtttctgtagataattataaggaagagttaaaaaaactacaacatgaaatcaatattgcaaaaaagaaagttgaggacgggaatatagaatcattacgtgagtctctggataaaatgaacgatataaaacttgaaggtcaccgaaaattcagatga

SEQ ID NO: 18145 - DNA, 225 bp, Escherichia coli
atgactagtctaaaaactagtattaagactatcacttatttaagtgatattggttgtctggagattcagggggccagtctagcagattatggtgcgcagttatacaacagcagtaatgaggagtctactatttctcttgttatgccagatgcaattgaatggaacggaaagaatacgccaagacggcaatacatgataaaatatattgccgtatttaaatattaa

SEQ ID NO: 18146 - DNA, 1071 bp, Escherichia coli
atggctaacgcctggctcagattatggcatgacatgccaaatgaccctaagtggcgaacaattgccagggtgtcagggcagccaattgcaacagtgatggcagtgtatatccacctcctggtgagcgcgtcacgaaatgtcacgcgaggtcacattgatgtcacgacagaagatttggcaagtgcgctcgacgtgacagaagaggtaattgattcaattttgcagacgatgcaggggcgggtacttgatggtgatttaatcactggatgggaaaaacgccaggtgcttaaagaggacaacggcaatatttcgcaaaccgcaaaatctcctgcagagcgcaagagggcgcagcgagagagggaaagaaagcgggaacaaaatggcgattgtcacggcgcgtcacgaaatgtcacgcacatgtcacgacgagtcacgacagataaagatacagataaagatacagatcaagaagatcaaaacactatggtccatggcgtaaaaaacgccacgaaccaggcaggggatgttcagaccgtcaatcttggtcagccagcaggcacgacaccggaagccgattcagcgtatgcgctgaaagccgattcgggcgctgtgcagcaggtgatgaccgcaaggccggagcaatcacaccaactgcagcagcccgaagccgattccgccattcagcgggaagccgatcgggtagtcccggaaaacaccgggcagtctgtgggacgagtggattatccggatgtgttcgaacaggtctggcgggagtacccgttgcgtgctggggcaaacccgaagaaatccgctttcagtgcctggaaggctagattacgcgagggggtgccaccagaggccatgctggatggcgtgaggcgttacgcaagatacttggcggctaccgggaaaacgggaacggaatttgttcagcgagcgacgacgttttttggaccggaccggaattttgagaacccctggttgctcccggtaagcggcacgaacaaccagcgttgtgtgaatcatatttctgaaccggataacgaaattccgccgggcttcagggggtaa

SEQ ID NO: 18147 - DNA, 507 bp, Escherichia coli
atggaaaagttttcattggagttcaaaaaggtagtatcagaaaagtacctggagggagagttgagtctgaaatctgtagcaaggatgtacggtatcagtccctgcacagtaagaaaatgggcttatgcctatcgggaacatgggataagcatacttacgggtaaaaaaggacgctattctgctgagttaaaactcacagtagtaaaagaagtcgtggatgactgtttttctgttcgtgaagtagcggtaaaacacggaataccagcctttggtactgtatgcaactggcttgaaaaatatagaaaatatggcgaagatgctttcattcgaaaaaataaaaagagtattcctgtgccggataaaagcgccatttcagcaccaccactaccaacattaaccaaagatgagagagaagaacttgaacaactcagggtcgagaatgcctacttaaaaaagctgaaagccttggttcagcagaaaacatgctcaacgttcaggaaaaagtga

SEQ ID NO: 18148 - DNA, 864 bp, Escherichia coli
atgctcaacgttcaggaaaaagtgagcattgtgaatgaactaaggcaggaatggccattgtcccgattgttaattgtttccgggctgccccggagtacattttactatcatgtcagacggcttgctgctcctgaccggtatcagtctgccagagcgcttgtgctgaaaatttatcaccagcacaaaggccgctatggttacagacgcatcaggctggcatgtcgtaacgagggggttttacttaatggtaaaaccgtcagaaaactgatgaaggaactgggtattagcagcctgatccgcgttaaaaaataccgttcatataaaggagaacaaggacgaatttgcgataatctcctgaaacgcaattttgatgcaaaacgccccaacgagaagtgggttacagatgtcactgaatttaaagtgaatggcaagaagctgtatttgtcgcccatcatggatctttataatggagaaataatttcctataacctcgccactcgccctcaaccttcaatggtgcagactatgcttacggatgcgctgaaacagctgtcgaaagatgaacaccccatactgcacagcgatcaaggttggcaatatcagatgtcccggtggcaacgatggttaaaggatagcggtatagtccagagtatgtctcgccggggaaattgtcttgataatgcagttatagagagcttttttggaacattgaaatcagaatgttattacctcaatgaatataaaaatgtggaggacttaaagcgagacatcattgattacataaactattataatcaattgaggataaaggaaaaacttggcggtcttagcccggtacaatatcgattgagtcaggctgcataa

SEQ ID NO: 18149 - DNA, 261 bp, Escherichia coli
atgcaatcaccattacggaatgtgcgtaaggcgcacggatttactttgcagcatgttgctgctggcgttcaggtcaatccagcgacgctgagtcgtattgaaagactggaacaaattccatctatcgatcttgcagaacgtctggccaatttttttaagggtgaaatcagcgaaatgcagattctttatccggcacgttttcaatctagccaaaaccagaatgggtttaaaccacaggaacaggaggtaagccgtgggtaa

SEQ ID NO: 18150 - DNA, 648 bp, Escherichia coli
atgaaaatcgccgatctcgctgaagcaataggagtggatgcggcgaatatctcacgcctggaaacaggtaagcagaaacaattcactgaacaagccctgagtaatattgccaggagcttaggtgttgatattgctgatctctttacctcagacgtcaaaagtaatactgtatgtaaaaacagtattagtgaggatgttgcgcaggtgaaggatgtattccgtattgaaatgctggatgtcagtgccagtgcgggaaatggccttatccagggcggtgatgtcattgatgtgattcatgccattgaatacagaactgataatgctgtatcgatgtttggcggacggccagccaatcacattaaagttatcaacgttcgtggggacagtatgtgtccaaccattgagccaggagatctcatcttcgttgatgtcagtatcaatcagtttgatggagatggtatctatgtatttggttttgatgataaaatttatgtcaaacgactgcaaatgatacctgacaaactactggtgatttctgataaccagatttaccgtgaatggggaattaccagcgaaaatgaacaccggtttatggtctttggaaaggtcttaatcagccagtcacaaacccttaagcgacacaattaa

SEQ ID NO: 18151 - DNA, 501 bp, Escherichia coli
atggaggacgccgggcgtggttggcggcgtacagttccctctcctgcaccactggaaattattgagcacgacaccatcgctcacctggtgcgccagggatatctggttattgcctgcggcggcggcggtattccggtggtgcgagacgggcaacaactgaaaggtgtagaagccgtgatcgataaagatctggcctccgcgctgctcgccagtcagttaggcgcagatctgctggtgatccccaccggtgtagaaaaagtagcgattaactttggtacaccacaacaacagtggctcgacgctatcagcgttgccgaagcgcaaacgctgttgcgggaaggtcagtttggtgtcggcagtatgcaacccaaagtggaagccattgttgatttcatcaatgccagccagcaacaaggcaaacaggccagcggcctgattacttcaccgcaaaccataaaagcagccctggcgcatcagagcggtacatggataaccctttaa

SEQ ID NO: 18152 - DNA, 390 bp, Escherichia coli
atgactacaacacttttagccgttaacggaacgctgatgcgcggtctggaactcaacccaaatatgcaaaaagctggcggtatttttgtccgtgaagaccgaactgacgcccattaccggttatggagtattaatgatcgtcatcccggaatgatccgcgtgaatgaaggaggagcacacgtagacgtagaaatctggcaactgcctctggccagttttgccgaactgttaatgaacgaacccgaaggcctgaccattggaaaaatcaaacttgccgatggtagcgaagtactgggcgtactggcagaaagctggctgactgaaggccagaaggagattacagcactggggggctggcgcaaatacaccgggaattttcacacgatgtaa

SEQ ID NO: 18153 - DNA, 666 bp, Escherichia coli; identical to SEQ ID NO: 8112

SEQ ID NO: 18154 - DNA, 153 bp, Escherichia coli
atggatactatcgagcttggcaacaacgaatctctggtatgtggagtattccccaacctggacggaacgtttaccgcgatgacgtataccagaagcaaaacgtttaaaacggaagctggcgcgcgtcgctggttaaccagaaacactgactga

SEQ ID NO: 18155 - DNA, 375 bp, Escherichia coli; identical to SEQ ID NO: 8932

SEQ ID NO: 18156 - DNA, 165 bp, Escherichia coli
atgtaccgaatgaccaaacatattggcggtaacggcaatccagccgaacagacttatcgccatcaaaatgttaatggcgatggcccctttttcgccaaacgaatatttcacaatgccatacgttggcaggcgggctttttctcccacgctaatggtgatggctga

SEQ ID NO: 18157 - DNA, 165 bp, Escherichia coli; identical to SEQ ID NO: 4946

SEQ ID NO: 18158 - DNA, 468 bp, Escherichia coli
atggttattcatacccgtgaaggccatcgtgaagacttaagcgactgcccatcagccaaactgacgcgcggcggaaaaacctttattggtgaaccaggaccgatgggacgcattctggtcaggggtgaagcaggtcatgacatcattcctgaactgtatccggtgacaggcgaacctgtgattgataaacccggtaaaggcgctttttatcaaaccgacttacatctgattttgcaaaagcgtggtatcaagacacttattgtttgtggcgtgactaccgaagtttgcgtaaccaccaccgtgcgtgaagcaaatgaccgtggctatgaatgcatcataccggaagattgcgttggctcctatttcccggaattccagaaatacgcccttgagatgatcaaagcacaaggtgccattttcggttgggttactgattccaaagccattattgcaggtctggaaggctaa

SEQ ID NO: 18159 - DNA, 330 bp, Escherichia coli; identical to SEQ ID NO: 5350

SEQ ID NO: 18160 - DNA, 330 bp, Escherichia coli
atgaagaccttccgctggaaagtgaaacccggtatggatgtggcttcggtcccttctgtaagaaaggtgcgctttggtgatggctattctcagcgagcgcctgccgggctgaatgccaacctgaaaacgtacagcgtgacgctttctgtcccccgtgaggaggccacggtactggagtcgtttctggaagagcacgggggctggaaatcctttctgtggacgccgccttatgagtggcggcagataaaggtgacctgcgcaaaatggtcgtcgcgggtcagtatgttgcgtgttgagttcagcgcagagtttgaacaggtggtgaactga

SEQ ID NO: 18161 - DNA, 543 bp, Escherichia coli
gtgaaagaaagtaatcaacgatggtgctctgacgggttcgagttccgctgtgataacggagaaaaactgcgagtcacgttcgcgctggactgctgtgaccgtgaggcactgtactgggcggtcactacgggcggcttcgacagtgaaacagtacaggacgtcatgccaggagcggtggaacgccgcttcggcaacgagcttccggcgtctccagtagagtggctgacggataatggttcatgctaccgggctaatgaaacacggcagtttgcccggatgttggggcttgaaccgaagagcacggcggtgcggagtccggagagtaacggcatagcagagagcttcgtgaaaacgataaagcgtgactacatcagtgtcatgcccaaaccagacgggttaacggcagcaaagaaccttgcagaggcgttcgagcattataacgaatggcatccgcatagtgcactgggttatcgctcgccacgggaatatctacggcagcaagccagtaatgggttaagtgataacaggtgtctggaaatatag

SEQ ID NO: 18162 - DNA, 189 bp, Escherichia coli; identical to SEQ ID NO: 4945

SEQ ID NO: 18163 - DNA, 192 bp, Escherichia coli; identical to SEQ ID NO: 4944

SEQ ID NO: 18164 - DNA, 258 bp, Escherichia coli
atgcttatcgacctgatggctgcaatgtcgcataaagactggctgagtcgtcgtcaacgacaaaaacagggaattgaacgtgcccatactttaggtaagtatcggggcaaacaggcagatcgggaacgacatcagaaagtaatgtactaccggcagatcaagaaactgagcatccgtgaaacggcagaggtgacaggctatagtacttcccaagtttgtcgcattcaggcgctctataaagaggttaaacctgattaa

SEQ ID NO: 18165 - DNA, 198 bp, Escherichia coli
ttgtttcctccggataaccggatccgcgatctggacaactataacaaggcgctgtttgacgcgttgacccacgcgggtgtgtgggaagacgacagacaggtgaaaagaatgctggtggagtggggaccggttatcccgaaagggaaggtcgagatcaccatcagtaagtacgagaaaacggcgggtgcagccgcctga

SEQ ID NO: 18166 - DNA, 291 bp, Escherichia coli
atggcgtggtttattccgtttctgctgttcctgggtatcgccacgccacccgttgccggaatttatatcgctgactttttcctttatcgccgtaatggctatcaagagtcggtgttaactcaggagtcacaggttaaagtactgacattcgctgcatggatcacaggcacagcggttggctttatgaccgtaaaaggcttattcaccctgacgacgatcccttcagttgactccattctggtggcatgtatcgcgtatgcgattctcagtcgggcaagtcaacaccgctaa

SEQ ID NO: 18167 - DNA, 240 bp, Escherichia coli
atggtccggcacccggatatccaccaggcccagtgcctgtaccagacgttcggtgataagccggtctgccttactgggtgtgacttcaccggacgggtgattgtgtgccagcaccacggctgcggcattgtgatacagggcgcatttaatcacttcccggggatggacttccgtgcggttgatggtgccggtgaagagggtttcaccggcaatcagctgattctggttattcagatatag

SEQ ID NO: 18168 - DNA, 291 bp, Escherichia coli; identical to SEQ ID NO: 5027

SEQ ID NO: 18169 - DNA, 207 bp, Escherichia coli; identical to SEQ ID NO: 5245

SEQ ID NO: 18170 - DNA, 375 bp, Escherichia coli; identical to SEQ ID NO: 4955

SEQ ID NO: 18171 - DNA, 822 bp, Escherichia coli
atgaaactggaagatttaccgaaatactactccccaaaatcccctggcctgaccgatgcatcggcctcaacgtcaaaagatgcgctgagtatcactgatgtgatggccgcgcagggcatgacacagaatcgggctgagatggggttttctgcgttcctggggaaaatgggcatcagtatgaatgacagggcgcgggcaacagaattactggcagattatgcactcagtcggtgcgatcgtgtggcggcgttgagaaaacttccggcagaaataaaaccggtagtgatgcgcattatggcttcgtatgcgtttgaagattatacccgtagcgcggcgagcaaaaaacagtgcccctgctgtcacggaaaaaaatttattgaaagcgaggtttttacaaacaagatccagtatccggatggtaagccaccagtgtgggcaaagtgcacaaaaggcgtgtatccgtcttactgggaagaatggaaaaaagtcagggaggtggtaaaagttgcctgtccggagtgtggcggaaagggtgaggtttccaccgcctgtaaggattgccgtgggcgtggtgtcgccattcatcgtgaagagtcggtaaaacgtggtatgcctgttatcagagattgccagcgttgtggtggtcgtggctgtgaaaggctgccatcaacggaggcatttaatgccatatgcaaagtgacgagtgctatcacgcttgatacgtggaaaaaatcagtgaaacgcttttacgatacgttggtggttcggtttgacattgaagaggcatgggcggagcggcagttaaagagggtaacgcgatag

SEQ ID NO: 18172 - DNA, 333 bp, Escherichia coli; identical to SEQ ID NO: 5315

SEQ ID NO: 18173 - DNA, 807 bp, Escherichia coli; identical to SEQ ID NO: 9304

SEQ ID NO: 18174 - DNA, 489 bp, Escherichia coli
atggtccggcacccggatatccaccaggcccagtgcctgtaccagacgttccgtgataaggcggtctgccttactgggtgtgacttcaccggacgggtgattgtgtgccagcaccacggcagcggcattgtgatacagggcgcatttaatcacttcccggggatggacttccgtgcggttgatggtgccggtgaagagggtttcaccggcaatcagctgattctggttgttcagatacagcacccggaactcttcacgctccagtcccgccatgttcagaatcagccattcccgtgccgcacgggtggaggtgaaggccacgccgggttcatgaagatggcggtccagagttttcagggcccgctgaatgaggctgcgctcgccgggcgttatttctccgggcagaaaggaaatctgttgcattgttccggcccctttcagtcgatgatgcgcataatggcgctgcattccggatgctgcagggcgtaa

SEQ ID NO: 18175 - DNA, 351 bp, Escherichia coli; identical to SEQ ID NO: 9336

SEQ ID NO: 18176 - DNA, 222 bp, Escherichia coli; identical to SEQ ID NO: 7163

SEQ ID NO: 18177 - DNA, 1041 bp, Escherichia coli; identical to SEQ ID NO: 4759

SEQ ID NO: 18178 - DNA, 1269 bp, Escherichia coli
atgtttgccctctgtgatgtaaacgcgttttatgccagctgtgagacggtgtttcgccctgatttatggggtaaaccggtggttgtgctatcgaataatgacggttgcgttatcgcccgaaacgctgaggcaaaggcgctgggcgttaaaatgggcgatccctggttcaaacaaaaagatctgtttcgtcgctgtggcgtggtttgctttagcagcaattatgagctttacgcagacatgagtaatcgggtgatgtcgacgctggaagaactatcgccccgcgtcgagatttacagtattgatgaggcattctgcgatctgacaggtgtgcataattgtcgcgatctgactgattttggcagagaaatttgcgcaacggtgctacaacgtacccatcttactgttggtgtggggatcgcccagaccaaaacgctggctaagcttgccaatcatgcggcaaaaaaatggcagcggcagacgggcggggtggtggatttatcaaatctggaacgccagcgtaaattaatgtctgctctccccgtggatgaagtctgggggattggacggcggatcagcaaaaaactggacgcgatggggatcaaaaccgttctcgatttggcggattcagatatccggtttatccgtaaacattttaatgtcgtgctcgaaagaacggtgcgtgaactgcgcggtgaaccctgtttgcaactggaagagtttgcaccgacgaagcaggaaattatctgttcccgctcgtttggtgaacgcatcacggattatccgtcgatgcggcaggccatttgtagttacgctgcccgggcggcggaaaaacttcgcagcgagcatcaatattgtcggtttatctccacgtttattaagacgtcaccatttgcgttcaatgaaccttattacggcaatagcgcatcggtaaaactgctgacgcccactcaggacagcagggatatcattaacgccgctacgcgatctctggatgccatctggcaagcgggccattgctaccaaaaagcgggcgtgatgctgggggatttcttcagtcagggagtcgcgcagctcaatttattcgatgacaacgcaccgcgccccgggagtgagcaattgatggcggtaatggatacgctgaatgctaaagagggcagaggaacactctattttgccgggcaggggatccagcaacaatggcagatgaagcgtgccatgctttcaccatgttatacaacgcgaagttctgatttactgcgggtcaaataa

SEQ ID NO: 18179 - DNA, 171 bp, Escherichia coli; identical to SEQ ID NO: 12692

SEQ ID NO: 18180 - DNA, 654 bp, Escherichia coli
atgtccgttaatgaatcagaagagaggttgcttaactccacaaagaaaacatttctgtcaatgtggtctcacagcaatattttctataagaaaggaaaggaaaggaaaggaaaggaattttgcgatgtaatggtcgtctttggcaatgatgtaatcatcatgtcagataaacttattaattataatattgaaattgacgaaaaaatcgcatggaatagatggtataaaagtgctatcgaaagcagcataaaacagctaaatggtgcatataaccatataaactcatatcccgacaatctatatactgatgctcaagcaacagagccattctcaatggaattaccacattcggatgaaatatgcattcatttaattgctatcgcaaatggttgctctaacgcatgctatagaaaatacggtcgctatggattaaatattgatacagcatgtaccggaaaagacaccttatttactataggtatacccacaagaaaattcgtccatatattcaatgatagcagtctagataaaatatttacatgtttagatacaaccagagatttcattgattacattcaagctagggaaaacttacttacaacttcagataagtacattaaaatatactcaataaacctcaagatgcgggtgtga

SEQ ID NO: 18181 - DNA, 1173 bp, Escherichia coli; identical to SEQ ID NO: 8889

SEQ ID NO: 18182 - DNA, 1221 bp, Escherichia coli; identical to SEQ ID NO: 5756

SEQ ID NO: 18183 - DNA, 519 bp, Escherichia coli; identical to SEQ ID NO: 5755

SEQ ID NO: 18184 - DNA, 513 bp, Escherichia coli
atgtaccgcgtactcaaaaaagacgcgttaatggtgagcttctatggctggaatcgcgtcgatcgttttatgtctgcctggaaaaatgcgggattcagcgttgttggtcacctggtcttcaccaaaaactacacatcgaaggccgcatatgtgggctatcgccacgaatgtgcctacatcctggcaaaaggccgtccacgtctgccacaaaacccgctgccggacgtgctgggctggaaatattcgggcaatcgccatcacccgacggaaaagcccgttaccagcctgcaaccgctgattgagagcttcacacacccgaacgcaattgtgctggacccgtttgcaggcagcggctcaacctgtgtggccgccctccagtccggacgccggtatatcggtatcgagctgcttgaacagtatcaccgtgccggacagcaacgactggccgccgtgcaacgggccatgcagcagggggccgcgaatgataactggtttgaaccggaggctgcgtaa

SEQ ID NO: 18185 - DNA, 348 bp, Escherichia coli
atggtgacgaaaaccatcactgaacagcgtgcggaagtacgtatttttgccggtaatgatccggctcataccgccacaggcagcagcgggatttcttctgcaacaccggctctgacgcccctgatgctggatgaagccaccgggaaactggtggtctgggacggacagaaagccggtagtgcggttggcatactggtactgccgcttgaaggcacagagacggcgctgacgtattacaagtcgggaacctttgcgacggaggcaatccactggcctgaaagtgtggatgaacacaaaaaggccaacgcctttgctggcagtgccctgagtcacgcggcgctgccgtaa

SEQ ID NO: 18186 - DNA, 477 bp, Escherichia coli
atgcaacagatttcctttctgcccggagaaatgacgcccggtgagcgcagcctcattcaacgggccctgaaaaccctggaccgccatcttcatgaacccggcgtggccttcacctccacccgtgcggcacgagaatggctgattctgaacatggcgggactggagcgggaagagttccgggtgctgtatctgaacaaccagaatcagctgattgccggtgaaaccctcttcaccggcaccatcaaccgcacggaagtccatccccgggaagtgattaaacgcgccctgtatcacaatgccgctgctgtggtgctggcacacaatcacccgtccggtgaagtcacacccagcaaggcagaccgccttatcacggaacgtctggtacaggcactgggcctggtggatatccgggtgccggaccatctgatagtcggtggcagccaggttttctcctttgcggaacacggtctgctttaa

SEQ ID NO: 18187 - DNA, 162 bp, Escherichia coli
atgaaacaactggagttaatgctcaccagtggtgaactcagcccccgctatcagcataccgtcacgctgtatgcgaaaggactgacctgcgaagccgataccctgggctcctgtggttacgtttatctggctgtttatccgacgcccgaaatgaaaaattaa

SEQ ID NO: 18188 - DNA, 1242 bp, Escherichia coli
atgattaaatcaaattacatatgctttcttttgcttttttttattggtttaactattcttcatttaaatcaatatacactagtatcagatgacatttggttttccgagaaatcaatatcagaaccggatcacatcaagtggctcatagatagatatttcacatggtcatcacgaacatggattgaatatgcattaataaatcttattaatcatttttatgcttggtctttaattaatgcagcaatgttttcatcattaattattggcatttgctctatctttcagagagaaaacaacctttactataaaataaacacttcaatcatgtcattattactgattgttatgatgccaagcgatgtttttttcaatgccgcgatttggataacaggatcattcaactatctgtggccaagtgctattgcatttattggttattctctacttataaaaaaaatcaatatggaaaaccacgagaaaactcaatctctaatttgctatttgttattttttttatcatcattcaatgaacagatagctgtagtcaatgtattattatgcaccacactgttaattttttgcaaaacaaacaattacaatacaaaaccattattaaatgcgatggggatttcactattagttattatttatattgcaacttgcccaggaaataaagtcaggtattatgcagagatagaacattggtttaaagagtatggtaattttaatataatccaaagatctatgcttggacttaacttatatgcagatatgttattttctgtaaaatcaattatcccagcattactagctttttccagtactattatatgcaagaaaaaaacaaaaatattccctctaatttcttgctgtatcttgatcacactatatattatacatacaccgccagttatttttcaagccatacatttttctgaaagcaatcttttctcgacactctccgtgtttagggtgtcttttgccatgatacttacagcactcattatatttccaaccgtaatatcacttaattttaatgtcacttcaattttcatatccacaatgattattggaaccattgccacaacatctatgttaggattatcaccaagcatatatgcttctggtaatagaatttattttattccatatttgcttcttataacagcaattgttgtttcaaccccaatcgcaataaataacatagtagcaaattttgctaagagccattataaaatttga

SEQ ID NO: 18189 - DNA, 141 bp, Escherichia coli
atgtcgcaaaaatcgcttacagccatcacgttctgcgtgacggtaatcctcatcatctggatgctacacggttcgctgtgtgaaatacggatgagcttctggggagcggagtttgcggcgttcttacagtgtaagcagtaa

SEQ ID NO: 18190 - DNA, 1125 bp, Escherichia coli
gtgaaattaggaagaaatgataagtgctggtgtaattcaggacttaagtataaaaagtgccatcttggtcgagatcgtgaaactccggtatccaaagccgaggcactgaaattttcaaagtctctctcgcagagaaaggcatgttatgcgccagcatccatgcacgaagattgtgataaacgcatcgttcaggcgcatacgatatctaagagcagtagccttaaggcgatcgccgactccagcaatcacgtcatgggggtgataatgaacttagcaagcctgatgagaaacaacggaaaatggcttcccgagaagatcggtatcaatcaggcatccacttttacaggattttgtgcagttcatgacagaatcttattttcatgcctagagaacgaaaaatttacaggcacggacgagcagtgctttgccttaatgtttcgttcattgtctaaagaaatttatgccaaagaagggggagtgctatcttctgattttgctaaaaatgccgataaaggaaagctacaagttgaacagtattatattcagaaattaatcgaccagcaccaaagtggcttaaatgcagcaataattgaattaaataatcttaaaactagcctcgaccgcatcctacttagcaggcaattttcagaaattgaaagtgttatcttcacttttgcagagcctttaccaattgtagtttcgtcaattctttcaccggagagggatttcgatgggaccaaaattcaggatttgagcgatcttacagtgtcggcggaacaagtatgtttcaatgctttttcctgcggaggtaagggatatgtagtgttcagttggctgagaacttcaacaattatcagacgttttatacggacactaattaagatcccagctaacaggatgttcaatacccttctgtattttttcttcacaaaggccgaaaatacatattcatcccctgagtggtgggacaggctcagtgataaacagcgagagaatatcggcaacatgattatgtcaggggttgaattttttggcagacctacatcacaggttgatcattccgttgattataacgccgctgcacttgaagagataacatgcagcaacaacgaaatttgcagctga

SEQ ID NO: 18191 - DNA, 2760 bp, Escherichia coli
atgagcacgaaatttaaaaccgttatcactactgccggagccgcaaagctggcagccgccactgtccccggcgggaaaaaagtaaccctgtctgcaatggccgtgggtgacggtaatggcaaattgccagtgccggatgccggtcagacgaaactggtgcatgaggtctggcgtcacgctctgaataaagtcagcgtggataataagaataaaaactatatcgtggctgaactggttgtaccgcccgaagtgggcggcttctggatgcgtgagcttggtctgtatgacgatgccggaacactgattgcggtatccaatatggcagaaagctataagccagaactggctgaaggctccggacgtgcgcagacctgccgcatggtcattattgtcagtaacgtggcgtccgttgagctgagtattgatgccagcacagtgatggcgacgcaggattacgtcgataacaaaatcgcagaacatgagcagtcccgccgccatcctgacgccacgctgacagaaaaaggttttactcagttaagcagtgcaacaaacagcaccagtgaaaggctggcagcaacgccaaaggcagtaaaagcagcctatgacaatgctgaaaaacgtatgcagaaagaccagaacggtggcgatattccagataaggacgcttttctgggcaatgttggcgttaccagcctgacgtttatgaaaaacaatggcgaaatgccgcttgatgctgatctgaatacatttggtcccgttaaggcttatctggggatctggtctaaagctacctcaactaacgcaacactggagaaaaatttcccggaagataatgctgtcggtgtgcttgaggtttttgctgccggcaattttgcaggtacgcaacgcttcaccacgagagacggcaatgtatacatacgcagactcgccaataagtggaatggctctgatggtccgtggggcatatggcgtcacactcaatcagctacccgccctttgagtacgactatagacctgaatacgcttggagccgccgagcatcttggtttatggcgtaacagtagctcggctatagcttcatatgaacgcaattatccagaggaaggcggctttgctcaggggacgcttgagatcctcgaaggcgggaattatggaagaacgcaacgttataccactcgccgtggaaatatgtacgtccgctgccttgcggcaagctgggatgcatcaaatccgcagtgggaaccgtggttaagagtcggtcatcagtcagagagtcgttattacgacggggatttgaatgatgtgacttcaccaggtatttacagcgttacaggtaaagcgaccaacggtccaatactggacggaaacggcgtgacagtcctcggtattctggaagtgttgaggcgctttgatggtgttaacgtatggcagcgttatacaactgccggaacaggtacaacccttaaaggtcgcacgtttgaacgcgtttttaccggcagctcatggagcgaatggcgggaagtttacacatcttattcacttcccctgaatctgggcatcggtggcgcagtggcaaaactatccagtctggactggcagacctacgattttgtgccgggcagtctgataaccgttcggctggataatatgaccaatattcccgacggtatggactggggcgtcattgatggcaacctgataaacatcgcagttggtccgagtgatgattccggtacggggcgctcaatgcatgtatggcgcagcactgtaagtaaagcgaactaccgattttttatggtgcgtatttcaggaaatccgggaagccgcacgatcacagcaagacgagtaccaatcattgacgaagcccagacatggggcgcgaaacagacattcagtgctggcctttctggtgaactgtccggcaatgcggcgacagcaacaaagctgaaaacagcccgtaaaattaataacgtttcgtttgatggaacatcagatattaacctgacgccgaaaaatattggtgcatttgcctcaggaaaaacaggagacaccgttgcgaatgataaagccgttgggtggaactggagtagcggagcctataacgcaactactggtggggcatcaacgttaattcttcattttaatatcggtgaaggaagttgtcccgccgcccagttccgcgttaattataagaacggcggtattttttatcgttctgctcgtgacggttacggattcgaggctgactggtctgagttttataccacaacgcgaaaacctacagcgggagatgtcggtgcactgccgttatctggtggtcaattgaatggtgctctgggtataggaacatccagtgctcttggcggtaattcgattgttttgggtgataatgacacgggctttaaacaaaatggtgatggtaatctggatgtttatgctaatagcgtccatattatgcgctttgtctcgggaagtattcaaagtaataaaaccataaatattacggggcgtgttaatccctcggattacggtaactttgattcccgctatgtccgggatatccggcttggtggtgctgccacatacaaacctgcgaacaatggcatgacatggacacatcaggcaccgtccgggtgtgtatattccggcattattgttcaggataccggctcaaactctgccgataacattggtggtgtatattacaggccggttcagaaatacattaacgggacatggtataacgtggcgcaggtataa

SEQ ID NO: 18192 - DNA, 351 bp, Escherichia coli
atgaaaaaaaacactaataatccatactccaaatttcgtaatggcgtagaacgccatgtacaccacgtcgctaccagtgcatcacgtagtaacagccgctataacctgaacgagacgcacgcaacaccagatgggcacgctgtaaaacaaatcggcgaacacacctggctgattgagaaagctggaatcgtggttcacagatgcccacacaatccgtttaccggaaaccgcatttttgcattaagcagcggcgataatcagttcgggcaggatttcacattgtacgaagcactacgcacagtcgatcgtctgcttcgcgggcaaagttttattaaacaggctgctttataa

SEQ ID NO: 18193 - DNA, 204 bp, Escherichia coli
atgtcaggtataaccatcaatatcaatgtgaatgccccctatgtatccctgcagaaatatgcagagataacaggtatccctcttaatacatgcaaaaagatgttggctgacggtcgaattattatccgccccaaacgcgccaaaatggaaaagcctgaagtaaaccttgtggcgatgttaaaagacgctttggctaacagctaa

SEQ ID NO: 18194 - DNA, 138 bp, Escherichia coli
atgcgcgccatgttagaggatgagcgttgttctttagctgccatttcatcaatgacggctcgctcctcgagagacagccgaagtgccagtcttggacctgtggcggtgttacgcggaatgcgtgatctggtatcgtga

SEQ ID NO: 18195 - DNA, 405 bp, Escherichia coli
atgaaaaatgatattggtcagcggttgcgtgaggaaagggaaagattgggacttagtcaagttgccatgagcgacattggtggagtcaaaaagctaactcagcttagatatgagaaaggagatagctttcctgatgctgcgtatttggcagcgctgtctcgttttggccttgatgttcagtatgttgtgttgggaattcactcacctgaaacttataacgatgatgagcaggagttgattactcgctttcgagcagcttcgttagatgtgaaaaacgcggtgatcggggctttaaaaggtgcgatcagtgaaaaggaaactcagccatcaggacgtgagttaaatatttctggtggtaataaccgtatcgctggtcgtgactataacgaaactaagggtaggtga

SEQ ID NO: 18196 - DNA, 651 bp, Escherichia coli
atggccgtcaactcaaacggttcaaacaatcgcgttgctgggcgtgattttcacgaaaagaatattcagatagagcgatatgatggttctcataccgtcaatatcgcaatcccttcgaataatgatgatgacgatcgccctttgcttaaggctcagcgtaaggagctaaatagcttggttgctgctattgcagaagctagcaatactgaagcgtttattatttggcaaaaagtacatgcggagattggtgtagctggtattgatgatatgacagtaaatcaatataaaacagcggagagttttctgcatgcaatgcttgagcgatgtaaagatcatgatgcctgtaagactcttgtaagtttattactacgtaacagtgaagactgtggacttcgacaaaaacttctgcggtattgccatatcaatttcggtacaggacgtttaaacgatcttactcgttctcagttacagtctgcattgtcgtggttagagcaacaatcggcatcaagtcacacagagagttcggccttaccagaagttcgacttcgtgcttcagaattaatccgactttatccaaaagaaataatattctttatctgcgtaggggttttggtaggcggtgccatttctagggtgttttttaatttgtaa

SEQ ID NO: 18197 - DNA, 348 bp, Escherichia coli
atgaaagtaaaaaaggttcaactattagttacttttttatctatgttttctttttccgccgtcgcaatgccttttaaaactattgaacgtgagagtttcaatggggtatggccatttaatactgatgaggttcaattacagtgtcttgatggtaatccttatgtgatgaattttgacgataataagttatatgcgcttacaggtttagctcgaataaaaggtaaaacatttggtgcgttaccgttagataacaataatccattttggctagataatgatgccgccccagggttaaaaaagagtctgggggatgtcactaaggctgcatttgatttatgtgataagtaa

SEQ ID NO: 18198 - DNA, 1002 bp, Escherichia coli
atgtcggttcgtaagattccatcaggtaaatggctttgcgaatgttatccctacggggcatcgggaaaacgcattcgtaaacagtttgcgacaaaaagtgaggcgctctcttatgagcgccgtttaatgaatagtagagttggagacgagtttcaagatggttctggtcctcgtctttctgagttgattgctcgttggtttgagatgtacggtaaaaccttgtcctctggtgcagagcgcaaagtcaaacttgaggcgatttgttccaggctgggggatccatttgcttctcagtttgacaaaaatatgtttgctacttatcgggaaagaaggctatcaggagaatggaatcccaaggggaagaaaaaacttagtgaagcaaccgttaatcgcgagcagtcatatctacatgctgtttttgccgaactgaagcgccttggggagtggtctggtgaaaaccccctgactggtattcgcaagtttcgtgaggaagaaaaggaactggcgtttctgtatgtagatgagattgaacgccttctgattgcgtgtgatgagtcacggaataaagatttgggggttgttgtccgtattgggcttgcgactggtgctcggtggagtgaagctgaaggattaaagcaatctcaagtactgcccggtcgaatcacatttgttaaaactaaaggaaagaagaaccgcactgtaccgatttcacctcaattgcaggctatgcttcctcaaaaacgaggagcgctattttcaccatgttatgaggcttttgacgctgcaattaagagagcgaagatcgagcttcctgatgggcaattaactcatgtgctacgtcacacgtttgccagtcattttatgatgcggggcggaaatattcttgtgttgcaaaaaatactggggcatagcgatataaaaatgactatgcgttatgcgcattttgctccaggtcatttagaggctgctgttgaattgaacccttttgacaatagagggtaa

SEQ ID NO: 18199 - DNA, 870 bp, Escherichia coli
atggctacgtataatggcgaatgctggattgaggaacaattaaaaagtattattgaacaaaaagatgtagacatctcaatttttatatcagatgatttatcaactgataatacattaaatatttgtgaagaatttcaagtatcatatccctcaattataaatatacttccaagcgtcaataagtttgggggggcaggtaaaaatttttatagattaattaaagatgtcgatcttgaaaactatgattatatctgttttagtgatcaggacgatatttggtataaagataaaataaaaaatgcaattgactgcttggtatttaataatgcgaattgttattccagcaatgtaattgcatattatccatcagggcaaaaaaatttagttgataaggctcagtcgcaaactcaattcgattatttttttgaagcagcaggtccggggtgtacatatgttataaaaaaagaaacgcttattgaatttaagaagttcatcataaataataaaaatgctgcacaagatatctgtctgcatgattggtttttatattcatttgcgcggacgagaaattattcgtggtatattgatagaaaaccaacaatgctgtacagacagcatgaaaacaaccaagtgggagcaaacattagttttaaagcaaaatacaaacggcttggtttggtgagaaacaagtggtatcgaaaagaggtaactaaaatagctaatgccttagctgatgatagctttgtgaataatcaattgggtaaaggttatataggcaatttgatcttggctttaagtttttggaagttaaggcggaaaaaggctgataaaatttatattttattaatgttgattttaaacatattttaa

SEQ ID NO: 18200 - DNA, 180 bp, Escherichia coli
atggcgaaaaaaccaggtgaaaacacaggaaaaaacggcggaatataccaagaagttggcccacgcggcggtaagaaagacaattttgcaaccgtcaaggacaacgaaaggcttccaccaacaacaaagccaggtcatggctgggtattggataagcgaactccagacagcaaaaagtaa

SEQ ID NO: 18201 - DNA, 366 bp, Escherichia coli
atgaaaaaagttaacattggaaacgtaccaaagatgctcgttccgctctttgagagcggtacaattgtgttttgtagagactttccagaatggcaacgcctgcatcaaaaacttggcgttgacgtgcatgactcggacgccaacggagcgtctcatacaatgagtagcgagaatggtgttttgcatgtgataggcgtgttcaatggcaaactatctactattgcccatgagtgcgctcacatggcattcgatatctgctcaagggtaggtgttgatgttgaaccaggaagagccaacgagacttactgctacttaatgagcaggcttgttgagttctgcgagcgacatatcagaaagccggagtga

SEQ ID NO: 18202 - DNA, 1839 bp, Escherichia coli
atgaaagttactgcaaacggtaagacatttacctttcctgatggtacgagcaccgaagatattggcaccgccattgatgagtattttgctggtcaggctgttcagcaacaaacagttaatcaggccaataatgcaccaacacgggaagaaccatcattgatgcaacaagctggtgattggctcacaggtggtcaaagtgcagggcaaattgcagaacaggctggtcgtggtctggtaaacataccatttgacgtattgcagggtggcgcaagtctgattaatgcaatcagccaggggcttggtggccccaaggttttggatgatgtttatcgccctgtcgagcgaccgacagacccttatgcgcaagctggagaaacaattggcgggtatttagttccaggagttggaacggcaggaagcatggctattggatcactggcagaggccgcaaatcagaaaggcgatttcgcacaaaatgcagctaaaaatgccggagttaaccttgccgctcagggtgttctttccgcagcagcaaagggaatagggcgtggaataacggctataaaaggtgatattgcgccagaagtggcgaagaaaattgccacatcagaatcgatgggcgtgacaccaatgacatctgatgttatcccgccgaaaaatgctttcactcgcggacttactcaggatgctgagggggctttgctcgggacaggctcaaagcgagctgagcaatatgcaacgcgtagtaagctggtaagcaattattttgaccgttttggtgagtacaaccctgatgatgtggtgaaatctcttaccaccacgttaagggggcggaaggatgccgctggcgctgttatcaatgacgtcaccaataaaatgggtaatgccgcagttgataccacaaataccatgaatgctctgaatacagcgatcgcaagacaggaacggcttgggacgtctgccaatcaaagcctgcttacatccttgcgtaacctgcgtgaagaattagcaaaccctgcaactgatttggatgttacgtttgatctcttgcgtcagcacagaacagcatttagatctaatgttcagggagatgctatggtcttccccaaccaggcaaaagcagctaccaatatggtagagaatgcaatgtcaaaagaccttcgtaacgcagttgcaaaaaacctcggtgcgtcagacgcagcaaaataccttaaagcaaattccgattatgcaaacgtttataataaggtgcttaataaaaacattgctaacaagctcaacaaggcaagcagtgaagccagtcctgaacttataaatactgttgtattaagcagaaaaccatctgacgtgaaacgaatctggagcgcattggatgataaagggaaagatgctatgcgtgcagcttacgtcagcaaaatagcggaaaaggccggggactctccagccaagttcatcactgaagttaataagctgaaatctcagtcaggcggtgaaatttacaacactattttttctggaaagcacatgaaagagcttgatgctcttcatgaagttctacagcaaacagcaaggtcagacaccgcaaatgtagtaactcagacggggcaatcgcaagccaacaggataaggacgattggcgcaactgcgacccttggcgtatcaatggggcttgaggctggttttggtgcaatgatgcgcttgtatgagtccaaagcagcaaggaatgctctcttacgtctggcaaacactaaagctggaacgccagcctatgaaagagcgttgagtaacgctgcaaatgccatcaggccgctgcttgctactgaggcaacacagcagtaa

SEQ ID NO: 18203 - DNA, 546 bp, Escherichia coli
atgttgagtgaaaacgcaaaagatattcctggatatgaaggtttatatgccgtaacagaggatgggcgagtatattctcactcacgtgttgttaaagctgcgcatggcagcacgcaactcagaaaggggcggtggctaaaacaacacgagaataataaaggttatctatatttgccacttagtgttgatggagttaaagtaaaatggcttgtgcataggcttgtcgctcttgctttcgtccccaatccagaaggcaagccgttcataaatcacatagataacaaccgaaaaaataataatgcttctaatttagagtggtgtactcaaaaggagaatatgaagcattgctcatctcaaggcagggtgaagtttccggctttaaaaggagaaaataatccaatttcaaagctatcatatgagcaagtaatagaaataaagaaatcaaagggagttaatcaaagagagcttgctaaaaaatactgtgtcagtcagacggtgattcacaatatccagtctggtaaatcgtggaggcatgttaatggctga

SEQ ID NO: 18204 - DNA, 534 bp, Escherichia coli
atgagtttagaaaaattactaatcaaaaacagaaagtgcggttcatgctctgtgtgctgcacttcgctacgaattgaacagccaacgttaaaaaagttggctgacatcccatgccagcaccttaaacatcagggaggatgtgcaatttatgatgaacgcccttctgtttgccgcacttggtattgcggatggcgaattctggatataggaccagagatgcgtcctgatcggagtggagttctaatccgttatgatggatcatcactctgctttcaacccgtagacaaaaaccgcgtatctgctttgatcgaaccagagcctctgcgaattttgggtggcctgatagatcaaggtatgaaagtggaaatatcggttccaacaaaggaagggtattgctcagccaatattaatgtcactgagcatatgtcagaggttgtaaaaagcagagagtatgtaaaaatgcgttcggctcttttggcgctcattcaattcgcatcacgagcaaagacagatccagtagaaccgctggaatga

SEQ ID NO: 18205 - DNA, 177 bp, Escherichia coli
atgaatgttcgaactgataaagaattaatgtcttcagttaagaaagaggacgtttctcatttaaagaaaattaagcgatgcaatgagtaccatttcaaaaagccgggtgttaaacccgacctgaataatcattccagcggttctactggatctgtctttgctcgtgatgcgaattga

SEQ ID NO: 18206 - DNA, 480 bp, Escherichia coli
atgacccagcatattggcgtaaaactgattaacgcctttccgatgacgagacaggcatataacgattttcgtggctggcagcttcctgccggagaaaacggcgaggacgaaggctatctggttgaatatctggatggcggaaaacctaacaccgatcgctttgatggctacgttagctggagtccaaaagaagtattcgaaaaggcttatcgtccggtatcagggctaagtttcggccttgccatggaagcgttaaaacagggcaaaagtttgcagcgggcaggatggaatgggaaagatcagtttgtttatctcgtgaaaggagaaaaattagcgtctgcgttgggttatggctttggcgaatatgttggcgagccaactttcaatgacacgcttgtattgaaaaactcacagaaccgccttgctacatgggctccatccattggcgacctgatggctgaagactggcaaatcatttaa

SEQ ID NO: 18207 - DNA, 504 bp, Escherichia coli
atggcaatgtcaccggcactacgaaatagcgtaatagcggcgataagtggcggggctattgctatagcatctgtgttaatcactggaccaagtggtaacgatggtctggaaggtgtcagctacataccatacaaagatattgttggtgtatggactgtatgtcacggacacaccggaaaagacatcatgctcggtaaaacgtataccgaagcagaatgcaaagctctcctgaacaaagaccttgccacggtcgccagacaaattaacccgtacatcaaagtcgatataccggaaacaacgcgcggcgctctttactcgttcgtctacaacgtgggggctggcaatttcagaacatcgacgcttcttcgcaaaatcaaccagggcgatatcaagggcgcatgtgaccagctgcgtcgctggacatacgctggcggtaagcaatggaaagggctgatgacccgtcgcgatattgagcgtgaagtctgtttgtgggggcagcaatga

SEQ ID NO: 18208 - DNA, 441 bp, Escherichia coli
atgaaaaaactaacctttgaaattcgatctccagcacatcagcaaaacgctattcacgcggtacagcaaatccttccagacccaaccaaaccaatcgtagtaaccattcaggagcgcaaccgcagcttagaccagaatcggaagctttgggcttgtcttggtgacgtttcgcgtcaggttgaatggcatggtcgctggctggatgcagaaagctggaagtgtgtgtttaccgcagcattaaagcagcaggacgttgttcctaaccttgccgggaatggctttgtggtaataggccagtcaaccagcaggatgcgtgtaaatgaatttgcggagctattagagcttatacaggcattcggtacagagcgtggcgttaagtggtcagacgaagcgcgactggctctcgaatggaaagcgcgatggggagacagggcagcatga

SEQ ID NO: 18209 - DNA, 276 bp, Escherichia coli
atgattactaattatgaaaccactattgtaactactgatgacattgttcacgaggttaatctggaaggaaagcgtattggctacgtgattaaaacagaaaataaagaaaccccattcactgtagttgatatcgacggtccatcaggcaacgttaaaacacttcacgaaggtgtcaaaaaaatgagcctggtgcatatcggaaagaatctgcccgcagaaaaaaaagccggatttctggcaactctgattgcaatgaaattaaaaggtgaaatctga

SEQ ID NO: 18210 - DNA, 222 bp, Escherichia coli
atgattgctcatcacttcggaactgatgaaataccacgtcagtgtgtgactcctggtgattatgttcttcataacggccggacatatattgcctcggcaaacaatattaaaaagcgaaaactttatattcgtaacctgaccacaaaaacatgcattactgactgcatgattaaagttttcctcggtcgtgatggcttacctgtaaaggcggaatcatggtga

SEQ ID NO: 18211 - DNA, 612 bp, Escherichia coli
atgcgccttcgtgttgtgcccggttttatttcaccacctccgggcttcggtggtctcggctatacccctacagcgagagcttgtgttaacatttcaatacccttacagttgagagttattgatatgttggatgtatttactccattgttgaaactttttgctaacgagccactcgaaagacttatgtatacgattatcatttttggtctcactctctggctgataccgaaagagtttactgtcgcattcaatgcttatactgaaataccttggctctttcagattatcgtttttgccttttctttcgtggtcgccatttccttctcaagattgcgagcacatattcaaaagcattattcattactaccagagcaacgtgtattgcttcgtttatctgagaaagaaatcgctgtatttaaagatttccttaaaacaggaaatcttattatcacttctccttgccgtaacccggttatgaaaaaattagaacggaagggcatcattcaacatcagagtgatagcgcaaactgttcttattatctcgtcaccgaaaaatactcccattttatgaagttattctggaacagcaggagtagacgttttaatcgttag

SEQ ID NO: 18212 - DNA, 420 bp, Escherichia coli
atggaaaaagaaaacgaaaaaattgccgctagtaggctcaatgacaaaattgcaatgcgtcttaaagagcgcaggcagaagcttggtttatctcaaggaaaacttgctgaaatctgcggatggacgcaatcgcgtataggtaactatgaggcgggcagcagaaatgttggagtgcatgatgctgtcgtcctgggaaaggcactgggcatatctcctcctgagctcctctttggggaaaaagactcttctgaattgtggttaaatgaatcccaacgaaaacttcttgagttgtttaaccagctaccgggctcagaacaacaacgaatgattgagctatttgaagtccggctaaaagaaatcgacgagtatgtagaaaaatatttgaggggcaggcttaaagatacccccccaccggagtaa

SEQ ID NO: 18213 - DNA, 243 bp, Escherichia coli
atgaacaaaatttcaacatatcgaaaacaacttggtctgtctcaaagacaactcgctgttcagctagggtggatacaaagccgactagcaaattacgaagcaaactttcgtacccctgggctagaggagtgcagaaaaattgtttccacccttaatcggcttggtgctcattgtggacttgacgatgtattccccccagacggtaagcatagcgaaaacagcataggagcggttgattcatga

SEQ ID NO: 18214 - DNA, 423 bp, Escherichia coli
atgaaaatcaggcatgagcacatcgaatcagtgttgttagccctggcagccgaaaaagggcaggcgtgggttgctaacgcaattactgaagaatatctgcgccaggggggcggcgaattgcccctggtaccaggcaaggactggaacaatcagcagaatatctatcaccgttggttgaaaggtgaaacgaaagcgcaaagggaaaaaattcagaaactgatccctgcggttctggcaattcttccgcgcgagctgcgtcaccgactctgcatcttcgataccctggaacgccgtgcattactggcggcgcaggaagcgttgagtacggcaattgatgcgcatgatgatgcagtccaggccgtttaccgtaaagcatatttcagcggcggtgggtcgcccggcgattctgtcgtagtgcattga

SEQ ID NO: 18215 - DNA, 789 bp, Escherichia coli
atggcttcaaactggataaagctcgaggttattacgccggataagccggaaatattcaggcttgctgagattctgaatattgatccagatgccgcattagggaaagtcattcgcttctgggcatgggcggatcaacaaatgatagacggtaacgcagagtgtaacgctcgcggcgttacaaaaagtgcaatagatcgcatcacttttatggctggttttgctgatgcgttaattcaggttggatggctggtcgaaaataacggtgggctttctctacctaactttgaacgtcataacggaaaaagctctaaaaaacgggcgattacaaacgagagggttacaaaaatacgcgaactgaaacgaaaaggtaacgctgccagcgttacacaaacggatcaaaaagcgttaccagaggaagaggaagaggaagatataaatactgatctccccctaaatccccctcgccaaaaacgagcatctaaaaaattcgagccggaggctattgagttgcccgattggttgccggaaacactctggcatgagtgggtccggttcaggcaggcattgcgaaaaccgattcgaacggagcagggcgctaacggggcgatacgggaactggaaaaattccgccagcagggttttacccctgagcaggtgattcgacatagcatcgccaatgaataccagggcttgttcgcgccgaaaggtgttcggcctgagacgttgctcagacaggttaacactgtctcgttgccggacagtgcgatcccgccaggcttcagggggtaa

SEQ ID NO: 18216 - DNA, 417 bp, Escherichia coli
atggcaaaagtatttacacaagaagagcgggaaaaaatcaagggacaggttgttgagctagtacgccggagtgggcgcgagacgttacggcaactggaagccaagacaggtgcgacaagatatctgatgagcgttctcgccagagagctggttgccagtggcgatgtatacaactctggctacgggttattcccgtctgaacaggctcgtaaggactggcaaaatgcccgcaaaaaactatctagggcaaaggtgaagaaaccatctgtggttgatccggaccttatctggtcattacctgacggagaaatacgtcgttatgacaggcaccaaaacataatttgctgtgagtgccggaagagcgaagttatgcagcgcatactggcattttatcagagaaattttcgttatttatag

SEQ ID NO: 18217 - DNA, 687 bp, Escherichia coli
atgaccccaataaaaatatttatgactattgctgatttcaaacggcctaaattggagctcccaaacggggcaaacaaactactactgcactcttgctgtgctccatgttccggtgaagtgatggaggcgcttcaggcctcgggaatcgactataccatctttttctacaacccgaacattcatcctcagaaagagtatttaattcgtaaggatgagaatattcgctttgctgaacaacacggcgtgccatttattgatgctgattacgacacagacaactggtttgaacgtgccaaaggaatggaatgggagcccgagagggggatccgttgtaccatgtgttttgacatgcgttttgagcggacagcgctgtacgctgctgaaaatggtttcagtgtgatcagcagttcactgggcatttcacgctggaaaaatatgcagcaggttaacgactgtgggcggcgagccgtcgcgcattatccgggcatggtgtactgggattataactggcgcaagcagggcggctcgtcccgcatgattgaaatcagcaagcgcgaaaaattctatcagcaggaatattgtggctgtgtgtattctctgcgcgataccaatctacaccgcaaatctcagggacgccctcttatcaaaattggtcaactccactacggtaaagaagagaaggagtga

SEQ ID NO: 18218 - DNA, 180 bp, Escherichia coli
atgagctacgcactaaaaaaacacccgcgattgactattccccctcgcgataaaagcgttgtggcagctccgcgcccggctatcgatgaaaattgcactcatcgtgagcaggtgaaaaatgctttcgatttcggtttttctcgttacgagaaggcaatggaagagctttcaaaagtgtaa

SEQ ID NO: 18219 - DNA, 486 bp, Escherichia coli
atggctgagattgttgaaggagtgcactacctttcggttgatgatcttactgaaattaatcgccttttaattgagcttcaaacaccagatgaacctgttggtgtgctgagtgttgataatttaagttcttctcagtctcgtcccagtatggttcgatggtatgagcaaaccaacgacatgtttgtactggcatcggtattgattgaaagtctgattcagaatcatccatttgccaatgcaaacaagcgcacagcaatgatggctggtgcggtttttttattgttaaatggatacgaattaaccgcaccaggcgatgaagttgtggagatggctgaggggctggcctgtaaaatttatacacgagaagagcttgaaaattggttgtgttattggtctcgtgcgtatgacagtcgggaattatgtaaaacaggcgcaactattgttttgtatgaaactatcaagcttaaaatagaacagcaaaactaa

SEQ ID NO: 18220 - DNA, 213 bp, Escherichia coli
gtggaaaaaataaagaaactatttagtagcaaatacgcagtcatacgtcgtgatgacctgtcagttatagtcgaaatggattacttccctgaaaccccaaaatcaatgatgtatcgtaatggtcgaaaggcaatttttttaccgatgagggtaagtgacattatgggaaatgataaactgctggatgaattgcgagtcagagcatcctgttag

SEQ ID NO: 18221 - DNA, 291 bp, Escherichia coli
atggtggatttacgtaaagcggcgcgggggcagatgtgcaccgtcagaattcctggctactgcaatcacgatccggaaacgtctgtgctggcgcattaccgactggcgggaacgtgcggaacagcgataaagccacacgatatgcaggcagcgattgcctgtagctcgtgccacgatttaatcgacgggcgggtaaaaaccagcgattacaccaaagaagaattacgcctgatgcatgcagaaggtgtttttcgcacgcaagaaatctggagaaaggaaggttatttatga

SEQ ID NO: 18222 - DNA, 216 bp, Escherichia coli
atgaaatccatggataagttaacaacgggtgtcgcctatggcacctccgcaggcagtgctggctactggtttttacagctgctcgataaagtcacgccctcacagtgggcagcaataggtgtgctgggtagcttggtatttggcctgctgacgtacctgacaaacctttatttcaagattaaagaagataagcgcaaggctgcgagaggtgaataa

SEQ ID NO: 18223 - DNA, 498 bp, Escherichia coli
atgcctccatcattacgaaaagccgttgctgctgctattggtggcggagcaattgctatagcatcagtgttaatcactggcccaagtggtaacgatggtctggaaggtgtcagctacataccatacaaagatattgttggtgtatggactgtatgtcacgggcatacaggaaaagacatcatgctcggtaaaacgtataccaaagcagaatgcaaagccctcctgaataaagaccttgccacggtcgccagacaaattaacccgtacataaaagttgatataccggaaacaacgcgcggcgctctttactcgttcgtttacaacgtgggcgctggcaatttcagaacatcgacgcttcttcgcaaaataaaccagggcgatatcaaaggcgcatgtgatcagctacgtcgctggacatatgctggcggtaagcaatggaaaggtctcatgactcgtcgtgagattgagcgtgaaatctgtttgtggggtcagcaatga

SEQ ID NO: 18224 - DNA, 561 bp, Escherichia coli
atgacagagcagaaacgaccggtactgacactgaagcggaaaacagaaggagagacgcctgtccgcagccggaaaaccatcatcaatgtcaccacgccaccaaaatggaaggtgaaaaagcagaaactggccgagaaagcggcccgggaagcagagctggcggcaaaaaaagcgcaggccagacaggcgctgtccatttatctgaacctgccctcactggatgaggccgtgaataccctgaagccctggtggccgggattatttgacggtgacacgccccggcttctggcctgcggtatccgggacgtgttactggaagacgtggcgcagcggaatatcccactctcgcataaaaaactgcgcagggcgctgaaggccatcacccgttcagaaagctatctgtgtgccatgaaagccggtgcctgccggtatgacacggaagggtatgtgacggagcatatttctcaggaggaggaagcgtatgcggcagcgcgtctggataaaatccgccgccagaaccggataaaggcagaacttcaggccgtgcttgatgagaaataa

SEQ ID NO: 18225 - DNA, 459 bp, Escherichia coli
atgaaatatattccactggtattatttatcttttcatggccggtattgtctgcagatattcatggacgggttgttcgtgtactggacggtgataccatcgaggtcatggactcacggaaggcggtgcggatcaggctggtaaatattgatgcaccggaaaagaaacaggattatggccggtggtcaacagacatgatgaaatcactggtcgcaggaaaaacggttaccgtcacatattttcagcgagatcgttatggtcgtattctcgggcaggtttatgcaccagacggaatgaatattaatcagtttatggtccgggccggggctgcctgggtatatgagcagtacaacatagatcccgtgctgcctgtccttcagaacgaagccagacaacaaaaacgtgggctctggtcagatgctgatccggttcccccctggatatggaggcaccgtaaataa

SEQ ID NO: 18226 - DNA, 246 bp, Escherichia coli
atgcagacctcacgagttaatggattaacgagtggggtcttcgcatttctggtacctgcgtcttgcctgaaccagaaaggctcagacacccgccgcgataataccacattcctgtctggttacgacgatctccatgcccccggtttttattgcagaaacgccgggagcggggaaaacttgctttttcccgtttccggggttggacaactgagcaacgcgaaggcgtcagctacgatgttccggtga

SEQ ID NO: 18227 - DNA, 2688 bp, Escherichia coli
atgtcggtaggatcacgctggtacaaatttgattttcataaccatacgcctgcttcggatgattacgggatttcaggcgtcactcccagagactggcttctggcttacatgcggcaacaggtcgactgtgttgtcatcagcgatcataatagtggcgcatgggtcgacacgttgaaagatgaattggagcggatgcgccaggaagcgactacctgtggcttgcctggctttcgccctctgactttgttccctggagtggaactgaccgctaccggaaatgtccatatcctagccatactgcacacgcaaagcaccagtgccgatgtagagagacttatcggccagtgcaacaataactgtcccatcccgcgagatgtttataatcaccagcttgttcttcagttgggttctgctggtattatcaacgttatccgccgtaatccggaggctttgtgtatacttgcgcacatcgacgcacctaaaggggtgttaaaaagcctgactaatcagggcgaacttgaagcggcttttcgcgaaaaaccccatgcggtggagatccggcacagtgcggtcaatattactgacggtacccacaaacgtcttatccaggatctaccgtggcttcggggctctgatgcacatcatactgataatgcaggtgtacgaacctgttggctgaagatgtcttcacctgatttctacggtctcaagcatgcattgctcgatccggagaattgcgtattgtttgacaaaaaaccgccagagaatccggcttcacatctgcgtagcctgaagttcagaacccgccactgtcgtcctgctgagcaggaggcagctattgtggaattcagtccgttttataacgccgttattggctcccgaggtagcggtaaatctacgctcatcgaaagcattcgtcttgctatgcgaaaaaacgaaggattaacccaggggcagagtaaaaagctggaacagttcagtcgaataggggggggaatggatgctgactccttcattgaatgtgtgtaccgcaaagacggcactgatttcagacttagctggcggcctgatggtaaccatgacttacatattttcagcgaaggagaatgggttcctgacagtcactggtcggccgaccgttttccactctcgatctacagccagaaaatgctttatgaactggcctcagactccggagcattcttgcgcgtttgtgacgagagtccggttgtcaacaaacgggcttggaaagaacgttgggatcagctggaaagggattatctaaatgagcaaattacgctgcgtggctatctggctaggaaggtgagtgcgggggcgctgcagggggagttatccgatgctgaacgcgccgtcagtcagttgcagtcaagtgcatactatccagtttgcaccagactggctgtagcccgggctgaactgtcagcagcaaccacctcccttgagttatatgagcaacgtattgcggccctgctggcgttgttggaggaacctctgccggtttcagtaactccgttggcaccgtccgagtcgctggaggtatttatgacgcacctgtcgtccgtacaacaaaattatggccagcgtctccacgcccttctgacagaatgtgccactgaacttagcgccgtcagggcagataatccttttgtaactctcggggaaaccgttcgtgatcaggaggtgaatgttgagcatgaggctgttgctctgcgggctcagggacttaatccggatgtacttaacgagctgatggagcgttgtgagtcgttgaagaatgagcttaaaaactacgacggccttgatggaatgatcaccacctcggtggctcgttcggagcagttgctggctgaaatgcgcactcatcggatggcattgacagaaaaccgaaaggcattcttgtcttctctgtcacttagcgatctggacatcaagattctgcctctttgcgcgccccatgaggatattctggctgactatcaggctgttaccggcatcagcagttttgtcgaacgtatctacgatcacgataacgaaagtgggttgctttacgatttcatcagtgagcgtccgttctctccgttgccggccgcaacggagaggaaatatgcgttactggatgaacttaaagcgttgcactttgctatccgctccgaggatactggggttgggggggggcttcatggtaccttcagaaatcgtcttaaggcgttgaatgacggacagcttgatgccctgcaatgctggtatccggatgacggcattcacatccgttatcggactcccggagggcagatggaagacatttcttctgcttccccaggacaaaaaggagcgagcatgctgcaattcctgttgtcttatggcaccgatccacttctgctcgatcagccggaggacgacctggactgcttgatgctgagctcgggggtgatccctgccatcatgtcgaataagaaacgccggcagctgattatcgtgtctcattctgcaccgatcgtggtgaatggtgatgcggaatacgttatcagtatgaaacatgatcgtacaggtctgtatccgggactttgtggatcgcttcaggagacgccgatgaaggcacttatttgtcggcaaatggaaggtggtgaaaaagcattccgttcgcgatatgagcgtattctcagttaa

SEQ ID NO: 18228 - DNA, 2247 bp, Escherichia coli
atgagtgatgtcagagaacagcatatggatggcaacgatagtcctatcacaaagatggaagaagatcgttacggtttcggtatcctagcggaaaaacttgcacacagcatcgtcagtatggacagaaatatcagtacggtgatcggtatcgaagggaaatggggagcaggtaaaaccagcctgctaaatctgttgctggaaaaaatggttccgcttatcccaccaaaaactcacgtcctgaaaatttccccctggctcagttcctccgggaaatgtaccgtcgacagtctgctcacaccggtggctgcaatccttgatgaggaggacgcaaaggaattgtgctggttgcacagaaagtaccgccagctgcggaaaaaaacgtcccctctcgccaacgacatgcttcgttacgcacaacaggcgtccggccagatagcaccactggcagagttcgctggtaactggattcccggtgcaggttttgtcgccagtggtctgaaaacggtttcttccacgaatctgtctgcccggcggaaaaccaccgccgaattgagagatgagatagaaaataaaatgacccatctgaaagtcaattttattgtggtgctcgacgatcttgacagactggaaccagcccaggccgtcgaagtgctgcgcctgattcgctccgtggcggacttttccggatttcactatgtcatgtgctacgatcccatagtactcggccatgccattgagcacgggctgggagtaaccgacggcagagcctacctccagaaaattatcccgctttcattcagtattccactaccggagtctttcgatctccggcgggagttcctggccggcgccgtgaaactctatacctacgttaatggcgcaccacctgatttcgctctgtatcgggatctaaaatccgttactgaacacttcggggctgccctgactaccccccgggaagtcaggctggtactgaatagcctgacatttcgctacggaagcatccgggaacacgtctggttcccggacctctgtctgctgcaactactccgggttacgttacccgatctgtatctctgggtagaacgctacttaactgaatacgctgttttcgcctccaaaatcggatcggctttggctcggaagaaagacgctctgacgtcagaactacaaaaattactctccgaattacctcctgtgtcaacgttgtccgtgaccgaacttgctaaatggttgcccggaatcgaggaagagaaagagggcaatattgttctcttcaaactatatccagaacagcaccaaacggaacatgacacaaacagaagacttcgtagtgttttttactggcgcttttattttgcttttactgccccgggggatgtccgttcgccagactttttcaaccggttgctcatgttggcaggcgatcctgaccgtcagcgtgagctaagcgaacttctcttgggtgagctggaagaagcaggtttatcctcactgacatggtttgaacacattattagcaggctcaccatggaaatgctctcccaggcaactcccgcacaatgcttgggattactacgctttatattcattaatggcacaaagatctctaggtattatcgacagcgcggtgggctcatgagactggagtcggtagggttgacagatctggcggacaggctttttcaacttatccctaaggccagcgccaaagagggtatcgactgtttgagtcgtgccctgcaagatcagcaggcgttcagctgggccataacatatcttcgtcatcttctctggcaaaatggtctggtcggtacgcgccccataccacaggataaaaggatactcggtgatgatgatttaagacatttgtgtcaacaggctgcagaatggctggaaaatccagataaccaagaagtgattctggcgaatggggaactgaatgatttggtgtatgcctggcaggaaatcagcaccaccaaatctgttgcggcgtggctaacctcagtaacaaccgacaaggatgatgtttttctcaagatcctgctgcggctgcattatgacggtatccggactaatattggccattaccagggactgaagcttagtagcctgggtgaattctttggcggagaagaatatattctgaagagattagctaaaattgaagctaaagggcagtggactgaactgaccagtaaggtaaggaaagctatcgaactcgactctcctggcattccccgataa

SEQ ID NO: 18229 - DNA, 1089 bp, Escherichia coli
atgctcagccagcttaacttgcgttttcacaaaaaactgatcgaggcgctgaaagtgcgtgccggtcgcgaaaatacttcggtcaaccccctagccgaacgcttccttgatgatggcctgaaaacggtcgcgccctgcgacgggtattttcagcttattgccgatccggaggccacagtccggcagctgtaccggcacatcattcttggccagaccttcggcacgtcagcgttctcccgcgacgagttgcgttttatgctggctcatacccgggaagccttcctgcgcgggcataacaggttggccaccctgccggctctgggcacgctgctcgatatcacccgtgacctgctggcctggcagatagagcatgagcgtccggtggatggccactacctgaaggggatcttccgcctggcaggaaaaaactggacggaagagtttgaccggttcctggcagatctgcgtcctgttgtggatcagatgtatgccgagcacctgctgcgcccgctggcgagcggctgctttgaacttacggaggttccagacgcggtcctggcggaaatttttaccctgccgcggctgaataccatatttcccctagtcctgcgcgggctggactggactacagacaaagccacagccctcgcacaggatctgcgcccggtgatcccggtcgtgacggaaaccgtcgaagccggcacgcttcgcctcgatatccgcattgacggccagcatcccggcgagcgtccgggtgcctggtacaatacaccccgtctgcacctgctcatcaccggccaggattttgtggtgccgtacggctgggaagtattctctgaactgctgggcctgttcacgctttatgcccgtcatcctgaagctctggcacacggccatcagggcgagcatgtaatgctctctccacccggacacgtaacggcagagggattcttcggaatagacggcctgcggatttttatgccggcagaggcctttgaggaactggtaagtgagctcacggtgaaatgccaggaaggccccctggcgaaagccctgaccggcctgcgctgtctgtacggggatttgtga

SEQ ID NO: 18230 - DNA, 300 bp, Escherichia coli
gtgctcaccgataagatagaggcaattggctcgactaaagagcaggccttggaaactctgggcctgtcgtccgggggcgataccaaggatatttttctgcggcaggtcgtccagcagatgtcacatattgatcacctgctgaaaaaggactggtaccttctggacaccagaccagaacgtccgttttacgtatcagataatcctgtcgtgcttaagaacagtaatgacttcggtccgtacggtaatcttggtctagccgttcgcgggatacagatttacctcccctgtcatcgacgctga

SEQ ID NO: 18231 - DNA, 312 bp, Escherichia coli
atgctggccatgtattgcccctccatccgtgaacagatgattcgtcaaaagcagtatcttcacaatctgcttgccagagcgccgcatcttatcccccgtcacattcggccttttgaaagactggaacatatccggaggtatacggactatcttctcatgccgcttaccccagatcatgtcacgcattacaacgccctgcaggtgaagttcgcggagcagtacgtgttctgcggtgaaaaggatttctctctggttgagagaatgctggccgatagtggacgctaccggacaggcccgcggtttacgttttag

SEQ ID NO: 18232 - DNA, 222 bp, Escherichia coli
atggattttctgaacgacaccgagggaacggttttattcccattccagactgaaatcgcttttgttctggcgattatcaccaccgccaaagacctttctgtcagtgcctggggggcacatcggacagaaacaatactggggcgcctgtctctgtatttggcttctggtggcttacgtgggactctgtgccgcggtggtctgggctgtagccccctggcttaa

SEQ ID NO: 18233 - DNA, 255 bp, Escherichia coli
atgcgcacctgcgcatgtaaggctgcgcacggtggtgatactcagcctgaacaccaatcaggaagacgcgctgcgggaggtgtccaaatccctcaagtcggccttctgccgttccggacgaaagtgccagcagggcgtggccacccatctgtttgtgtcggtactctgaggggcatggggcaaaaacctgaaaaaggtattcgcctggctgccccgctccgggtgaaaatgaatgtacagcgacggaatagatag

SEQ ID NO: 18234 - DNA, 279 bp, Escherichia coli
gtgattgatgattttgagtttgatgtcggcgatcgctttacttatgaatacaatttctttgagcactggattcatgatattcgcgttgaagccatttatgaaaacaccgagctgaaaacaccgttttgtattagtggtcatggtatgcccggagccacagttgcagatgagtttgataaaaccctggcgtttcttgaagctatctacctgggcgaagccactgaacatcattctggcgatttcaataaaggtacttgctcacgctctgtcattttctga

SEQ ID NO: 18235 - DNA, 438 bp, Escherichia coli
atgaaaaaacaaaactactcaaccttcacaagttatctttctaaaacgcacaaaaatgtagatctttatagattgtacaacccacattttacaagcttctgcaaaagctacacttatgaccatgatttctatcttacctatttctctcgtcatatgattacggagagaaacattctaactatattttcaatttacactcacttctcctatggcatgaccaagaaagaaacgatcagagatttcatactgtttcttaaaaagattaactcagttgttttctggaaatcattctccttccgtggttgcaatgttatttattttaacaaaaaacgagaacaaaaagaaatatcatggtttaccttttcacgaatctatgacgaagtattagggataaaagaatatcaatttaataacaatatttatagaaaaacagcataa

SEQ ID NO: 18236 - DNA, 1059 bp, Escherichia coli; identical to SEQ ID NO: 16061

SEQ ID NO: 18237 - DNA, 276 bp, Escherichia coli
gtgaatatcgacacgacaataacgatcgatacgctcctaaattccggtctggcacttctcggttggctttacatcatgtcccgtacatggcgatggctgggttccattttcctgaaacagtggaaaaaacggcgcaaacaggaactacgccagaaggcattagaagcgttctatgacgcatttgaacttggcagcattgaaccaggcacaacagcgaggatagcgacaaaaggcgacctgatgatagtgatgttcagacaggagaaaacaaaatga

SEQ ID NO: 18238 - DNA, 225 bp, Escherichia coli
atgacagaacagacgatgacaaatcgcgaacttgttgatgccgcgattgaacttgctggcgatttttattccatgatgggttacgagcatcgacctggttttaagtattgggagtcaccgcatccgcaagaacaacaggtgtttgaaatggcctgccgtgcttttgaggttattcgcggttctgatgtgatggaggccgttgccgacttggaggatgaagagtga

SEQ ID NO: 18239 - DNA, 312 bp, Escherichia coli
gtgagcatcattgtagaaatgccggtagaacgtgatgaatatggctgctggacacatccggagtatgaaaagttttgcgcaggccgtgaatatatttccactgaggaatttgacgcctggatgaaggaaaataatcttcagtggaccatccgaactatggatgaagatgattttaatctggacgcagatggtcccgatattgccgcctgggaaccggagcgaccagagggcgaaggctggtttgttggctctattcatgacactgaagatggtccggtttgtatctggctgcgggagaaggttgccgcatga

SEQ ID NO: 18240 - DNA, 687 bp, Escherichia coli
atgacccaggcgctgcatgaagtgaatttatatagccgtattgatggttcaggctacagaaacatatgggttgttggtgatttgcacggttgctacaccctacttatgaatgaactccatcgtgtggattttgaccctacacaggatttactgatatcggttggcgaccttatcgatcgcggcaccgaaaatgttgaatgcctggagctattgcagatgccctggtttcggtcggttatgggaaaccacgagcgattaatgatcgatgcgttaagtcccgcaggcaacgtgaataactggctaatgaatggtggtcaatggttcttcatgctggacgctgatcgggaaatattagccagggcgctggtggagctggtaagacgtttgccctatatcattgagttgaacaccgggcatgaaactatcgttatagcccatgccgactatcctgataacgaataccagtttggtaaacctgttagcgatctcaatgtcacctggcggcgtgagcgattttatgacgcggttgatggtgttggtggaatgatcactggtgcagatagctttattttcgggcatacgccagtaaacagcccgaaatctttctggaaccagcactacatagacactggcgcggttttttgcggaaatctgacgctaaagcaggtgaagggagagcagttgtaa

SEQ ID NO: 18241 - DNA, 954 bp, Escherichia coli
gtggctgtctttccggtagacaagcccaccagtaactacattggcgcaggtcgccgtttcattatctctccacttccgcgtgaacaggctgaaaacacgccagatggcgtagtggatctgaattattcgctggttgccaaccagtctctgaaaccgttttttcaaagcgagcgcgtatttaacgcgttgggcggtgaagattcgcttgttcattgggtaagttccaatatccacgattgccaggcgcacgataagcgcgattgcagccaccagctaaccactcatttctataacggctctgccgttcgcctgtgctggaagcatgatgcggaatacatgatgaaggggtacggcaagctggacgaccagttatccctgaatcgtgccaactgggtaatgaactgggctgcgagcgagttaaaactaccgccagaacgcgatctgagcatggttgaactcactttttgggctattcgccggaatctgaaagacgagctgccagatgaagccggtcgcattgcattttgtcagccaaaacaggaaatccctaccggcacactgaaagaatcggatatcacctgggagcacagcacccgtgagctggtggacataaccgcagagcagatcgtcaacctgtctgtagatgaggattccggcctgctgtatatgcgccgaccaaaagcggttctcggtaaaagcccggcttatctccggtttgtgatttctcgcccgtgcatcggatgcggtggcaaagtaaatcacccgttcatgtaccgcgcccgctcgttaaacgaacacgatcgctgggccgttcctctttgcgatgaatgcgccagaagcgcagaaaacgatgtccgggcatgggaaaaagcacatggcatacgcctttacgtagccgctaaccagcttttcgacttcgccatcgagcgcggagtgatcacgttcaataactga

SEQ ID NO: 18242 - DNA, 576 bp, Escherichia coli
atgaaagaacgggggatgatttttaacgatgaaatggtccgggcaattcttggcgggaataaaacacagactcgcaggattgttgaagaaaaattctatggacgggcagtagccgcagagttgcttgccaagcattgtccatatggtcaaccgggcgatcgtatttgggttcgcgaaacctaccgggtacatggcaaagcgacggacgtcgcaacgctggtttatcgcgcaagcgtgcgtaactcctggacagaacaaacgcaccgggttccggtcgaggtttgtaataaaccagtatcagaaaagtggacgccatcaattcacatgccgcgctgggcatcacgcattcttctggaaattaccgacgtgcgtgtggaacggctgcatgacatgagcgaggcagatgctaaagcagaaggtgctactccggcgacgtacaagattacgccacctgaagctgtttatcgcgttggttttggtgatatctggcgcagtatttacgggcaggataactggttatctaacccgtgggtatgggtaattgagtttaagcgcattcaggggggcaaccagtga

SEQ ID NO: 18243 - DNA, 720 bp, Escherichia coli
atgacaattgattatcaagaactgcgcgaagcagcggaacaggcaacgcaagatgaatgggtagcatatatttttccgggtcataacggcatttatcctgcgcgcacgtctgagggtaggcattgcggatacttttttgactggcctggcattgatggacaaaggaatgctggtgctaatgcccgttatatcgcggctatcccaccaaaagttgcgctggcactactggatgagatcaatgcattagaggaaacgcgtatcaacgatgtttgccgtattgcggaactaaccaaacaactggagtcggcaaaatcaaaactcaacgagcagcgcgagcattacgagggagtaatcgcggatggaggtaagcgcatagcagaactggaaaaacaatgcgctgaatcggagcgaaaagcattaagcaactttgaagagtgtgctgcgatggctgaacgtatcgaagagttggagcaggccaacacaagacaggacgccaatataaaccaccagcaggagggcgtgactcaatcagtcacccgatacatatatcactacaacgcagtgaatggttctgactctatgtctggaattgcgcggttaagtttcatgatcaaatcacaatctgaccttgaagaacttaaaagcgcgcttaggaatattggtggtttccgtgcgaaagcaattaaatctctttcatatcttggatgtgaggaagaatag

SEQ ID NO: 18244 - DNA, 534 bp, Escherichia coli
atgaaaaaaggatttaaagataatttcggtgcagcgcaaaacactggagaaatcattgacgcatttaatggggaggaaatgcccactttattcagaaaagaatatccgcgaaagagtagagcaatagaattgctgtttatcattctgtttttcgtgttgctgataccaatagcctcaatattagtgactgttctaatggggagagtatttgaaccgttagttgaactgtatatcgatatagtgtggaccccattcaggaagctacacaataaaattaacccacataaggaaacagatatggcaactttgacaaaagaagatcgttttaccaaaaaacaaatcgccgaggcaaaaatcctcgataacaacggaacctacttcatcaacggttccattcttcctgtttatatcaatgaagatggagacacttaccttattgaagagtacgaaaaaggcgagccgagcgaacacctcattaaagatttgttcgcggatggcgttattgttgctgttaatccgattggctacaactaa

SEQ ID NO: 18245 - DNA, 210 bp, Escherichia coli
atggctattgctgcaagttacaccatgcatctctattgtgactgcctccagtgtacagatggcaaatataagtcgccagacttcggtgagtatatcggtacgtcatgggctggctgtgcaaaagaggcgcgcaaggatggctggcgaataagcaaagacaaaacgcgtgcttttgcgcccgggcataaagttttgaggattaacaaatga

SEQ ID NO: 18246 - DNA, 402 bp, Escherichia coli
atggctaaatttcggagaactattatttttctggcaatgttatctgcctgccatttatcacatgcatcggttattgttgcaaccgccgcaacaacggcagcaattagcgcctcagccgcaagcgagcaggagcaacgcactgcaatcaatgcatccgcaaatactaccactgtagcagtcacgcaagataagccaaatataggctttgttacttgcggaaaacggcatggagagacggtcggttctcttggttgcgcagtgtggcatgacgaacgagcagaaattccgtggaaatcatggcctggttacattcttggcgaaaagatacccaccagctatgaagtaaatgctatttcgttcgatcaatataacagagtcgcaacggtctacttttcttattaa

SEQ ID NO: 18247 - DNA, 177 bp, Escherichia coli
atgaaaaacagaaagaaattttggattacttttttgtttgtatgcctttgcggttcatttgttttgttggctggtggtgttgaatggggaacgatgggatgtggagttgggagtggctttacgcttcttgcagcctgggttatcgctggcgttcagtctggaggagggtattactaa

SEQ ID NO: 18248 - DNA, 210 bp, Escherichia coli
atgaggcattttttaaggctggcatttgttctggcgctatttgctcctccggctgcgatggctggagaacagcaacattgcacaaaagagaatgaacaccctttcatcgttattcaatgtgatgacggaacggtgacagtagttaatgtaagagataaacgtgcagccgtatgccgtaaaggcgaagcatgcaaggagataaagctatga

SEQ ID NO: 18249 - DNA, 729 bp, Escherichia coli
atgaccaaaatcactaaagagcgtatatcagagattatttcccgtatcgaaatgtatggtcacggtgctggatatacggcagatgaagtattggcgcttgccaaaatagcgttagcgccttgcaaggatggtaacggaatgacactgattgactttttagtgaaggaattatctaagggggctggatggcctgatggaaaagatttttgctatctacccattccgctggcaggttgtagttgggctacggttcgttttgatacgcgccataaaaattaccaatcatcaaagaattattcctttgatggcattatttgcgatatcagtgaccttgatcgcagtgcgtttacatcggttgtcactcgtgaacagtatgaagcagcgcgcatagcgtctcagaaagtcaagttagattttgagcaatggcttgaacagcaacgcggaaaaatcgatgtggactgcggttgtgtgtctgcggaaacattcatgcactggttgcgggtagcttatgaggctggcaaccatccggattttccggatagttcccaacaatcgcccaagaaaagcgtaaaaacctctctggaaagaggctatcttgaggccgcattaaagattaagccgggccatacgctaggcgtcattgatgccatgttggttcatgaaatggctaaggctttattgccactggtagcagatcaacatgaggcgagtcatgccaacgaaaactga

SEQ ID NO: 18250 - DNA, 351 bp, Escherichia coli
atgcacaataacgttctcaatgttagccgttcaattcagacaatcagagactgcaccagtgtggtggcatcaatcccattgcgaaacagcatagacgaactgcaaattcgtgtattgaatctgaatcaggctaataagcaattgcgctttattttgacgctgaaaagtgaaacagaggggataaagcacagcgtaaaagtgttttctgaggccattctgcttaatgggaagctccggcatctggtaaggccagaacgtcaatatcctgacgtcctggcttgtgaaaaagaccttctttctgaagttcaggatagggtgatcgatttcgttaaatgctatcccctgcattga

SEQ ID NO: 18251 - DNA, 351 bp, Escherichia coli
atgcttaactatcacgacaacacgcgttctatgcagacaatccgcaccaatacagcggtggttgatagcttacctgtacatacccaaggccgtgaagataccgtggaagtgcgacgcatgttgtgtcgccggtcaccaggccaccagcacttcatcgtaacgtttaaaagcgatgtagagcgcgccgagaaaatctctaactccacatctctggttaagccgttggcggaggttattgtgcgcaacaataaggcgcgctttgtccttgaggagcatcattctgattttaatgaaaaaatcgagtcaagcattttgcaatatatgaatggcacgttcacgccaccaatgtga

SEQ ID NO: 18252 - DNA, 1101 bp, Escherichia coli
atgctgacgcctaaaaacatcaccgaattaccagagtggagagagctggtaagcaaatatagccatgactgggcattagcagcagaagagttgatgggggttaagttaacccaccagcaaaaattaattgttgaagcgattcaacaaaaaggttcagcagtcagcgttaccacaccgactgggataggacataagtctgctctggctatcatttgtatcctttatacgatcctgatgcctgagtctaaaacggtcatggtcgctccagactttgagcgtaatggaatggtaactctctcactcatgaatatgtattgggagaaagctaatacaaaagcgccattactgggagagtattttcaaatcgaccaaaatggcctcaatcatcgttaccaaaaatcttggggctgcgaaattaaaccatatcgcctaaattatgaggaagatgtagccggatattatgctgaacatcttttgatcattgttatggacgcggctcttgtaagctatcggctattcgggatgttaagagcatctttagtgagtgacgattcacgtatacttttaatgtccgctcctccagaggaggaacatggacacttttacgattcccatcatggtcgtgcaaaaactgaagaaaatccatgtggtatttatacagccatcaagctgaacgcagaagaatcacctctgcttactcaagattatcttgatgggattgcagaaatgtatggtggtaaaatcggcgatgattaccgtcgcatggttcttggtgagttcccgggtattcgggaggctgttcttgaatcagatatgccgaaaacaatgcgcttttcgatgcctgatggtagtgaatggacaatgccattacaagtgatagcccggcatcatgcacagcaccacgcaaaaaaacatggcgttacaacattagagtggttgaaatcgcacaccattccactcttcactgcagatcacaatgctatcgttgagtgggcaaaaacaattccgtgggagaatgtcgctgaatacgcccacatgctaaaaccgccgaaagacaggcaagaaattagctggctgacagcagaaaaaatcattgagtga

SEQ ID NO: 18253 - DNA, 807 bp, Escherichia coli
gtggaaaataccaaaaacattcaatatcgcctgcgtaacggcctgctggtggatgtaaacgatgatatgtccctgccctttgccaccattgagcgaaccatccttacatacctgggcttagacgaagagttagatagtgagaatggcattgctatctggcgtgacggaaaaacgggagtcagacgttttattacggcaagaggcattcagtgcacacaggaagaattgtttgaactggcgcagtcttatggatgcatcgcgttagatcccctgtatgacccagccatagcacaacaactcattcgagagctgtcgctttcggtcacgccaataatcttccgccagggaaccttaaccggcacatggcgtgtagaacgcatctctaaatatcagccatataatatccatttgaacggcactattactggtgtggatcaaccagtagcaggtgaaaacaaagacctggaacttgcagtaatgatggccgcttgtcgcgtgcttggcctgggcaagcagatgtttatccatttcccaaacggcgcggaaggcgaagtagacctgatttcctgcgacttttccttaacctggatgcttgatgaattcctggacaaaacagtattccgtgctgaagaactggatatgtatgtcacctcaagtattcctaatgacgtgaaagttgaggccatcgctacagccagggcgaaatgccgtgcggcgattgcagaacaggccaaagaagaacagtccgatgaagtcgcggcagatgtggaggcagaggtagcggaggatgctgatgctgacgcctaa

SEQ ID NO: 18254 - DNA, 663 bp, Escherichia coli
atgttcagcacttttcaggtgttccccaaatacaaatgccacagcatcattcgggcatcgaaaatcaaagatattgttattgtcggcgaagcttatgcgcccatttttggcagtatcgaagtcgttgagccaaaaggaatgacgcttcgtgttgatggtgtgttcttggaaaaattccgcccgcaaataggaggatatctcgtcactgctgaaaatggctatctggtctatgtgccagagaaagcatttgaaaaatgctatagccgggttaacgacgcctccgaaaatggggtatcgctctgcattgaaggtcacaatggggtgacattcattacagccagggacgtaactatttctgctggcggtatcgctactctacaagaagaaatcgaccttgaagcagccgacttttctgacgcgctgatgtggctgaaggatggcaagaaagttgctcgacgcgggtggaacggcgaaaaccaattctgctggctggttcctgaaggacagtacccggcacgaatggaagccattaaggggtatttccccagcgacctcgttccgtatggtgcttatttcgccttaaaaaatgcacaaggtgaagttgttccgtgggtgccttcagttagcgacctgctggcctttgactggtttgttgtggagtga

SEQ ID NO: 18255 - DNA, 495 bp, Escherichia coli
atgattaacgtgaaagtgaaacgccttcatccggcggcaaaactacccgtttacgccaccgccggatcggcggcgatggattttgttgctgttgaaataacgccgggtatcgatagcaacggcgctatttcctcaagctggtgggtgcataccggcctcgctatggcgatccctcctggctggtgtctgaaactttatcctcgttccggattgggctgcaaaaagcatacgcgcctggctaactgtgtaggaattatcgacgccgattatcgcggtgaaatcatggcaaaactgattacagatcccggtggtgaaggtgtttgcctcaagcctggaatggcggtcatgcaaggcatttttgagcgtgttgaaccggtatcgctggtagaagttgatgaactcgatgaaacagagcgaggtgctggtggctttggtagcacctcggaaggccgcgttgaaatcaagcgtacaccgcttcagtacgaaaagttttaa

SEQ ID NO: 18256 - DNA, 489 bp, Escherichia coli
atgaaaacttactacccatccctgaactgctatccaaccactaatcctgagctgtcagggaaacttctgtccctcctggctgatagccctgatgaatggcataagcctggtgatatcaacacacagttccctgagtacgggtgtatccgcacccgaaatgagctgaagaacctcattgctcacggttttgtccgtcaccgtagcgggaaaggctatcagttggctatcccacaaggagaggcaagagaactctttggctatcgagaaagccagacgcaagcgcgggtgatcgcagaaattatccgtaatggcagcgtctatgcccgcaaattctggctgtctggcggtggcgatgcatcacagttcttgcgtgctgtgcgatcgctggaggaacaaggtgttatcgagaatacctgcgtctccgttccgaccgctccgcatatcaaacgccggatttatacatttacccggagagctaaaaagcaatga

SEQ ID NO: 18257 - DNA, 345 bp, Escherichia coli
ttgcacaatcgtattacggaatcaaaacgcttcactgttgacggttacaccataaccttcactgcgggcgttaagcgcgaccaggcggtcgtggtgttcggtgttatgaccggacttgatgccgttcccgtgtttaccctcgaaaaaaactggcgaaatctggaggaagctgaacgctacgtccggaaagtaaccgtcattgctgctgaaaaactcctggcccactatcaggaaaattatcgcgctatgaccgagaaaattaaccatgttttcactcgccccaccagcggcttcattgcccctgatgcaaatgccgggcgctatccggcaagggggcgcaaatga

SEQ ID NO: 18258 - DNA, 1029 bp, Escherichia coli
atgggtgaactagttatctccggcggttctggtggttttctgcgcgatattggcaccgaataccaggaagctgcaaaaaactttatgcagttcatgaacgaccagggagcttatgccccaaatacacttcgtgatctccgtctggtgtttcattcctgggcgcggtggtgtaattcgcgccagcgcccctggttcccgattacgccggaaatggcccgcgagtatcttctccagttgcatgaggccgatctggcttcgaccaccattgataagcactatgccatgcttaacatgctgctttcgcaatgcggcctaccgccgctgtcagacgataaaagtgtatctctggccatgcggcgcatccggcgcgaagcggcaacggaaaaaggcgagcgtacaggccaggctataccgttgcggtgggatgatctgaaattgctcgacgtattgctgtcccgttccgagcggctggtggacctgcgcaatcgggcgtttctcttcgtggcatacaataccctgatgcgtatgtcagaaatctcgcgcatccgtgtcggagatctggaccaaataggtgacactgtaacgctgcatatttcacacacgaagaccatcacgaccgccgccggacttgataaggtgctttctcgttgcactaccgccgtgctaaacgactggctggaggtgtccggacttcgtgaacatccggacgcggtgctattcccgccaatacaccgcagtaataaagccagaatcacgacaacgcctcttactgctcctgcgatggagaaaatattcagcgatgcctggggattgctgaataagcgagatgccacgccgaacaaaggaagataccggacgtggacaggtcatagtgcgcgtgttggtgcggcaattgatatggctgagaaacaggtgtcaatggtcgagatcatgcaggaaggcacatggaaaaagcccgaaacacttatgcgatatttgcgccgtagcggggcatccgttggtgcaaatagtcgcctgatggattcctga

SEQ ID NO: 18259 - DNA, 1038 bp, Escherichia coli
atgagtaagaagtcgatcgagaatgagtacaaacggttcctgcaaaccgctgaacggtggaaagagctggtggtcgcaaactctgttttccatgataccagttacgttggcgaggaatttcgccatgttgcattaacacatgatccggctgtattagaagaagctgaaaaatgcatagccgaatggaaagcctttgttgatctgtgtcgcaaggatgatgacaaagcctcaaacattgttgagtcggtttatttaccgatcccattcattgttgaggatactaatcagagtacgcatatcgttatgcaaagcgcaaccacaacgagaacattcacgcgcgaagacctgctgaaaaaatacgataaaactataaagaaaagcatgaaaaacaggatattttcacaggttgtcggtgcacttgaagaagaacgcagattcttcgccgctgaacgtgagggcgaggtataccgcgcaagaaaagaaggttataccgatgttgtgattaccaccaatatcgagggcaacaatggactttctcgcttcagagtgggtacgcacggtgcgctgatctttgcaagaaaagcaaacactgagatccccattgttaacaacgttggtgagcgccgcacccttaccatttacactggcattaaaccgcttccgtgcggccttctcggtgaatttgacctttatcgggttcgtgacctggaaaagcagcagccaagctatgtcgtgaagtcatatatcctgagaaacattgatatccgcaatcagagtttaaaaaacaaatcagagaaaatgctgtccgaagccgatccagccatacaccagatcgttagccggaaaattcaagaagctaaagatgcaatggcaaggctggataaaatggacctggaactactggaagttatgattgcctccggcgatgacctgacaggcatccgccttactgaagccaggaaaaaatacggtaaaagcgttgaagaacgctatgggtacacattcacacaaacgatgtacgcggcaaaactctggtaa

SEQ ID NO: 18260 - DNA, 1509 bp, Escherichia coli
atggctggtggtcgtaagattaagtgcgtcaccagtgatccacgttggcgcgatatggttatcaggtatcgatacaactttacccaggcggttgtcgatatttttgggatgttcccctcccaccagcagcagcagatcattcagtcagtgcaggagacggggagcaggacgaccgttacgtccggacacggaacgggtaagtcgtcccttaccgcgatgttgctactaatttttatgatcctgttccccgacgcccgcgtcattattgttgcgaacaaaataggccaggtaaaaacaggcgtattcaaatacgtgaaacagttttgggcgaatgctgttaagcgccacggctggttacagacctattttgtcctgtctgacaccatgttttatgagcgttcccgtaaagggatatgggaagtgctctgtaaaggttatcgactcggtaacgaagaggcactggcgggggagcacgcggagcatttactgctaatccttgatgaagcatcgggcatatccgataaggcgattaacgtcatgacgggggcgttaacgcagaaagataaccgtatgctcatgctttcccagcctacgcgtccaagcggttacttttatgaatcccaccattcaagggcaaaggtagaaggcaatccggaaggagtctggacggcaatagtccttaactctgaagaatctccattcgttgaaccgagctttattcgtgagaaattgctggagtacggcggcagggattcgctggagtacatggttaaggtgctgggccagttcccgcgtgcaattaacgggtatttgcttggtcgtgatgagtgcgaccgcgccgcacggcgtaaagtgttgctggagaaagattggggctgggtagcgaccgctgacgtcggtaatggtcgcgacaaatcggtgctcaatatatgcaaagtatccggttatcgtgagaaacgacgtgttgtgaactttaagatactggagatgccaggcactatggacccgttggcttttgccgactttatctataacgaatgcactcctgataaatacccgaacatcaccattgctgtggatgctgatggctttggttcagatacgtgtgcgcagcttgtccgccgtggtgctaaccccgttcgcatccgttggggtaaacctatgtttgcgctaagagacagagaacgctttgtcaatcagcgtgcttacgccaatattatggcaggggatgccattaaatcagggcgtatgcgtatcgatagtgaccccaaaactgccgatcaggcatcaaaaatcccgtatatgcttaacgaagaagggaaggtagcgatgatgcgcaaggagcacatgcggcagaagttaaacatcaagtcgccggacagatgggatacctactgcttcactatgctggtggattacgtgcctgctaatgaagacattggcgcagaactcgcaacattccgcgatcaggtgttggcagaagtggatattcctgatattgacatttaa

SEQ ID NO: 18261 - DNA, 1365 bp, Escherichia coli
atgacgttaattaactgggaagcgcatcgagctaagttcctggagttaagagaagaaaccgggatcaccataaaggaatattgcgagcagcatgacctcagctttaacaccgccagaaagcatctcaatatgaaaaaaaatgaggttaaagcgaaagctaaggctgccgggaaaagtacaaaacagcgcgcaaaaagcagcgccacaagcccaaaaaaagagcaaaaaaaggctgataaaagcacagaatttacaaaaactgacaaatcgttagctggtggacgattccgcgccatgccgcaaaaacaaaatgcggatcacaaagaaaagtcaattaataacaacaagatacacaaggatgtaaggggatcattttgtgatgaaatgggggagatgatccctaaaagcagcgaaaaagcccaacgaaacaagggatcattgcaaatgatccctgactcatcagctcaaagcgccactttgcctgccaccaacgtcgcccgtgagatgatgaagaacggcgcgactgaacatttacgacttgcgatacagatggcgcaggaacgagcaattcagtatcaggccatcgttgaccaggaagcggaacgactacaggaagagattgacgccctcggcgatacacagccagagggaatgcacccagggcagcgtcttctcggcctaataagcgatgcggcctactacatgaatgactttatcagtaggttggctgccatctaccagaccgagcagaagctacgccagggggatgaaaaacttgcgcagggcgcgcgccagcaggcattcagagaggctgaggccagagaaaaactggcgattactcgcctgcaagccgagcagcgtggcaaagagattgagtatcgcattggcgctgacgcacgcgccgccagagttatcgccgccgctatacgtatgcgtgagcgcgaggagctggacgatataggcgttgctgaatatatcgagcggcagggcgtcagtgtcccggctatcctggcggcacgagcggcaaaagcgatctcacttctggagcctccggtttctgacgttaacgatgttgatgatgagcaactggataaagaggcgaagcagtttgccgagcaacaagctggactcccacaatggcttgcacaacgccgggctgaagtagcgaaaatcgttgataggcttgggatgggggattacgaccggaacggagaacgtaaagccggtgaatttgaggccaatgatgaagacctgaatatagacccttccgccacggctgatatctacggtgattatgacgcgggggataccggttttgatgctgtagatgacgagattgcgatagaccagccggaggatgactaa

SEQ ID NO: 18262 - DNA, 393 bp, Escherichia coli
atggagcaaatcagtagcgccgaaatagcggatatcatgatcagggctgactgctatctgacggtcaccgaaatcaccagccgtgcaaaagcacaatatcctcaccttcatgtgtcgcgcgtaaacgtaaataacatcatacgtttttttgttcgttccagtcgtgccatttgcgaaatagacgaccgcgtatacccccggaaatattggctacatggcctgaatggataccagttcaaggtgcgcgggcgcactcctgaattcggtcggctgttggtgaaaaacaccaaccgaaagatagaagctcaattacgaaaggagcagcgtcagttggtggcgatgactaaccagctatggaacgccgctgtgaaaaaacgtgaggcttccctatga

SEQ ID NO: 18263 - DNA, 381 bp, Escherichia coli
atgtacgaggctactaaattacgcatcgaggacgcgatgcacattggttgggatatcatcacctgcaagataacatcatgcaaggctacacgcacagacgccggacacaagagcacaatatcaggttatgtcgtgatgtcagtcaggagtgtgcgcatacgcttcagatggaaagcctgccaggttacatcatcaatgccgcttaccgtcgagcaggattacttatgcttacccgaaatagacggagcgttgctggtgggcaatagtggtcgaaaagccgattttgaagccagtctgaagatggcgcaggcggtgatcaacaaacataaagggaagtgggaggcaaaagttaagcatgttgttcgtttatcccgctggtag

SEQ ID NO: 18264 - DNA, 576 bp, Escherichia coli
atgttaacggcgaacgataacgcgtattcagaagatgatctcgttttgagtgactttatagggcgacgagaatgctggacgcaaaagcgcgaggagctttatgcagcgttagttcgtaaaggcgtcaacatcgaaaccgcacagaacggtgatatgacagtggtaagtgttggactgcacggcgtaagcgtgtcagcaatcaatcatgagccgtacattgcgttatccgagtcgatggtaaggttagttaagttcctgaagtacacagaagcgaataacgtgctcatcgccaaaaagaacatcccgttctcatcggccttttactggatgatgaaggggcttgatgcccggcgaacatcatggcctaaagggagctatatatcgatgctccgtggcagtgttggcagcaaagaaaagctcgtcgaattcctgccggaagaggcattcgatattgttgaaggttgtgatgtgatggttatgcctcgcctggtaatgatgaatggggatttacaggcacagacagactggtttgcaactggtgttgatattatcgctactgactgggaggttttttga

SEQ ID NO: 18265 - DNA, 129 bp, Escherichia coli
atggatttttgggcgtttgccgataaaaacccggagtggacattattgtttctgctggtggttgcatacggggtagagcaagcggcaaaagccttacgcggttctggcaaaaagcgtaagcgtaattaa

SEQ ID NO: 18266 - DNA, 1209 bp, Escherichia coli
atgagtcagcaagtagaatcatcaagcctggagatcatctcaaccgcaattgaaacgctgcggacacaaatcgcgcttatacagaaacgaaatccgggcgatgacctgtcaaagcgactgcatgagagcgtcattgccactacagataacctggtggcggaaatcaaccagctccttgatgatggggcagttgattacaataagctggtggatcagtttgaggaatatcagcaagccgttaatgatggcttgatccgtttttctcaagtcactggtgtatcagcgacagttgaaagcctgggggatgcagttaatcaatttgccgcgaatatgcgtaatgagatcggcaatctggaggcgcgtcttgagcaggcaaatacactgcgcaaatctgctgaagtcgatttgagtcgttacaaaaaagactatccgccaagcctgacaaaacgactggatgttgcggagaaagataaccgcacgctgaaaagagagcgtcgggaactaaaagagcgtttaaccaagctaaatcagcaatgcgttgagtatcaaggcgaactcgtcacactgcgtaaaaagttagcagcggcgcagagcattattgaaacattgaaacgagagtgctcagagcttggtcatgatctgaatcgcgcctgtggcatggggcaaaggccagagacattcccgctaatgtatgacggaagagaagctattgcctatatccatgagtttccgcatggtctggtcgcggagactgggcaacgtggcgaagcgttgctgacggcaaattaccatcagcaaatcagaaccagccgcctgctgacgatggatgtgatcccgtcagtatggggaacgccgctttactaccgaattcctggcttcgaaactgactggaataccgacatagacgaatgtctggcagataaaattatggcgtaccttgaaacggattttccacgcttgcatcgccggattatggactctaaggatgcaccgatcgacgaattgaaaatgcgtccagagacgttggaggcaatcaagcagactgagtttgatacagtgttcagtgtggcctgcattccaagcagctttcatgaaagcattccgttcatgcagggcgatcgccgtcaggaaataattgatgcttgccgggtatgggcgaacgagtgggataagaagaacggtggagttgaaaatctttacgggaaataa

SEQ ID NO: 18267 - DNA, 246 bp, Escherichia coli
atgaaagttgcttccaggaaagtaaccgctccacttatacgagaggccgtaagtgaacttgagatgagtgagaatgcagctctgttatcggtaagctggctggggaaaatgacggatcaggaatactcggatggtataccccacggtgagcggcagatagtaaagcgcgcgcttagaatttcagaggtagttgtcgtactgatagctttgatttatatggcatacatgctactccaacacgtctaa

SEQ ID NO: 18268 - DNA, 201 bp, Escherichia coli
ttgcgtttacttaacgtggctgaacttatccctgccggtgctaacgttgttgctcgtcgctgctcatggcctcattctttctgtatagagcttaaaaagatggatgatggggcattagaagcccgaaacatagttaccggcgacaaggtatgcattaccccggaaagcgcgaaagccaatgattgggagtttgttcattga

SEQ ID NO: 18269 - DNA, 225 bp, Escherichia coli
atggtggcagaaggtcagaagaagggctatccggacctttctattgaccttgctcgtggtgggtatcacggaatgcgcattgagatgaagcacgggagaaaccgtctgactcccgaacagctcgtctggatgacccgcctcacggaagcaggctattactgctttgaggcgcgcagtgccgatgaagccataaaagctatcacggaatatgtaaatcttgattaa

SEQ ID NO: 18270 - DNA, 261 bp, Escherichia coli
atgcgaaagaatcgtaggtttacgatcgacgacttaaaagcgtactcacaagggaagggatacgcccttgaataccaccgttataagcgggtatttacgctgcggcatatagaaaacccttcgaaatggggatggatttattttccgcacactgacgataagctggtgggccttgttgatgatttatcctatgaaggatggatgatcgctatcgacaaggcggttacagaaattaacgaaccggataaaataaaccattaa

SEQ ID NO: 18271 - DNA, 435 bp, Escherichia coli
atgacgacattaattgacactgtaaaaccgactgaatcctaccttgaggacattttgccgcaggcgctcaatggcaggagtgaagaggcgtttctggatgcatatctggatggtatggtggaaaggctgaaacgagatccacagctttatcacctttatggcccgtggtggcctgcgcttaaaacgttattgctggagcgcggcgacatatcatttggacaagttgtagatagtgatgtggcagagatctacaaaatgagtcgcccggcgcttacggttttagccgggcatctgtattcaagcgatcgcctggaaaatgacgcggtatacaatcccgttcatgctctggaagtcgcgccttatgcagatgatacagagccatacgtgtacacaagttacgacgagtcgatagagaaatatcgaatcatggggtag

SEQ ID NO: 18272 - DNA, 6837 bp, Escherichia coli
ttggacaaaataattgattcaattagccaggccaccagcattggggcgctgattgaaattgttagtcggttgcataaaccgcgagctgtagtgacctttggcgttaagaaagtcgatggcgtcagtattcagaaaacacgccgggcagcaaacaacgccgcagtaaatcttcttaattcccttccgcccggcttcgatggggcgaaattaactgacgaacagcgtcagattcttgccgggtataccggtgaaggcggcctgacagatggtgagggcagccaatacgaatactacacgccacagtttatggcagaaggtatatgggatctcttcggcgactacggtattgatagcggtcacgtactggaaccgtcagcaggcacaggtattttccaggagacaaaacggcagggcatgataatgaccagcgccgaactgtctccgatctccggtcgaataaaccagcttttgcacccggaagatgatgtgaatatcggggcgtttgaggcgctggcggcgaaagatgcaatgtatgaccacgcagttggtaacgtaccgtttggcgaagggcgttccggcgtcgccgggcttgatccggcatatgcaaacgagaagaacgttggcaattattttgtgctgcgcacgatcgacaaggttaagcctggtggactaattgtattggtggtgccgaatggcatgactgatggtacgaaatacaaaaaattgcgcgataaagtcagccgtaaagcggaatttttgggcgcacatcgtatgccttctggtacgttcagcgaatccggtacagataccgtggtggacgtatgggtattgcgtaaacacccggaaaccttcctggagatgatccccgacacggatgatgcaacgctcaaatcggcaaacgtcctttgggataccttcctcaaagggaaatggtttacaaccgaagggaagcgatttgtttacggcgacatggaacgcaccagcttccgcaataccctggtggtgaaaaaggacggtcgtgtatccaatgagtcgatgaaaaccgcgttatcacgccgctttgaaagccgtattaattgggatttgctcggagtaactacccaggcatggcagggcgcagaagtaggggataagcgccttgtaggcggtatctggcatgagtttgatggcctgaaatgggttaaggacacgacaaccaaatcctccgcgcttgatgtaagtcgatatggtgtttcgacgtttggcgatctgcagatcgcgttccagtcaacaaacgggattctggctttgtcatgggaccagatatcggcgatcgcgtccgactatccatcggttgtcagtgatgaagtggcagcaatgattcgctttgctggcaaacagcgagaaaaagacagggagcgcgttatgcgcggtgcgttgatagggcagttgatcaacaaggcacttgatttgcgtaacctgggggtgaacgttgatgacaaactggcagatgcatcccgcctggcggcagcagaagttgcgaagtatggaccaccgcacgcgattaagctgaatgggcttgcagaagctggagctaaaaactggatgacgttcactggcaacgtgaaacaggatggttccacttctgaccttctggcagggcgacttgatgtaacggatggtgctgccggtattgactttacacgtccggaacaagtgatagcacatcttttcagtgatgtagcccttaatcctataacgctgggcgactttcgtgaggcgtttgctggtgaactgccagaggacgacgacgcggcccttgaatacctggcgaaatttgatgatatcgctattgatgggtatggctgcctgctgccgatggaccgcgccaccagcggcgatattgcaaccaaaacagcattgctgatgggctggcgtgatgcgtcaacaggtgagcagaaatcgaactttgagcgtcagttggcgaaaatcgaagagaaacgcattttcacgccactaaataaagtcaccgttaatctgaacgcccgctggctggatcgccgcttgataaaagagttcctggcagagcagggctatgacgagtttaagtacactgaacctgatctgaaggtcgtcgatggcattctggtatctccggacgattacgaaggtaaggacggggtatttaccggctatcagctacgaaccgtaaacggcaaaaacgggaatgagttcaagaaggccaacaataaagacggcttcctgaaccagttagaaaactacctgaacggtgttaaaccgcgtgggcagaacgctaacgagtacctggataaaattgctcaactggaagttagttttaacgactggttacgcacccacccgcaggcggatcagatagcccgcgagtataacgacgcattcaatggcttcattccgttcacgcactctaacgcaccgcttggcctggaagggattagtggaaagcgcattcctctgacttatcagaatgaagaagttcggcgcttgtcagaagatgggcgcggcatcatgggatttggtaccgggctgggtaaaaccacgaccgcgcttgcgcttgaggcgtataacttcgaaacaggccgcactaaacgcacgtgtattgttgttccgaaggcggtttatcagaactggtatcacgaggcacagagcttctacagtgctgatgccttcgccaatatgatgtttatcggtctggatgaagttcgtgatgaagacggcaatattctgaccgcgccggtgcttgatgaaaatggcgaaccacgcctcgacagtaacgggcagcctcttaccagaaatgttgtgaaagagtccgccagcgccgttatcgttcagcgcatgaacatgatcccgtcgtcaaattggcgaacggtcatcatgacaaaagaacaattcgcgtctatcccgctacgagaaaaaactatcgaggagaactcacagcaagctgtctttaatgctgtggaaatggggcgtcttgatctggcgtccggtaaacaccgtgatgcgcagaagaagaacaagattaaggatcaggccgcgaataccggtacaacgaagaagcagaatatcccgtactttgaggatatgaacttcgatagcgtgattgccgacgaggggcataactaccgcaactcctttaatgccgggcgtgaagcgggacaactggcatatttgcctaacccggcagtatccaagatggcccgcgacatggctgtaaaagctgcgtacatgatgaaacgcaacaacgggcgtggtgtagtcatgctgacagcaacaccgctggtgaacagtccgattgatgccttcaacatgctgtctactgtcattccgcaggaagagtggatgcgcatgggcatcattacgcctgatgatttcgttcgtgtgtttggtaaaacagccacagttcaggtccagaaaatttccggggaagtggaagagaagcaggggctggttggcttccagaaccttgatggcctgcgtggtattttccatcgctggactactctgaagactgctgcggacgtcggggcgacggttaaaatccctgatattgtcgagaataccttgcagatcccgatgacaggggagcaggaggctgcttatgaagagcttcgtaagcgtgcacaggagttaagtagtaaagatgcgctgacggttgatgaaaacgggcatatcacaaacgaaaaaccggatgatttcatcttctccatcatccgcgacatggataaggttgctatagatccggatctgtatgccagtgcgattacattccagttccccgttgagcttgcagacaaggtaaaagctattgctgatgccctgccaaaagtagctggcggtaaagtggcagatgatgcagacgaggccgaagaagacggcgctggtgggctggttagtacgcgcaccagtaaggtagtgaagaccacctttagtgaacatccggcgcatgttgaaatacgtgccagcattgaactggaagctgaaatactgaaggccattgctgccgccgggattgatctgcagcaggtatcacaccccatcccgccgaagtatgccgcgctgatcgaaaaccttcgtgaaggtctgaagaacggtaaacaaattgtcttcattgatgaaaaagcccagcaccagaagctgcgccgtattatcgccagtgcactgcaaatgccggagcaggagataggcattatcaatgcgacgaccgttagccaggctggcggcatcaagctgaagaaggtgaataagccgactgaacctactccgaataaaaacggtgaatacaaagaaggggcatgggaaacctactacagcaaacttgcccaatatgaggattatctctcagctaaaaatgatgctggccttgagggtatggaaggcattgccgccgactataacgaagggcgcacgcgtatcattatctgtaacaagaaggctgaagtaggtattaacctgcatatcgggacaaccgatatccaccacctgacactaccctggacaccagccagtatcgaccaacgaaatgggcgcggtgcgcgcgtaggttcaccgcaagagaaggtcaatgttcactactattgtggcaaaggcacattcgacgacttccgtctggatacgctgaaacgtaagaaagactggatcaagatggtgatgacctccgacatgtcagagatcgccaatggtgatgcggatgatgctgatgaacgcgccattatgctggcggcaaacccggaagaacgccgcgcaatcatggctcgccaggcgcaagagcgtgaagaacgtctgaaactgaaagcacagcgcgaggccaacaatgcactcgatatctacctgaaagcggcaaacgccgctggaaaagatatcggcatgatggagacagaactgaaaagcgcgatggaacagatagagtattaccagcgaaatcttgacgacctgataaaagcgggtacgaacaggaatgggcaaaaattcgcgcttgagcagttgagtagctacagaaaacgtgcgcgggtgctgcggtttgcgatcaccagggcaaaagacgcggataccataatgaaacgctctcgtggtgatgtggagcgcgctattaagtctggtgtgctggatatcagtatcgatgttattcagaacccacaggaatatatgcgcactgacaagaatatcctgttgcataaaggtagttattaccgtgcagtcattgatgatcgcgaaacaacagcgattgtccgggtggaaaaaattgacggtgaaaaagcacaatacctctgccgtatcgcctggctggatagagcaagtcgttacgctcgatcaccggggtcaatcgttacattgccgtttgactctgtgattgaagcggtaacttttgaagagggggtagctgaatcgcgcgcaacggctgcgcgtggtgttcagtgccaccagctatcaacaatacttactcgcgatcagttctatgatgctattcgcaatggggtaatgaatgttattgctggtaaacctggtaatgcatggggcggtgggtcagctattaaatactgggcatatcgcacagatgatggtcagatcgcgctgtcatcggcctatgatggcgtgataggccaaaaaatcgggcgagcatcggatatagcacctgaacgatggatatatccagatggcaacgatgaggcgctgaagcgtgaagtggcaaaaatacaagccagtgataacccgctgaatatcgtggacggtgagggattcctccaggcattgtatgggtatgattacatccagggaatgcaggcatggggcgcacaggcaacgatggatgatgttgcccaggagttcgaaaactggatggctgggcgtggtctgtcaggtcgttcgcttaataaagtcacttctgaagatattcttagcttgttccgcaaaccgtccggagaaggtctggaatcattctggaggaccgtgctggcataccgtttattcaagggcaggatgaaagcctttagcaatatcgatgatattgaacggatgtttaatcaggtcaagatcgcgaaaattaagacgaagatcgaaaaaacacgttctgcgctggtggcctggcgcgatgcattgtttgagcaatataaatcactcagtgatgcagatggatgggcggcactggaacagttggcgaataatggggtagatggagcgaaactcgccattgtccaggctgataaccccctggaatcaccggcagcacagtggattaaggtgggggctgtcatcaatgcatttgatgaaaaacacattagtaaggacgattttgctgatgctgtttctgttaatcgcctggtagaaatggctacccgccgcgcccgtgagttgaaagacggtgactatgtgaatgagttgccggatgcgctcaaatcagcaacgtggcaagactatgtatcgctgaaaaacggcggagccaccgaatcagagatcgcggaaaggcttgaacaggctgaaagcaaaagagaagagcaggcggcagtggcagaagccagagctgatgaagcggcgaatgatgactatatcattgtggttaatgataagccgattcgcgctaaggcgcgtgttcgcgggcgctggtggagcgtcagcgaggacgttggcgcggtttatctcattgccgaccaacctggttcctcgacaatacggaacgccaaagacgcgattaagaagattggcgggcgtttctggaattttgaagcaaacccggttgctgatgtgaactttgaccgtccggcatggatggtatctacgcgttactcggtagatgaactgcgtaaaataatcgccgatgcggcctaa

SEQ ID NO: 18273 - DNA, 498 bp, Escherichia coli
atgaaaaaagcaatattagcgactattgtttgtgcatttgcattatcaggatgtgctccggttcagacatacaacaagcctcagcaagtaaaacagtttgttaaacgcccagcattccctgtagaggaatatcaggcattgccgaaaaaaggcacaggtaaggttaagggggaattatttggagtaactcgcggaggggatgtgaagattggtgctggctccaatatcatactgcgtccgtatacttcatatatcaaaaatacccccaaaattgattacgacactcagaccttagaaataatcgacggcagggttgcggaatatgacagaactgtcctgactgatgctcaaggcaaatttgagttcgaaaacgtaccaccaggccagtatgaagtgattggttcgttcagttggtatgctggaaatttcccgcaaatcgttcttctgaacaaaatcattaccgttaagaacggtgatgttatccaggttcaaccatga

SEQ ID NO: 18274 - DNA, 486 bp, Escherichia coli
atgatcaataatgaacctcgctggcttattgaagcccgtaaaaatattggagtcaccgaaataaaaggagcgaaacacaatcctgagatcgtccagttctggcgggatattaagcgcagcggaattaaagacgacgaaacgccgtggtgcgctgcatttgttggtgcaatgctggaacgtgtaggtatccgctcaacaagatttgagtcggcaaaatcctatctggattggggcgagaaattagatacaccggcatacggatgtatcgttgtatttactcgcgcaggcggtgggcatgtaggctttgttgtcggacaccgcgccaatggcgatctgcttgtcttgggtgggaaccagggggatgctgttaatattcgcgcattcccaacatcaagagtgtctggctatcgctggcctgctggcgaaccacgcaatacagctctgttaccagtcggagacgcagcaacctcaactaatgaggcataa

SEQ ID NO: 18275 - DNA, 198 bp, Escherichia coli
atggacatcatgcaggcggtaaaaaaaatcagggaaggacaggctgaagtgtgccgccgtaaagcatggagtgttggtgtatgggtctggcctgataatagctctactactggatggttttgtattaatggataccagatccgggaagtcgatttatcgacggcggatgcagtcggtaatgattggatcgtaacttga

SEQ ID NO: 18276 - DNA, 708 bp, Escherichia coli
atggatatctgcattcttgaaaagccatcaatgaccagcattgagatcgcggagctggtgggaaaacgtcatgacaatgtgaaacgcactattgagacattagccaaaggtggcgttattgttcgtcctcaaattgaggttttcgaaaaaatcaataacttaggactacaccgtagtgttgaggcttacgtcttcgaaggcgagcaaggcaaacgagacagcatcattgtcgtcgcgcagctctctcccgaattcaccgcccggctggtggaccgctggcgcgaactggaagagcaagtacgccagccgttgaccgaaatagagatgatcgctgcaatggctgcgaatgcagttcagcagcaaaagcggcttcatgctgttgagtcaaaggttagcgaggtcgctgaaaccgtcgagcagatcaagaagggcaacatgccggaaggttacattggctatcgccagttagcggcgaaatgtggcctgactgaagccaaatgccgtaacctggtcaacgcttaccggatccccacagatacgcatgagtttttgacgccagagggggtattgtcgcgtcgtactattgtggccttatctcccttcatgaatgcctttaccctgatgatgtcggaggctgaacaccgaggaaaacgctggtatcacccaaggatggggcaattccaggtaatcggttggggaggcgagtga

SEQ ID NO: 18277 - DNA, 225 bp, Escherichia coli
atggttaatgccaatccttgctcacgtccagaattcatctggcgtttccactccctgcaaaaacactgcgatcacttcgcaattgccgcaaccgaaaaagaagcccgttctctgatccctgatcagcatggtgttcttactggtcgtttctctacttccccacaaccaaacactaatccctggtatcgcaatattaccaatcccggcattgcggaggcacactga

SEQ ID NO: 18278 - DNA, 960 bp, Escherichia coli
atgagtattttaaattcagttccagtaactttcaacacttctgagtataaaaacaacactgaataccacaaaaaaatcaaaggtcatcagttgagtttttttgctcgtcatagcggttttctttccccttcacatagcgccattattgccgagttcgccaacctggcaggagctaccgatgaatacatgatccgtcgctcatatgctgatatgtccgagattacaggacgcagtatttctactgtgcgccgggcatttaccgaagcgacgaagtgcggaatgcttgttaagcagcatcaggtagcgaataacaatgctcaggtgtgtaacgtgtaccggtttacaacacaatttctccacttcattcatgtagcaatggagatagggagtaagcagggcatcaaatttgccaacgccacaaagctggttaagcaattgatttcaaaggttcgttatttttttgaaactgggaaccccctgttcaaattgaacaagtccccccatgttcaaaatgaacagccaatagaaaataagagtcactctatagccaaaagaagagaaagatcatgtgcggttcagccaaaggcttcaccagcagatagttctcaagcggataatggttttctggataaaaaaccagtaatcagggaagaacataccaaccactgcctggcggcagcaaaagcgagagctgcaaagcgtcgttcagacgaggggtacgcaaaacggcaggctctgtatcgtaccgctgaaaaactggcaaaaaaatttgcatggatacgtagtgctaccacggtgaataagcctaaacgatccagcgccctggatttctctatggattattctggttcccagggatgtgcaaccatcaatgaagcatttgacctgatgaaacagcgtggctatcggtctgaatttgaccgggaagactggtcaattccggagggctttcggggatga

SEQ ID NO: 18279 - DNA, 999 bp, Escherichia coli
atgcaatcactgaataccgttacggatcgcttctccctggtagagaaaatccgcaaacatacaccgcagaacaaccgaaaatacattattgaggctgtgcgaaaaaccataacatcaccgctagttaaagagcgcatggctcttggtgagctatttggatattacggtcatggtcgccgctcgatgtattacaacaaaactaaatcactagatttgccagaggtttgcgttgttatgatggatggtaagcctcttcttctggaaaatgtgccatctaacagaacagttgatatttctattgacgataatggtgtcattacgcacacccaagaaattcttgattcatatacagggcatattgttcaaggattgatcaactcaaatgctggcggttggtcatgggcgactattggacctgattctttcgtgtcaatagtaaactcctttcatggatttgattacgttaccgtgccgaactatatcagcctcgataaacagataccgatgatggagtccgttgaagagcgtgaagctgttatgcacacgtcgctgatggatcaaggtttcactgacaatcaggctacagatattgttcatcactttgcacaaatgcaaagtcaacaagcaatgattgaatcagcacagcgtgaagctctggaatcggaactgatacatcttgaagtggaaaatatgcagcttcgcgacaaactacgcgaccaggccgcgatgatggaaagccagggggagaacgcgaagaaatgccgccgtattttgcgtgatgctatccaggaaatgcctgtttttatcagcgcagaacagcgccgggcgctctgccgtatgcagtcagaggatgatgcacgcattgtcgcagcgatgcttgaatccctaggggctaatgccacttatggtctgccaatatcagccaataaacaacaagaaataccggtgaaagagaacaagacggtgactccgctgatctttgtgtctaagaggatgtga

SEQ ID NO: 18280 - DNA, 1686 bp, Escherichia coli
atggcaacgaaagacaaaaacaagggctttctgtcggcattgaagaaagccttcagcggtggtgatgttacgcctgccgatccggtcgtatttgcgagcgggcatagcgtcgttgctcgttctggcctgtccgccttgcgtccaggcatcctggggagcaatagcgatggaatgacaagcgcggcggatacagtatctatatcggcagaattaccgagtgaccgcctgcaaaaatacaacatactggagacgatggcgaaaagtccgactatctccacagcattaaacattcacattgcgcattctctggctccatcaaaaaaaacaggcctcgcatttattctcgctccgaaaaatggggcggataaggaggctgtaagtcgatgtgaggaattgaccgctgatttaagctcaatgattaatgatggccttccatcgtgggccatgatcatggctattttcggtgtgtcgtatatccgtccatatgcagagcaagggaaggggataactggaattgagtcgagctattacacgctccctcatttcgttcaggagttttatcgcggtagccaacttgtcggattcagcggtgattacattctggacacgcatactttgcgcagagttataaccgagccgtggaatctggtttccatgaaaaacccgtactggacgcctcagcataaagtaatgccagtaacttacggcactacaggctattccttgcttagtgaacagcaggacaagccgttaatggagacacagaactacggtacgtcgtttcttgaatacagttatgaaccctacctgaatttatgtgccgcgcttgctgcgctgaaagcaacgcgaaacaacgctgcaaaaattgatcgcctgattgcactcacaacgaacacgatagatccggtaaacgcggcgaattatacgcgcggggtcagccaggcactgaagcgccatagcgacctcgtagcgcaacggtcaattaattctaatgctctcccatctgtacttaaccatctgatacctgtcatgggggatgggaagaacgggatcaccattgatacgcaatctatacccgcagatatcagtggtatcgaagacgttatgtttcatctccgacagctcgcggcaagcctcggcattgacgcaacaatgcttggctgggctgatcagatgagtggggggcttggagaaggcggttggcagcaaacagctatccaggccgcattacgcgcgaactggatcagacaggccgcccagcggactatttatcggcttcatgacattcacctcgcttataaatacgggaaggtttacaccgaaaaaaaccgtccttatgacgtgcaattcaactcaatgaacacagctatccaggaagaggaaaaccgagagctggatgcgcgcgccaacttcgtagctgtcatctcgcaaataatggaccagatccagaacaacccgaaactggcgggtagcgacgcgtttatgcgctatctgttcaccgaacagcttcgtatcgacgatgacactctcaacgtaatgatcaaagagtttaaggcgaatgaatcagagcaaaacaacgagcatggtatgtacgaatccgcgccgttgtcgtccggtgacgatccggaaaactggacgcaagaacaattaatcaactttgcaaaatttgtgatgagcaataattaa

SEQ ID NO: 18281 - DNA, 432 bp, Escherichia coli
atgtttaactatccggtaaaactggagcgcgacgacaaaaccggcgcgtatgtcgtatcatgccgcgacctaccattgtttaattccgtgggtgactcagttgaagaagcgttgcttgaggctggttatggattggtcgcagcggttgcgattgagattgaagaacgccgacctgttcccactggtagcgagccaaaagaaggtgagtacgttgtctctttgccagtgctaccagcaatgaaggctgcactccacaacgcgatgatagaaaccggcacacgcaaagcagagttggcgcgcaaactcggaaaaaatggaacacagattgatcggcttctcgacgtcgaacattcatcgaaagttgaaactgtcgagttggcactgcatcaactgaataaaaatatcgccgtatctgtcacaccaatgcggtga

SEQ ID NO: 18282 - DNA, 1386 bp, Escherichia coli
gtgactcaaaacgtaacatcagcacttctagccgcagcgaacattgagggggttatcgctgtggtgtcatctcttgaaaagcaagagacgaagttggggcgtagcagctatgtcgtcaccagcaaaggcgacgaagttaaaacagcgttcaaggttattgatgccaaaaagctcatcatttctaacaacctggacggaagtataaatccgtcatttccggaggaactccagcctcgcgatcgcacccgactgtcaagtaagctccaggttaaccgtatcgccgccaatttacgcccggcacaactcactgattcgggtatgagtagtcatggttccccgattgttggtccggataatgtcgttgagtctggtaatggtcgaagcatgggaatctggcgtgcttatgaacaagggcaggctgaagattaccgacaatatcttatcgatcacgctaaagagtttggccttaatcccgaagacgtcagggcaatggtgatgcctgtactggttcgcgagcgcctcactgacgttgatcgtgctcaatttgcacgcgactcaaacatcagcgatctgcaagagatggctgcaagtgagaaagcgtatgcggatgcgcaatttctcactgagagcgtcatggcgctatttaatccttcagatgatggcaatctactggcgcggtccaatgatgcgtttattcgtgcgtttttgcacgaaataggcgataccgcgacggcaggtttgcttacagccgatggacgtccaacgaaacagcttatcgatcgcattcagaatgcgatttttgccaaagcctataaggatgagcgacttgttcggcttgtggcggaagaaccggatccggaaatgcgcaatatcctgaccgcgcttaatacagcagccagtgactttgcgcaaatgcagtcgatttctggcgatgcacatcatgatgctgtaactggtctggttgatggtatagagcaggtgaacggtctggataaacaggctatagcagcactccaggacgcgattaaccttgttcgtgaagccaaagacaacggtcaggcagtggaagaggtgatagcccagcgcggactcttcggtgatagcacgccggaagctgaggcgttggcgctattcatcgtggcaaataatcgaagcgcgaagcgcatgggggctgcattcaaaaaaatggcacaaaaaatcaacgacgaactgattcataaacagcaggcgttgggcgatatgttcggcggtggagatgtcgatctacgtagtattttgaccgctgtttctaatgagattgaactggaacatggagaggggaaagggcttaacttcacgatgttcgaagccaaaacagaacaaagcgattttgggctggaaacctga

SEQ ID NO: 18283 - DNA, 369 bp, Escherichia coli
gtgaaaatatcagtaacggagcgccttagcttaggcaaagaactgtctgagctgatgtcagcgcaaaaaagcgcgactgcggtacaacgtgtcactattggcgtgcggatagttgaagtgatgatgaagctggggcttggttcatcgaataatccagcgcaacagcaagaagaggaagtgcaaccggcggcacaagaaacgcctaaaattgttgttgacttccttagtggtgcatttactaaatcatcacaaatggagttcatcgatgctttgagaggcatatctcaatatattggtgaatttttgacactcgaccaggccaaagaacagaccgtaaactgggtttcagctaacgggtatgcagcgtaa

SEQ ID NO: 18284 - DNA, 1959 bp, Escherichia coli
atgataaagaaacctattcgaataaatatccagtccacttttgcagatacgctcactggatatacgcctaatcgttgggtggcggaagatatcaccgaggatgatttacttatcgagcctgcgacgctggaagatatcgagctggcctatatgggcaacgaaattttggtaactaccaatgaggcaatgttcgaagctataaccacaacaaaattgcggttagcgcaaacaatgcgagcatttgtccgggcgcttaatcgcggcctgaatggcactgacattgctgcgggtacggatgaggcaggtgaatatgaagacggacgtaatagtatcggtggggcaatcattgggcgcgtgcgccgggttgctaatatccctgttgtaacagcacaaatacctctaaccgatgggcaaacgacaagcataattttccattctccaaccgcagacggcacaagaattaaaggggatgacgagctggttgcgtttcagtttcttcttaacaaaagaaacgttacgcatgttgttgcgccaatcggtgggcgtgatgtatctctgagccaggtatgccaggcgctttctaacctcattgagcgtaatagtgcaaaattcaaaaaagcaaaggagcgccaggacaaaatgaaggctgatattgaggggtatctcaatgaagccgacaagctggcagaagaacgttctgtgctgattgagcaggttgaagacgcacagcggaggctggcagagaaacgctcaacactcaatgatatgcagaataaattagacgcacaaaaagcccttaacgcggaattgcaggctaaacgcgataatttattgtcagctaagagccaaggaactaaagagcgtgccttcaatgatcaactgcgacacataaaacataatcttgctacagaaggccaaacaaagctggataatggtgctgtagttaagtatgtcacgtcaggcagtgatagctttgtcacgattgaggcaccagaaggcaatttcagtattgatgtcagtgctgttaaaggtgggagttcagcggacgctgcaaccaaattacttaaagcctatcgtgaacataatgctgatcaatacaaagtggatgtgttgccgggccagcctgagccaactgatcagccgcagcctgaacaggagccacaaccagaatcacatcctgatcccctggaggttggtaaatatcgctatgcgctccaatctcgcccggcgggtgttggtgcggttcctgaaggaaataaagctgtacttgaccgtcctgatcaggctgatccgtattacgaatatgctcgtcacggaatcattacgtatgaccgcaaactgacagacgaagaagtcagtcagtacgagttgctatatctccctggtgacgatgaattgaaagagattgcaggcgaattggttgcgtccagtatgtcgaaccatattgatggctatgttgatctgtttggaagcgacttgaaaacctttaaggcgcagataaaaatcctcttccgcaaagcatttcctaacgtcgcttatccacttggagatggggagaacctttttataatggatatctatgacgcgcttcagaatcaatcagaagtagtcgaagctgaacagacattagatcaggcaccggaagcagtaccagaaccagtaccagtacctgagtctgaacctgaatccccccaagagtctgatacaggttcagatgggccagtcgttagtgaggctgatcaggaggcggacagtgcgctggaatatctgaaatccgtgccgttgcagtttacgtcccgtgatttgacggtgattagagcggagtttgatcgcattcaggaggcagctaatgttcttatcaacgcaggtcgatatgatgagaacgagtcacttgttggtgcggcagccgatcacctgatcaacattttggcagagatacaacaagggggcgtgtggtga

SEQ ID NO: 18285 - DNA, 618 bp, Escherichia coli
atgtcaaataagtctaattatgttcttcttaattatgatgagttaaacgaaaaggggctggcaaaactcgtcaaagaaatcggtaaaggaggctacaagatagcgagggtgatccccgccagtaatggcaggaagaaagacgggatcatgacgcgcacgtttacccttatcggaatcgatgagcagacgatggacgttcaggttaatgatactggtgatatttctggtgtaaaactgaacggaaaaattgttcctttcaagcctgttaaaacgctgacggctttagggcaatcactggctgctttatttaataaaggcgcatcatcatttcagaaatcattggcgcgtaagttagctcgtgcggcgaaagatattgatgatgggaataagaaaataaaaggcgttaagtccaatgcgcagaaactagcagaggcaaaggaatctcgcgatgcgatccgcgaggatattgaaagggccaaagaaaaattaaatcaggtgcaaggtaattcagaccgcgcaacaagagaaactgaaatcattagaaccgagatggcgcaggaactggcgaaaactcgcgtattgaaagaagaaatagcgcgcctggaggaagatgcatga

SEQ ID NO: 18286 - DNA, 447 bp, Escherichia coli
atgggtgactttggaaattatttcatttttatcatggcatttgttgccgttattgaccgtttcttatttcgtcgcaagagcgttgatattttgagcattggcgaagctgtagtgaaagagtctgctatagcgtttcctgtgtcgcttcgcgttaagcgaagctgggtaagcaatgcacaaatcgaatattggttgcaggacttgaaaaatccatctgtggttatttcggggaaaacaagaccagttgacgcatcaaaacgtggtgagagagaagaatatttgctcatcgacacgaaatatcttgagccagcgaagtgggatctaaaggtcacattgactaacggtaattgccgcctgaatccgctttatcgcattttccctatcaatgactgcatagaacgccagtttatgattgaaaagtgtgaaggagactggaatgtcaaataa

SEQ ID NO: 18287 - DNA, 327 bp, Escherichia coli
atgtttgcagattatgaaaatctggctgtagcagtcataacatccctgctgagtggaaccggcgtattccttctcggagttagagacgggcgcatttctgcgtcactgctcaacctcgcgagtgaattgtttactgcggtaactgccgggcttgcggggttttgggtggctgatagctatgaatggccggaaggcatcatttactgcgttgttctgattgccagtaacaacggaagtgaaattttacagggcttgaagtccagagctagtaacgtcttgaatctcttaagcgtaatagcgagtgggggaaaaggtggagagaagtaa

SEQ ID NO: 18288 - DNA, 573 bp, Escherichia coli
atgcttattggttacattcgcgtatcaactaatgaccaaaacactgctttacagagaaatgcgcttgaatgcgcaggatgtgagctaatttttgaggataaaatgagcggaaagaaggctgatcgacctggtttaaaaaaggtactccggatgctttccaaaggcgacactcttgttgtatggaagctagatcggctcggtcgcagtatgcgtcatctggtagtgctggtggaagaactgcgcgaccggggaattaatttccgcagcctaacagacagcattgataccagcacaccgatgggccgttttttctttcatgtcatgggggcgcttgcggaaatggagagagagttaattgttgaacgtacacgagctggacttgatgccgctcgcgcggaaggacgaataggaggccgccgcccgaaataccctgaagaaacatggcaacaaatgcgacgattgttggagaatggagttccacggaagcaggttgcaatcatctatgatgtggctgtttccacgctttataaaaagtttccggcgtcatcattccaatcccaaaccttggtttag

SEQ ID NO: 18289 - DNA, 465 bp, Escherichia coli
atgtcgtcgctcatttgcggaataatggaaaatggcgcgaactatatagacgttgcattgtctccggcaggcaatatttctgaccgacgtctgattgcatttactttggatggaaatatcaggcagttgattccccaaaatggatggagcattcagggatatacaaaaaacagtgattttacccaggcgatggctgatgctggttgggtacgttttccaaatggcatcatttttcaatggtgttgggggaatactgatgccagtggctgggcatctgccccgtttcctattggctggcctgtacgttgctttggtttgttagcctgtaacgttgctggtgactcgatagcaagtgcaattgcgggtgttaaaagattaaatgatcgcgatatgcaggtcacgttaatggaaaggtctggggttgctgtttctaaaccattcttctgtattggtgtggggtgttaa

SEQ ID NO: 18290 - DNA, 462 bp, Escherichia coli
atgtccagtaaaatactctatagtgccgggaataatacgtttttctttgaatccatgaaaccggactatgaaaagtcaggcgcatggcctgacgatttagtggcagtcacaaacgatatgtatgaagagtttacgggaagaccgccagagggaaaaaagagaggcagtgatgaatctggtttccccacatggattgatgtatcagaaccaacaacagagcagttaatcgcattaaaagagcagaagaaaaaggaattagccgagattgcgaacacagaaatagcctggcggcaggatgctgttgacgcagggatggcgacagaagcagaaatcactgtgctggctgaatggaaaaaatatcgtgtgctacttatgcgtattgatacatcaaccacgacggatattgagtggcccgctgttccggatgggaaattaaacgttagcgcgtcgtcagttctttga

SEQ ID NO: 18291 - DNA, 423 bp, Escherichia coli
atggcaaagtattacagcaaagagactggtggtttctacgacgatagactaaaagaagattacgataaaaacggttcatggccgtccgatgctgtacatatacctgatgacttatatgatgaactgttatcagggtatggcaatgggaaaataataattgcaaatggcgatggttatccaatgttatctgacccacaacctatgagcttagaggatagagtcagcattgctgaaaacaccaaaagtagtcttattaatgatgtgagcataaaaatatcaacgcttcaggatgctgttgatatggatattgccactgatgaggaaatagaaatgttgacaaagttaaagaggtatagagttcttcttaatagagttgacacttctgttgatgcagatatctcatggcctgagatgcctgcataa

SEQ ID NO: 18292 - DNA, 447 bp, Escherichia coli
atggctgaaactttaaaatctcaaagcgattcaagtatttacaaggcgcaactcctttcttactactactctcgccgtgcagagtctgcaatcggcaggggtgagcgttttgttatgacaaaggcttattggtgcaagtcagatcttgtgacggtaaatagtgctggtggctggactatttctgatattccgctcgacttcaagttaagtgatgcacagcattttgctgaatccaatctcattctttccagcctcgatggtgtcattacgattaatgccgcttttccacaagaaacgatgccggacgatacaccttacgatttcaatacgctggttctcgtagatgcagaggatcaggcttttggggttgtttgcactcaacaggacaccttattcaaaggtaagcgatacagcttgctcatgaccattgaacaggtcgagggataa

SEQ ID NO: 18293 - DNA, 843 bp, Escherichia coli
atgcagaataactggctaaaagagcgtcttacgcaatttaaacaggattctaaattgtgggccgcctttgttgatacgattcaggacgtgtggaatgaatcggttgaacctattctcacgcgaataagcaaccgtaaatcgtttttcacaatggcaagcgaggatatggacactcgcattgctgaatatggtcgtttctttgttatcacagaaacggacaaaacacgcaggccaatgctattagctcaacgactggatgaggtgcacttcaaaggaacagtaaggccgatagagcaaacgttctggcgtgaatttggcacaatccccgtctcatgggaacctttgtatgcgcctgtcgatacagaaaaacatccctatggttcattcttcgcgaccgcaaatgaaataccgaccgctcaggcacaatatggtgagtttttcctgacatccagagggctggttgtcgtcaaccaaaataagctgtatcgagcttatgatagcgatgaccgagacgttgctgtacagaagctacttgctgattttgatacggttatagcgccgctattgccattgcatatcgtgtttgatggtgtttctttccagttgagcgcaacattgccggaaatggcggagatcctgaattgcttatctgcggaagtgtcctttattgagggggtgtacacgacgcaagagatggtcgatgaactatctattagcgatacgaccattcaattagacggcatccagttcgcaggaaggccagaccggacgacggaaagagtgcttcatctcgatgaactcccgctcgacgcctgggcgctggattataattttgcaccttag

SEQ ID NO: 18294 - DNA, 1431 bp, Escherichia coli
gtgagtattaccgaattactggacaagtttaatgccaagctgaacgaaaacccctggtgggcgcgatttgtaaacagccagtttattcaaatgcagtccgtttttggcgcgcagattgtttatattgcgcgtacatttgcaagccgtgcacttacagaaggattcatttccaccgcgacgcgcagagcaagtattctcgcggcagcggaagaccgtggctatgtcggtcgtttggtcgatgcgtcatacggcactgtttccatcaccaacaaaaccgacagggatattacgctacccggaggggctgaattactgacaagtgaccagacaccaattgcaacaagcagtagtgttgttatccctgctggtgaaacagtatccggcatagaagtaaaacagcatgaagcagtcagcataacgttcgacgtggtgcaagaaacaccattcctgacgttgttactttcccgtgagttaacagcagaagtcgccagcctggaagttgtcgtgataactaatggtgtcgaggaaaaatggacacataaccccctgttccgcatgtccagggataacagtaaacattatgtgttggtttataagccgacagaacagatcggcgtgcgcttcggtgatggatcaatggggatgatgccagcggcagggagtcaggtacgcattgatattatggcaagccttggtgattacacgctggctgaaggccagaaacttgaaccagcagggaacatctccgggtatgtcgaatcactggaagtaaaaaccgattcgatcatttctggcggtggtggcatggaaactaccgaggaaacccgaaacagggcgcagtattatgtggcctacgatgagcaggttgtttggggcggtgattaccgccagttcattcagaacgtggtcagtggcacgtcatggcttaacgtgtggggggaggcgctacaggagaaaataacgggctttgatgtgcgtaatatcaacaaaattttcttttgtgggcataagcccggcgtaacacaggaagctctgaaaacagagatattatcagcccttgagagtatccctaatgagctgaataagaagttcgaatacgtcgccaccaatgaacagccgttcaacatcaaatttaccggtatcgtaaaaaagagtgtgctggtggatgacgcgctaactgcaattaaagcggcactggaggagaacttcggtaaagactccatgtcatttagccagctattgcagagtgatgacgactcacagcaatgttatgcacaggtcaaagtgaaagatatctggcgagtaatcgaatcgctggatatgttcctgtcttatgacgtggctacgcagaacatgaaagaagctgtgtactttaatgattttgtttatctggacgtggaatcatcaacgttcagcataacctatccgtaa

SEQ ID NO: 18295 - DNA, 375 bp, Escherichia coli
atgctttatgagattgatgcccgccttcagacaaacgagagcggggtggtgatcgctgaaggcgacacaaacgcctggatagcccgactcgatgaatggctacggacaccaaatggcagcgtttacggattgccgtcatgggggaatccgatggaggagttcaaacacgaacccttcggttctgatacgtcacacattgttgaagtggcgattgaagcgcgaatgatgacgaagctacagcaggacttaccagggcttggactccaggcgatccgctgcgcgactgtctctgaagaccagttactaattagcttccaggcaaaaggaggcaccgtgaatgttgttatgcagaaagatagcggagatacagcgtga

SEQ ID NO: 18296 - DNA, 3768 bp, Escherichia coli
ttgaacgataaaaaagaccgaatagcgataatcgacgcaatacaaacggcaaacgcgaaagagctagctgcgctttcagaaataaaaaaagcacttgagtcttacggacgcaatcctgataccagcgacgcaccacaaggacgcgtaagtcgtcgcctggcccgaacagggaaagcaggggcgcaacgcaacagtttcacacaggggccgtataaagaccgactccctaccaggaagcagagattacgtataaacaacactagcgagatagataatccgcaaaaagcagcagcagatcaccgcaccgctcattcggaatcaaaaacagcaccgctggctgaaggcaaagccacgaagtcatcgcctgagcgcattcagttgctcactcctgacattcagcctgcaaggcaagaacaaccagttagagaaagccagagcacctctggtgcaccgttacgggatagcaacggacgatttgcctctcagaaaaaaaacgaggatctcgcacgccagaatgagctacgcgcacaggcaaaactacaggttgggttcctgcgaaaactcggttccattatgggggttgatggttcagggaaagccgacgatggagctgtaaccgatgctgccggggtaggggctggtggtccactatggatggcagcacggggcgtatttgatatcagccgcgagattactggtaaggctaaatcattgaaagaatggatagataatggcaacgacaaggcggctggcgcaccggtggtcgcaaaagcccccgccattacttacccggcacctgacaatgaaaggaagactccagataacgcgcccggttcagcaaaggcatttactgaagccgttaaagaaaaatctgtacgtgcgatcgaagaacaaacgaaagttcttcaacgcaacgacagccagataattgatgagctggaaactgtatccgaagagatccggaaactacgaaagtcgcaggagagtgggctaaaactgagcgacctcctcggcggtggcagattacgtaccaaaatatcccctacacgcggtcgtagcagtgcacgtggtggcaacacgggccgcactggagacagtaaagaaaacaagggcaagcagggaaaaaacaccagcaaacctactgagacgggcaggagtcacgaaggcaaagaggggaaaaaaaatcagccaggcaaaaacaacagtgcgggcgaggaaaaaaatcggacaaaaaatgctggtgggaacgagggtagtacctcaccaaaatcatcgggtgataaatcttcagttaaaaccagagcaggtaaggtcactgaagaaagcgtagccaaaacggcggctggtggagcggcagggaaagacgctggtaaagcggcaacttccgctggggaaagccttaccaggaaagaggcgggtaaggttgccgttgccactggtgaaaacatcgcgaaaaaagaagctggaaaagtggctctcaaagctgccggaggtgttgccgcaagggccggattcagggcgattccagtcatcggccaggtggctatggttggttatgatgccgtagacggctacagcgacacagaagcgcagagggcgacttataacctgaaggaagggcaggacgttacaacacagcaaaagagcgcctacgccgctgctaacgtcctggatatgggcggtctggtgacgggagcggctaacctcattggcgaggggatgtccgcgctaggctttgaaggtgtcggacaaaaacttcagagtcttgataccagcaatatcgctcgcggcataaatagttctatcgacgcgtcgaagaacgcattcagcagcctaaaagaatcgttctcatcaagcagcgaaggcactgcgcaggttaagaaagccgttgaagatggcaccaagcaaacggtagccgcaattaatgatctggcccgacagctacagggcgggcgcagaggtgaggatggcgtgggtgaacacggctacaaatcgccagacgaatttaaagcgcctgaaaaaaatacaataacggctgatctgaatataggcggaagcaacgccaagaacaggaattaccggaataacaacctggggaacctggtttttgcaaatcaggagggggcggtactggaagcgccgaacgcgaaaggcgaacagcgttttgcgcggtttaatacgcccgaagaagggattcgggcattggcaaaccaggtatcgagttattacaacggtacaagtgctgccgccgggtatcagaagctgcaaacagtatccagcatcatttcaaaatgggcaccaccaacagagaacaacaccaatcagtacattgaaaacgtcagcaaatatctaggggtatcccccaacgataaaatagacgttagtaaccctgaagttatgacgcaccttgttcgcgctattgcgacgaaggagggggggaacccggcggttaacaacaattttatcaaaacagctcttggttcattcaacgctaaaactgggcgttgggaagggcaattcaatgatgaaacgctggaacacattaataaaatccagaagggaaagggcggtcctctaatcgctcgcaactcccaatatagtgtcggtagcaaagtcaaatacgccaacggctcatcttctgctattcctgcgtcaagcgtagcccaggctgtaatgcctacccctactgatgtggttcaacacgcacaggcagctaaaaaaccgaaggcggctcaacaggaaaatgcccaggcgatcagccacgcgaaagctagtggcaactcttccgccgcagccgaattgacggaccggttaatgagtgcagacggtgttgggggcgtcatcgccgggatagttgggggagatcccaatatggggctaaatctcggccctgtcagttctccggaagagatgtcctcgttagcagcaaaagccaagcaattggataagttccttgttgaaaaaatatccagagcaacgggcaaaaactttagtttccagaaggcggaacagatcgccgatatcactacggctatacagcaaaagcgcaacgttaaccgcgatacagaaaccattgacctgcttccggagagtccggcaaccatcagcgggaagcgtgccacatcgacaccggcgggtgtgcagatttacgacaacggctacaaggtggttgaaggtgaggacaggggcttctttggctcgctatttgattcaacggtgtcagggcttaaacaggtaggctccgccgtcctccccgccgttggagataacctctcgcgacttgttggcggtatcgatagcaccggaatgttaaatgactttgtattgcagtcctctggacagaataccgatgttgctcgcgctattagtccgttaacaagaagtgttggcggctggctgaatggtggcatacagaaaacggcggatacgatcagggacacgactggcgcaatcaatcaaagcctgtttgcttcgggcgtggctgctaaagaaccgttccttgcaatgcctcctcagctaccaaccgtcacggacctcgcacgaagcggaataaggcagatgctaacaacagataccgcaaataacgatccggctatgttgaaagcactggagaacgtttattccgttctcaaagagattcttggcgtaagcaaagacaaccgcaaaggcgatcaggacaaagttgtgaacacatcacaaccacaacctcgtcagcgtgccagcacgactatcaatgacccatctcttgacaaattactggaggattaa

SEQ ID NO: 18297 - DNA, 822 bp, Escherichia coli
ttgaacattcccaaattcccattaccttcacagcctgaaatagaaattcagtttcatgcacctactgtgaaagatgccctgaaatattcagacatcaatccggcagaagacgaggcaaccacaacagaatacctcaacgccatgcaagacggcgaaattaacgacagctcaaactggacagttcaggatcgcagaaccgcgctttggtggatctttgtcaattccagaccagatgccgtaatgacttactcatacgagtgtggtcactgtggaaacgttcatcacgcagatattaacctttcagaccttgccgaaacggtagaaatcctgactgtcccgccgtttattaaaactatggtccctataaacggagtaccaaccgagtggacgcttaaaccactaacagggaaaggcgctgaattgcttgagcgtatgcgcgccactttgcctgatatgaaaactccagagtacagtgctgaggttgctcgtctccgcatagctgagttggccttgtgtacatctctaaacgacgatccagaagacttcacacaagctgcaaacagacgattcgatatcattgaaaacatggcactggaaaccgagtttacccctctggtagctcgcattcagctcatgcagaaagaccttcgccacggcttaaaaatggctattgaacgaggcacaagccgcctgatcctaccgccacaacgctgcaaaaatgctaaggagggtgcagacgtgactaccacgctgtacgccccatttctcaatagagagtttatcccatcaattagatctgaatggatggctaaccattattaa

SEQ ID NO: 18298 - DNA, 756 bp, Escherichia coli
atgaacagagcggaattaacggcaaaagccgtcagtctgattgaatcagcgacaccaattagccgtagcttggcgcaggccaatgagatcacagaggcggcttatcacctgacacgcgaccaaaagcgactgttgtttattgtggtgggaagacttcgctatgcttctaaggatggcgttcttggttcaggtgcctgtgagttgacggtcaacgaatatgcagagatgtataatttgccctctgctgaagccagcaaggatattcgtaaagctatctccggacttagtgagaagaaagtcacgatatataaccctgatgaatcaaccgaatcagaagacagttatgagtcttatccctggatgattaaggaggcttactcaccacgccgggggacttacattattcatctgaatccatatctcatgccgttttttactctgcttgataagaggttcacgaggctgaattttactgaagtgtctcgcctgacaaacccttattctatgaggctttatgagtccttatgccagtatagaaaggatgatgggagcggcttcgctatacttggcgttgaatggatgcgggagcgttatggtcttcccaaaagctatcaacggtacgctgaatttaagagaagctttctggcaaaagctgtagctgaaatcgaaaaaaacacaaaaatgaaaatagttttctcagaggttacagaaggtggcagagttacaaaaataaaattcacctatcagcagtcttaa

SEQ ID NO: 18299 - DNA, 708 bp, Escherichia coli
gtgagtatttttagtgctgcaacgcaaacgctagccagtgcggtatcgtttagcgcgaaatcgttcaccagcaaccttatcagcgacattctggatagagcggtgtctggcagtggcgttagtgggagctatggcaatgacatcgcttacggaaagaacgtagttgctacggctatgcgtatccgctatgcccagggctggcagtggacggtagatgtagacggattaagcggctttgatatgttcgttaaggacataacttacagtagcgggaatattgaaacagaaagcaaaatcattggtagcgtcgagttcaataagccaacgcacgtaaccgccggaccggtaacaatgacggtcagagacacagaatacggcaaaataatgaattggttcaaggagcgccgcgcccgtgtaaccaatagcgatggtacgctaaacctgccgccagattatctcatgaatatcaggctataccgcgttacacaggaaggcgggaaagagctggaagaggaaatgcgtgtatttcctactcagataggagagatcagccgctcacgtgatcaggtgtccgaattcttgtcctatccgatcacgttccagcgatacacatctgctggttccggcctgtccgcattagtcaatggagctgctggtttagcaacaagcgcacttaaaagcgccgccagcaacgtgatcaagttttga

SEQ ID NO: 18300 - DNA, 552 bp, Escherichia coli
atgacaccttctgaactattagaaagcgttaaagcgcgattcaatcctcttcttgtacgggaagaagagacactgaaagcattcctgctcaaagcgttgactacttaccaggacagagcgggagtagttaaggcgttaaagctggagaaagcagacggcacggcgatccctgttccggatgattatctgtctttggtccacgtcactgaccacaacgggcttctggtttacgccgacgagattgccggttttgtcgaacttgagcttaccggttctgaacgctggcctttcaagatgcaataccttgtaaatctccgcgatcgcaacctggatgagtggcaagtgccacctgcgattatcggaatgcttgaggaatatcttgaagcacttatcaatgtccgcaacgttgcccgccagcgaagggcgtcaattgatggcaagtttgattactccgatcttcctgatgaggcgacactctacgcgcgtgttcaggagatagaagaaaaaatggcagccaaccgggccattatccctggtgctaccattttttaa

SEQ ID NO: 18301 - DNA, 492 bp, Escherichia coli
atggccggtttttcaaacacaaaagccgatctcgctttcctgaaagccagattcaacaagaacctggcagcaggcgaaaaattaataggcactgaatactggatgaccattaagggatacgaaaatctgtcagtgctgatccgcaccgcgcagttaccggaaatgacgcgtgaagacgtagaagactacgcaccaggcggtatgaagttcaaccaacacggtccgctgcgtaactcaggtgaatttcaggttacctgtgcggagacgattgaaggtgttgtactcgctgccgtcaaagagatggtttatgagaagaaatatctggatatctctttccaggctgccgctgaatctaacagcggtgacagcaaaggtctgtcacgtacttactcacactgcaaagtgtattccgatgccgttgatttctcatcagaagatgtaacggcggttgtcagaccgaccctgcgtattgtgtacaactgggttgagtaa

SEQ ID NO: 18302 - DNA, 591 bp, Escherichia coli
gtgatttgcggcgctaacgttgcggacggaatcagtccgctaatgaaagcatacatcatatcaagcgaggatatggtcatcggatatatcggcgaaggttcctctgccgaattaacgtctctgtggcagtcgccgttcgaagataaggcgatgggcagcatgttaggcgctattagcgaggcggcatcatctcttgcaggcatagtgcagacatcatcagggtacacgagtaaaagccggttcaactccaccctagtgtgggaagggcaacaaccgccggaatttacccttgtactggattttttagcgatgtccaacgccaaaacggaagtgaatgacgccatcacgacgttgctgaaaatggcatcgccagaactaaacgacattacgccttttggtcgagtcccggaggccgtaacgataaatatcggcaggaacgtgatgttaacgaacgttgtgatcaaaagcgtcagctatcagcttgacgccccgcgcacatcggaaggctatttcacccacaacacggtcactctgcaatgcagtggtaacacatctattaaccgcagcaatatctcatctgtttttgtttag

SEQ ID NO: 18303 - DNA, 747 bp, Escherichia coli
atgaaaaactattctgttgttgatccattcatgcgcgcgctatttgcaggcaaaacagccgataacgcagatacagccatactggaaagcgccaaagattctggttgttttgaaagtggcgataacgccatcctggaaagtgccaagaatggaaccgatggcgcggatatcgaagccgcaatgatggaagcggtggaatcccgtgcacaaagtgacatccgcagtctggcagcttcaatgctggcgagctgggtagaagatggcgaccctgaagcggattcatttgatgcgctggcaatcacaatggctggcctggccgacattgacgaagacacggaactgaccgacgaacaggttgacgcatataacgacgcactcgcggcgttggctaacgcggctgtggccctgggcgctgatcaggacgacgtcaccgagatgatcgatgacgaagatgacgcggcagcagaacgcgtatttgacgcactgtcagaaagcgatagcgaaatgatggaagaagccattgcgatttacaccgttgctggtggcaatgccgcaatgctcgaagctgtcagcaaaaaagtcgttcgtgatggcaaggttactatcatccgcaaacgcccgcgcccgcgtcgcatgacgtccttacaaaagcaggcgctgaaaaaagctcgccgtaaggcgcatacgtcgatagctaacactcgccgccgcaagtctatccgcattcgcaaaaaacgcggtctgtaa

SEQ ID NO: 18304 - DNA, 1656 bp, Escherichia coli
atgaataaaattggtttttctgttggtcaggcggcgggcgttgcggtagcggacgtaaatgccgatgctaccctgtccaacacatctggcggtgcttccgtctttgccgggttggttatttcccgcagaggggcaccaggcaaggttttgcaggttacagcagccaactatcagagcgtgttaggttcacctcttcacccgcgcaccggggccgcatttgaaccatatcgccacgttgaacgcgcagtaaaaggcggcaccggttatgtggttcgcgtatgcgcaaaagacatgaaagtaccgggcattgccgtttctgttcaggccaggtcgaaaagcaccaagtcagcaaaaactctgcaaattgctccgaccgaagcaacggtaaatatcggcgatacactgaccgttcgtgccgtttctggagccacttctccggtaactttcgctgcaagcgaaacacctgaaatttccggcagtgaactggctattttctacataaaggacggtgatgcttcgacaaaccgcacgttatcactgacccgtgaggacgaagaaaatgacctgttcactctggaactgaaagagacacagaccgatggttctgtagaaactctggaaagctaccaggtttctttcgatccggatgcaacgaacgatatgggccagccagcatggattcctgcgttgttagaaagtcagtccaccaggcttggagctgtactggctgatggtgccgaagactccgctcacttgctgactttcgaagatgtagcgtttgaaggcggtacagatggcgatctgtcctcaattgacactgatgattatctgaaagcgttagaggttctcgaagcgtcagaagttaattataccgcgctgctttctatgggctgctacgacgcatccgtgctggcaaaaattaattcgctggcagaagacgttcgcgtggatatgttctacgacctgaaatgtgctcagactggtgataacgctatcgcggaagctaaatcacatggtttcggcaaatcccaccaggctgcacgttatcacttcccgtactcatgccgtgacactttcagcggtatgaatgtggtttacggaatcagttgcgacgcatttgtggcaaaagctaaaggcgttgcgcttgtgtctgatgtaggcggctggcattacgccccggctggtctgtctcgcgcaatcattgatcgccagaacatcaccagactctccgggattggcacaatcgatcgtgaagcgtatgtgaccgctcgtattaaccctgtaagcgttgcagcggatggttctgtctacatcgacgactccctgacgacatacagcaaaaataactatctgcgattccagcacgtttcatcactgatgaatgcaattgcccgcaatttctatgaagttgctcaggcaatcaagcatgaacctgatggcgtaacgcaggaaagtctgactaacgcactgacagatcttctggaccgtttttatgcggctggtgcgctggttacaccacgcgatgaatctcaaggttctgacccttatgtggtcaaggtaactcaaaaagacatcgacttgtgggaagtggaatggtccgtgtgcccaacaggcactgcccgtcgaatcctcggcaaaccaatcctgatgcgttga

SEQ ID NO: 18305 - DNA, 279 bp, Escherichia coli
atggctgatattcaggtaactattacaccttccgatgcgacagataaatctttcactatcgagtcagatcatccggaaattgtgagcgtagatggcaaaacctgtaccgcacttaaagcaggtcaggcagtgctcactatcaaaaccaccgatggcaataaaacggcaacatgcaccgtaacggttaatgaagccccaaagagcgtcagcgccgtcagcgttgaaccgtcaaccaaagaagtgacggtaggtgacagcttcacggtcggcgaagcctga

SEQ ID NO: 18306 - DNA, 1698 bp, Escherichia coli
gtgaacaagaacattgagccagctcgtaagcgcgagcgcgagattatgaatcgggcggcaagcgtcatggctatgaccgtcgatccaaccactgatgctgccggtaacatgattaccgacaacgaagtgatgatggctaacctggaaaaagctatccagaaagagccaatgtttgaaggcgttggaccagaagcagctcgccagatcattggtagctgggccatgtctattcatgaatacaaacgccagcatgggcattatccggcaagcgatgtattagccaacgcccatgtagcacttgagcgcctgatgatggagtccgctaaagagacgcatgaaggcgctggcaaagccatgtttgaatcagtagccaaggacatgcgcacctccgatggtgtaatgaaggttgcacaatatgccgcactgatcctgcctgcttctctcggcgcagccaccagcgacgcatgtacgtttatcccttgtgatcgtgatgaaaccaatatttacgagctgaccaacgttgctggtacaaaattcggtacattcgagcagggcgatgagctgaacatgcaatctgcgggcgtgtattcgcagatgaaacgcctgtacatcctgaccgaaaaaggcgatggcagcaaaaccaccttccagtttgatatccagaacttcgaaggccaggcctgcccgctgcgccagggctacaacaaactgctgattaaccgcaaaccgtccaaagtagatgatggtgacggcaacctgtatttcaacgacaaagacgtcaacggcaactctttctctgctacagcaaaagttaaatacgataccggcgttatcgatatcacctttactgaagcaccagcagaaggcacagaaatcgctgttcaggttgaaatcaacattgaacgcaatcctagcctgatcccagtcattaaccagtccatgcgcaattacgccctgcgcccgtcgcagtacgtgatcgcatccgaacatacggttatgacagcatctgacctgagccgtgaacacggactcgaactggcagcattgcaattctccgcaatgcgcaactggatttcccacgaaatcgatatgatgcgcctgcgcaccctggtattccataccgtttacggtcgtgaatttgacgtggcactgccggaagcgcagaactacgaatcgtgggttggtttaattcgccatgtagtgaacgcgctgtcacaggatatggctgaccgcaccctgactaccggtatccgtggtggctttgctggtggcgatgctgctaacttcctgcgttccttaccgccgcagcacttccagttggcacctggctatgtacagtcgccatacattcaatacatcggcaccctgtttggttccattcgtatctacgaagtgccgaagcctatctgcaaacaattccaggaacatggctacgactttggcctggacgacatctacttctatggtcgtggcgaaggcataggtaaagctggcctggtcgctggtgatgctgtgcctgctattccgtacgtccacgaaacaaatccagccctggtaaaccgcaccactctttggggtacagcaatcaacgatgtgcatccgcgcaacggtgagaactatttcactcgccttcgtctgacacgttcgaaagaaggtgcgattgacatgttgagcgggcaaatcaacgaaaaaaagtag

SEQ ID NO: 18307 - DNA, 483 bp, Escherichia coli
atggagacagtgagtagaggaaacatgagtcacgcgaacccatcgaaaacacaatatcgtttaatgctggctatcgcgtcagctataccaaccagcctgaatccacccgctggctatcccgctattgttgatgattgttttcagtattacggtgaagacatcctgagtcagtctaaggcactcaaacagttatgcaaggcaggcattcttcactgcataggcgatccagatgattttgtagtcatgctggcagatcgtgactcttttctgctgtcctggaaagccggggcgcgcgaagcgcgtttgggtaatggtattggctacatcgactatagcgattgtccgctggcatttgccggtggatatatgcattggcatgagcgaaatagaggccgtcagcgccagtatcgcttgagtgactttaacgtctgtcacggtttcgaagaagctgacagccaggacatctggcttcaggagccttga

SEQ ID NO: 18308 - DNA, 453 bp, Escherichia coli
ttgaaaaagataattttgatagtagttgcgcttttagccatttatggaatttaccgtactacggcggcagttatcgatcacatcaggtatatccgttccctggaagactcaaaatcacaacttgaaagcgagaacaacacgctttctaccgcattgcagttaagtgaaaaatcgcgatctgccatgatggctgaaaacgaaagaattaaaacactggagaaggagtaccagcgcaaaacagcagaactgaataccagcctgatcaaacaacgggaggaaagccagaatgaaattactcgtcttgaaactgctttacgcaatgctggggttaatgatgtgcgtgtgcctgatgacgttatcaggatgcagcgggaacgggcaaaagaaatcaatcagcgtgccagtgaaaattaccgtagaagccaccagcaaaccgcaggcaaatctgattga

SEQ ID NO: 18309 - DNA, 795 bp, Escherichia coli
atgcttgattcaatcgctgaagttaacgcattcaaaattctaaatgcatcaggcacaactacgcctgcatctatcacgctaagtaaaacagcgtcatccaatgccagttctctggaagagaatatccaggctcttatcctgaaggataaagcatacccggcgtcggtggtttcatgggtcaatcagctttctgtcttttcagaacaactgaaaactgtcagtgcagaagcaaccaatttagccgactcgctgtctccgtatacttcgccaactgaattacttcagatgaaaattggctgggaatgttacgtcaaaggtaatgagttatctcctgcgccagaatttgctctcgtaacagttatgggagataccctgcatccgcaatcgcttattgacgcgttggcagcatttgaactggtgccaatcacttcagctatgaccgctataaatgcaaaagttcaggcgtcaagcggggaggcttcaggcaacggaagttccaccggaacaacacagcaaccagcactaacagaagaagagatcaaagcactaaaagacgctgtggaagcagcaacagaacaaataaatgcaataaacaacacgagcagtagtctctcaacacttgcacagcaagttaaggactctaccggaaaagccaaacagggactggaaaatgctgtagctattacgttaaccggttctctactgggcgatgaagtaatgagtccggcaatcagtttgatcatgccacaaggtgtaatcgatgcgctccaaagtaacactaaaaaggaaccataa

SEQ ID NO: 18310 - DNA, 285 bp, Escherichia coli
atgagtgcaatagcgaccagtgacacagtttgttctggtcatggaggattccctccgcgacctgtagcagaaacagtttcctggtttaccgtaaatggaaagccagtggttgtagatgggggagcgttccccagccatacagacggaaatagcgcgcaccccggatcagccgtatcgacgcgctcatggtttgcaataggcgggaaaggagttgtttgtgtgggagatcccctttcttgtggctcagtcatcgccaatggtgaggcaatttttcaggtgtcataa

SEQ ID NO: 18311 - DNA, 957 bp, Escherichia coli
atgcgcatttttatcgacgatggttctaccaatatcaaaatgctgtgggaacaagacggggaaactcgaacccatatctgtccgaacagttttaaacgtggatggtccgccacatttggcgcaggaaagccgtttaactacatcattgatgacgaaaaatattcatatgacttgatctcgccggatgtgctgccgacgaataacgttgaatggcaatacagcccgcttaatgtgcttgctgttcatcatgccctgcttacaagtggcattgaacctcaagaagtggaaatagttgtcacgttgccactggcagagttttatgacgacgacgcacaatacaacatgaaaaatattgagcggaaaaaggccagcctgatgcgaccagtcacccttaacaaaggtcaggtttttactatcaaaaaagtgactgtgcgcccggagtcaatacccgcagggatcggtctgtgcgacagccttgtgccagcgcattctgtgcttattgttgatcttggtgggactactctggatgtgtcgatggtcgccgggcaaatgaccgccgtttctcgcgtatttggcgattctaatctcggcgtttcgctggtaactaaagaggtcagacaggcacttgcaaaagcgaataccgaaacctctaattataatgtcgatcaattaatcattaatcgtgatgatgaggattatttgaccgacaatattaacgatccgtctgctattgatgatgttaagaaagccatttcgtcaagcatagaacgactccgtacacgcgtactggatgtgatcagtgatttcaaaggatacacgcatgttatggtcattggtggcggcgcgccgcttgttgctgatgctatccgtgagcaggtaaacattcgtgacgataggtttttcgttgctgatgatccacaacttgctcttgtctatggtctaaaatctatcggttga

SEQ ID NO: 18312 - DNA, 366 bp, Escherichia coli
atgtctcaggaacgtcgaaaagtattgttttatcttcgtcctggtcttaacgccagtgagcaatatgctgatgcaaaacttgagggccatccattaagagatcgcaatgatatggcgcgcacagcgatgcttgcaggtatcgctcttggcgaggttgatagcagattacctcccatgttggcatcgcttttatccggtgataatagccctgaagtgatcagaaaaatgctggtttcatttcttgaaatttcgcctgaagttcgggaagcctctgaaggaaacacctctgtctcagaggatgtaaaaaaaccaggcgttccgaaaagccgctctgcacagaatttggcaaactcactccctgattaa

SEQ ID NO: 18313 - DNA, 642 bp, Escherichia coli
atgattatattggtagtcagccaaaaaggtggctgtggaaaatcaaccacaagcgtaaacatctgtgcggagcttgcccgcgaaaataaggatgtagtgttactagatgcagacaagcaaggaacagctgcccgctgggcagctgaccgtaacacggcagaggtttctcctgtaattcattgtgtccagaagtttggtaatattcgagaaacacttctcgatctggataagcgttatgaatttgtagttgttgatacagccgggcgcgatagcaaagagatgcgtacaggcataaccgctgcagatattgtgttggtcccattcagaccatctcaaccagatttagacacgctggcacactttgttgaagtgtttgaagaggctttggacctgatgcctaatcctagcattaaggcgttcgcagtcttaacaatggccccatccaatccggttgtgaatgaaaccaatgaggccaaagagtacctagctgaatatccgcaactgaagttgctgaaaaccatcattcgtgatcgtaaggtttaccgcgattgcatggctgaagggaagggcgttgttgagatggacaacgggaaagctaaaggtgaaatccagatgttggttaaggagttattaagtgattaa

SEQ ID NO: 18314 - DNA, 288 bp, Escherichia coli
gtgattaagcctcgtaaatcggtaaaagcccccgaagtaaaagaccccgatcttgaacgccgaattgaggattttgccagtaaggctgatttggtgccgggcgagcaaccagaagacaacaaagtgctcgataaggacgccccacgtgattttaaatccattcgtgttggcttcaatgaatacgagtaccaggtacttgatgcgttaagcaaaaagcataatcgcagcaaattgaatatgatccgccatgctattctcatgcttgcagagtctgaggatacaaaatga

SEQ ID NO: 18315 - DNA, 918 bp, Escherichia coli
gtggctgatattggtgctaaatttatttcttatagcgacaatcatcgtcctgcggcggaagccactatcagccatatgcgacgtattcgctcagaggacgaatttgatcgcccagtctttaagtgggtcggcggcaaattttctgcactgcccattatcttcgaacacctgccccacggaaaacggttgatagaacctttcgttggaggtggcgctgttttcactaatgccggatttaaaagcaacctgctgaacgatatcaataatgacctgattaacttctatcagacattgcagcgtgaagggcattctcttatcacactggcatatcgtttttttcaggattacaactctgctgatgcatttttgaatgttcgcaatgcattcaacaatggtgcttatgattcccttcaccatgcagcggcgttcctgtatctcaatcgtcattgttttaatggcgtcactcgctataaccgtaaaggagagttcaacgtcggatatggaaagcagaaatcaccccacttccctctcgcggaaatggaggcgttcctggctgacgatatttcaaagtattcggaatttgtgtccggcgattttgctggtgtaattgaggctgccgggaatgatgatgtgattttctgcgatcccccctatgaaccattgcccgacactaccggatttacaaattactcagggcatagctttaggtttgaagatcaacaacggctggtgtcgctgctggtagatgctcacagacgcggggcgaaaattgtgataacaaacagtggagcgcctaacattcgcgaactttacgttggcaatggcttcaaggtgtatcctatgccatcccgtcgctctgtatcctgtaaagcatcaacgcgaatgatagctaacgacattatagccacgcttaattaa

SEQ ID NO: 18316 - DNA, 681 bp, Escherichia coli
gtgaagcagagcattaataaccgaccgctggcggtgagtctttgtgattatacagggaatatggtttccccctggctggaacacggcattgatgcagtcattgtcgatccgcaacaccaggagtccggcagccaattgatggagtcaggtgctgtactcacacgtatcagcgcaattattgacagtgatgaggtctacaatttccttcggaaaaatttgcacagagttgtatttttagccggtttccctccatgtactgacctggctgtatctggcgcacgctggttcgcagataaagcgaaaaaagatccggttttccagttcaaagcaatgcaggttgtctggcagtgttacgacattgcaaagatgattggttgcccgtacatgattgaaaacccggtcagccaaatatcgacattctggcgtaaacctgaccacatattccatccttatcacttcactgcatattgcaaggaagacaattacaccaaaaaaacatgcctgtggagcggacaaggattcatcatgccaactccgcgaatcgacgagtcgttaggtgatccagataaccgaatacacaaggcaccgccaggacctgaaagagcgaattttcgtagcgcgacaccttacggttttgcaagagctgtatttgaagcaaataaggagggaatccgtggctga

SEQ ID NO: 18317 - DNA, 906 bp, Escherichia coli
atgagattggtcgcatttaaaaacatatacgtctatcgccttgcccgcgaaattaaactggactcaaccaccgttagtgatgccttaagccaattcacattcactccatgcgcatcacaagaaatggcaaaagtcggatgggtgccggttctggctgacaacctgatccatgaataccacggttttctacttctccagcaacagcgagaaattaagctcctgccctctcatgtcattaaggaggaagtgcagaaaaaagtggaaaagctcgaaaatgagcaatcccgtaagctgaagaagtcggaaaaaaacaccctgaaggatgaagttctccactctttgttgcctcgcgcattcactcgcaaatcattgtcgcgaatccttattgatcgcgacaactatctggtcttcgtagaagcttccagcgccagaaaagcagaagaaatgctggcgctcttacgtaaatcacttggcagccttccggtgattccattcacgccgatagaaccgctcgaaatgactatgaccgaatggttcaagtcaacatttcctcaaggctttaaagcaggcgaagaagccatattgaaatctctgttcgatgacggcggcgcagttcgttgcaagaaagtagacctacagtcagaggaaataatgactcatattgaagccggaaaagttgcaacaacagttgcaatcaactggcaggaccgcgcgaccttcaggttaaacgatgacatgagcatcaaagcactgacgttttgcgatgatctctatgaccagaacgatgacatcgaccgtgaagatgttgcccagcgatttgatgctgacttcattctgttcacaagcgaattatccgcgatgtttagctcgctggtggaggccattggcggtgaagcagagcattaa

SEQ ID NO: 18318 - DNA, 678 bp, Escherichia coli
gtgaaacgcagagcgcaaatcgtagggaccaaacaccctgccggacttatgcgagcgcaggtccgcatactgcctgactggaacggtgtaccggatgaagacctcccatgggcagagtatcaaatgcctatcggtaacgcctttacacctacagtcagcggcgatttagtctgggtcgaatttccttatctggatgctaaaggcaggatagacacgcgccgacctttaatcgttggcgcggcgcaggatgccccaggaggcgtaccaaatgtgcctccggaagcctccggacaaggaaacggatggtcgccagaagaagttgatggtgctcctgcccgcccccagttttcggcgactgaagattttgttattcaccgaaacaatatccttgaggtcagaacggctggcggtggctatgaaatagcaaacaccgccgcaggatcaaggatagggatgaacgaatccggccagatttacataatcggcccggcgaatatagtgcttaatgctggaggtgaggttaacgtcaaatcaagcagcaaaaccaatgtatcctccgatggagacgttaatgtaaaaggcagcaatgtaaccgtcgccgctgatggtgatatagccctgaacgctggtggcgcgctaaaagcaacagcgagcaatttctcctttgtgaagggatag

SEQ ID NO: 18319 - DNA, 981 bp, Escherichia coli
atgtcccaggagctacagcaatactttctacagtccattaccatcaacggaaacaaagtgcccagggagtggatattcactgccgtatatgtggaaaaggcaaacctgcgtgcaccattgctgaaactggaaattcacgatattaccggcaccataattgatgactggaaaacaaaatacggcgcagcactggttgcagagatgggtgatccacaaggcaattcaggcacgtttaaaacaacttttttcgtaacatctgcggtgctggctggtgatgtcattacggtcattgcagtcagtgaagacgttcggatatttaagatccccgctctacgggctaacctgcatacaaacaaaacgcctgataccattttcaagacgtataccggtacactgaaagtttcctccagcgcattgaaacgaagctgtacgtaccatctttccgccggggaaaaaccctccaaaatgctatctgaaatggcccgcgacaaaggcgctttatgctgggcctgccgtggtcagtttaacttttatacattagctgaccttatgaaagctaaaccatcattcacctatgaagggaacaaccccagggcggaatacacgatttcaaaaatgaggcttatacagcaagagtatgccgttacggcaaatactcagtatcgatttaccggctattcaatgactgaaggctatgtcgaatatggcgatagctcacttccaatacgctatatatccgatccggatatggaaactctgcgcaatatgcaattgtcgctcgtacccaaaatggatattgaggtcgcgggtaatcccgacatcacgccgggaatggttattgagatcctcgtgtatcgttacgaccaggaaaataagctggacgaatcgttgcctcgtaagctgctggtgaaaaacgtagcccattttgaagaccggatcggctatacaacacgaatgatattaggagtacccaaccagtga

SEQ ID NO: 18320 - DNA, 768 bp, Escherichia coli
atgacacctaacaaaactctactgtcccgcattggcgagtggcagacaacgcgtactggaaaattccagacaactggtctggaaagagtggataacgcttttgctacgctaatcagcgacattttttctgacgtaacgctggtggaaccagcaaaagaagaaaggcgctttgcatcattcctgagtcgcccaccagcggagcgtgtttatgttgcccgttttgataacgcggtcgagttccttaaagcggttcgccgtgctaatgccgggcaagggagaaagccagagaatcctaacattaatcgcgatgcgctccctctgattaatatctcgcgctcaatggatatcagctatatcaacaatgaccagcagatagaccgcaaaagctgtgatcacttctgcgaacctggcagcggtatgcctttagtagccctggaatacacccaggcaaatctgacgtatgacgttacgttaatggcgacggataaggcgaccatgagtctgatgtgtaattcgctaggagcacgtcttcgcttgatggcaggaacgcagtttgaagcaacaaccccgctggtacgagtacccgtcccgctaatttgcgcgattcaggatgctaaagacatcagttttactgatgtttcagccccaattggggaagagcgtatttatgctgcacaaacggcaattagtgttatagcagacgtgatcaccgcctgggagctggacgcgaaacgaattattactgaaacctctctgagaatggggtaa

SEQ ID NO: 18321 - DNA, 795 bp, Escherichia coli
atgggccgttttgatgaatggcttgctgatgatgcaagcctgatgagaaagggaacagaacatgacagcacgcagagagaagagacaacgacggttgaagcgaatgaaggaagcacaacggaaaatgggaaggtcagtacagggccattcagtattctggaagaacgcgctgccaccgaagcagatagccgccatgataattggcctgataatgctggtgactctgttacggaagtgattgaacctgacatcgctcccctaccggcatcgctcgcaaacagagaaccaaaccagcagcttaaaacccgatataacggacacaaagcgttcaacgaccagatccgcgccgattggatgcttattattgaatcaagccctgacgcattcgaggcgcttttatatcgcccggctgatggcacctatggcgtcgtaaacgatgaaacaggtgaagagtctttcacgcaactggacaacaaccagcgtgagcttacctatctggaaccggaaatcgtatacgtcctggataacccggacggaagggattcgtttcatgccattgatgccgatggagaacaggatggtcttgctgatgaagtgctaatcctgcgtattgctgcaaacaacgtacctgttggttcaatcctggaatggaacgaagaaatggcgaatggcctcgcccgccgctggtggtacgtgcatcgaatcttcagctacggaacacaacacgttggttccctttattactgcatcccggccaggaactttgataccactcaaaacggagtgatcgaatga

SEQ ID NO: 18322 - DNA, 540 bp, Escherichia coli
gtgagtcaggaagttgaaaagtggcgagcatttgaacaccctgatggtgttattcgtgatttgtcatttcttgacgctcatcaggctgtgtttgttcagcaacaagaaggaaagcaaccgatagagtatcgcttttgggttacgtactcttttcactgcttcacaaaagactatgcacaccagactgaggaagagaaactggcgttaatgtaccacgcccctaaagagtctcgtccattttgtgagcgtcgctataatcttgccaaacttcacttaaaagaggcaattctgtcattgtcggaaggtaaggtgatccatgccggatacggaagctatgccgttattgaggtaaatattggggagggtaacaaggagtattattttgttgcgtttaaggctttcagggaaaagaaaaagttgcggttacacatcactagcgcctacccggtatcagaaaaaccaaatggcaggtcagtgaagtttttcgcaatcgcatacaatctgttaaggaacaaaccgcttcctaagccaccaaaataa

SEQ ID NO: 18323 - DNA, 1206 bp, Escherichia coli
atgcctgacttcctgaaaaatcaggacgggcgatatatcactaacggtctgtcctctaaggatttcacacgcgtatttgaactcatcaggaaagagcaaaaccgcaaacgccgccaggcgcacaggacactcacgccgggcaggcttaggaataaatcagccgaagacattcttaagctggggaaaaagaaaggcggcacgttctttacgcgtgacgatctgaaaggcttcgaaaagctgcgaagcaaagcacgcgaaaaatatgacagcaagacggctggcatcacatacgcacaactggtagcgtccagccaggctatcgatattaagcgagcaaataacgccgtagacgacggttctggtatcaaaagagctacgcccgtatctcttcgtcacaatgtgattaatatccgcgtggaagcgtccgatatatccgttcaccagcaccacattgtccgggtacgttttgaagaatgggatcagatggtcgatgacatcgcagaagacgataaatcagccctgaaagtcacaaaatcactgtgtgccgggcgagtgtctttcgactgtgactgcggtcgccatcaatactggtatcgctacatcgccactgcgggtaactttgccctagccccgccaaaagaatacgcctatccaaaagttcgcaaccctaagctgcaaggcgtcgcctgtaaacatgtgatccactcaatgacacgactacagtctgccagttggcagatgagtattgctcgcgccctgcaaaaagctgcaaagcaagttgcctttggtgacgatcgccgccgcacgacaaaacacttcacaaaagaagacgagaaggcgttcaatcgaaaccgtagcagcaaaacgaatgttgaggcagctaaacgtgaatggaagctctatcagaaacgccaggccgctttaagctcaaaactggcaaaggacaacggtaagatcgacaagctgcgtgaccaactgaccagggccagaaagttatccgacgcacagaaaaaacgggcagcggcaaaagaagctgctttgcaacgggagaagcagaaaaacaaggaacttcagcaacgccttgctgatcagttcgcactgaagaagcaggcgttcattgatgcgcttgttatggcaggaacaccaccagcacaagccgaaaagatgttcatggcgtatgtgaagaacaacgtaaaaaatgtataa

SEQ ID NO: 18324 - DNA, 330 bp, Escherichia coli
atgagttacagcaggctcgacgatcgatgcattgaagacgatgtgctgcgcgcactattccatcaggagatgatcaagcgggtatcggagtatcactccgataatttccagtacacgataaaaattgatgaggtttatcgctcagacctggcggcctatcgcgcctatggcaatgctgatttgcgctgggtatttcgcgtgctggtgggccatgagtcagaaatggaagaaatgccggtagggacaacgttaactcttcctgacgcagcatggctaagaaacaagattcgcgattacgctggctcggcaccggagatagaaaatgcctga

SEQ ID NO: 18325 - DNA, 135 bp, Escherichia coli
atggacgttattctcgaattgttaaagctaattgttctgtttatgaacgcctcgttgaccacgcaaatactggcgttagtatttttgttactcttctacctggtattaagggagttaacaaagctactgagttga

SEQ ID NO: 18326 - DNA, 654 bp, Escherichia coli
atgcaaaagatcgcaatattcagcctttcgactaacaagccgctgatggctacggcagtcctgaaagacggtgcgcttgtaattgacaaagtaaagcccctcccagcatctgctattgaacaaaaacgaaaaattccaccagcaattgccgagctgcgtaaaagtgaatttaaggtgctggttgacgaaatcacgccaaccatttcagccggtacaggtgccagtcaggtaacattaaaaacacggcacgccgacggcagagcggcgatcattgtcggcatggagagataccgagagctgaaactacaaaggctgctatccctgcctgacaagaacaaaggggcattcgagatccccgactctatcgtcgataccgaatacaacggcaacggtgaagaggtttatcgagttaactggcaagatatccgaccagagcacatcctgatgattctgtgctgctatgcaacggtataccacaatgttgccagcgcggattacctgaaacaaatgacaggagcggtagagaaagaaaacaaagcagggataatggcctcgttcctgtccattatcagcgatcaaaaagctaaagcaggaaatacccaaccaaaatcgctggccgggcaagtaattgatgaagatacggtgatactttaa

SEQ ID NO: 18327 - DNA, 606 bp, Escherichia coli
gtgaagttaagggttttgggagcagtgctcgcggttatattggggggagtttctcttaatgctgcctatgcaggcgcgttacctgcaaagtatgaggctggactgaaggtattgcgggactataaaaccgatagacctgatgaatttatagacttttgcgaaaaagaaaatatcacgctgcaaccggttgaaccggggtttacaggaaagggcgatttctgtttgtttgcgtattcagcagaccgattagacaaggctatacgcaaggctggctattccaccaaagacactatgacagcgttaagtaaaagctggatgcagtttcaagtttatagccgggaaggaatgggggagctattgcagccgttgtatgctctagcattggtgccggaaggtcagcagtttctgatcaagaaagggttcatgcgggaggaagatgtagctggtttcgatgccatcgttgcctatgaaaaacaactcaaggaacagcgcaataaaaaaccatctgcctcatgcgtgcaaagcaaaacagcagaatacagcgcagtggctgggcctttagccccacaaatggcagagcaatggtgtaaacaatacgggcaataa

SEQ ID NO: 18328 - DNA, 393 bp, Escherichia coli
ttgaaaagattagctattgctttattggcagctttccctttgatcgctcacgccgggaatttacaagtgaagtgcggtaggtttgatataaaaatctatccgaacgccatatttctgaatgggaataaggttgataacgcgcaccggaaaactgaatctgacgtaatgagctatgtgttccaggagtatgccgagatggggggaacttacacgttgtactcgctggatgttccttctcgcggtgatatgacgttatctcatcaatggcagaacgccgatggcgaagctctgcgcgaggttaaaacagaaaaatgtggcactttccattcttttaaagggaaagcgcccaatgttaaatctacgcttgaaaaacagcgtgctggtgagctttaa

SEQ ID NO: 18329 - DNA, 321 bp, Escherichia coli
atgtatgccaccaaaaaaatagatttcacttattctgctgccacaattgagcggcgcttcaccctcattagagagttggaactgtcaaaagtctggtatcaaattctactggatgaagagttctcactgatgataatggctgaaaaagaagcaatgccgaatgaccggcataaagtcattgccagccttgacctggtgacaaacagatactgggagacagaggaactgcgtgaagcgggagtaattcgtgacctgatggagagttccgttccccgccgctatcgtgcgggaaacgaaatctccgtgattaaaggggcttaa

SEQ ID NO: 18330 - DNA, 942 bp, Escherichia coli
atgaatctgtccatctctcaaaaagcgacaatgaccagcattgagatcgcggaactggtgggaagtcgtcactctgatgttaaacgcagcatcgaaagacttgttgctaaaggagttatccaacatacgccattggctacagttgagaataatcaatcacttagccctaataaatacacaaaagcctatttcttcgaaggcgagcaaggcaaacgagacagtatcattgtagtcgcacagctttgtcctgagtttactgcccggctggtggaccgctggcgcgaactggagaatgccagggggccgttaaaatcaaaagccgaaatcctggccgaaatggcgcaaatgcatcttgaacatgaacgccggatcaacgccgttaatgcccaggtagccgaagtatcggcacaagtgtccaaagtcgctgaaaccgtcgagcaaataaagaaaggcaatatgccggaaggctacattggctaccgccaactggcggcgaaatgcggcctgactgaagccaaatgtcgcaacctggtcaacgcttaccggataccaactgatacgcatgagtttttgactcccgacggtttgcttgcgcgacgctcaattgtggccctggcccccttccggaaagcctttaagcaggttatgtcggaggcagaaccacgcaacaaacgctggtatcaccccaggatggggctgtttcaggctattcaccaccctgtgcctgatagtccaaaggcaaacctgtcgttgcataccgccagagagaagattaaaacagggtatgcaaccgtatgccgtcgagcatcctggcctgaaagtgtctgggtatggcccgaaagaggctcacggaaaaactggcgcaccattcgcgacggtaagatctgtgcgattgatttgcagccagaagatgtagcagcaaccgactggattgttagttaa

SEQ ID NO: 18331 - DNA, 216 bp, Escherichia coli
atggctactatccctaccccaactcattctgaatttatctggcgtttctattcctgccaaaaacacctctatatctgcgtaatggctgctaccgaagcagaggcgcgctcataccttcccgaagaaccctgcatttttgctgctcgcttcactcttgatgcgatggagatcctcaattactggaatctgccaatgaactgcgtggaggtgcactga

SEQ ID NO: 18332 - DNA, 168 bp, Escherichia coli
atgaccgttcgctacctcaactttcaaatccagaacatcactggcggttgctatgattggtttgtcactcttggaaaagaagtgatcaccgggaagctggatgaagtgaaagctaaagcaatggcctacgcttgcaagcaagcccaaaagaagaaaagaaaagcataa

SEQ ID NO: 18333 - DNA, 156 bp, Escherichia coli
atgcgcgttctctgccgttctcccgaagatgtggtgcagggataccacagggctatgctgtccgtgcatatggcaggcaatgcaggggagggcaccgatggcagtttgtatccggcgctcatctgctgtgagtgttctgcctttcaggccgcgtga

SEQ ID NO: 18334 - DNA, 153 bp, Escherichia coli
atgcttgtcgcaataagtgcaatccaccagcaatccggtacagaaattgggttgctatatgccctgtttttcactgtcctggcgttgtttgagctgggcattgaactctttgctctcatcaacttttgcgtaacgttcctggggaaactttga

SEQ ID NO: 18335 - DNA, 612 bp, Escherichia coli
atggctatacgcattatgaaaatttacatcgcgggtccgatgactggttatcccgactacaaccgcacagcgtttttttcgaaagcaaaagagctgatggaggcagggcatattgttctgaatccggcgctgttacctgctggcctctgccagagcgaatatatggatatttgccttgctatggtgcgttcggctaatgcggtctatttgctcaaggggtgggaggaatcagttggcgctcgtgcagagcacgagctggctcaaaagctggggctgaatgtaatttatgagtcaccaaccaacattgaatgccaggttgctccgcatatttaccgggaactggtcaatgcactgcgtgatatcgctgctgtatatcacggcacagaacagcttcgtgagcgtttagcccataccatttcctattacctgtctgcatctcatgagcacaagctccgtcagaaggtaatgatcaaatttatcatgaggttatcgaaatccctggcaaacgccgatccaaagaatccattaccgaaagaggcaatgaattacctgaagtcctgcaacattgtttctgaagatggcgttcttttggttagaaggagttctgcgtga

SEQ ID NO: 18336 - DNA, 318 bp, Escherichia coli
gtgagctggcggggatggggaagggcagaaatcatgatactccgccagtgcgccgggactatgacagtcgagggtattgggagactgatcgggcgtaccggtggtgctgtcaggactaaagcgcggcaattgcggatcagcatgattctgaaaggtgactttcaccagtcagccaaataccggcagagcgatatagagctggcgcggcagcttcatcagtgtggcgttccccgccgtgagatcgcagaaaaactcgaaatgcccctgggcatgattaatcagtacgtttatttcgaaaggagagtgcatgaagtctga

SEQ ID NO: 18337 - DNA, 234 bp, Escherichia coli
atgagcatccgaactgaacatggatttggtccgtcaacggtcgaagtcgaatggcttgatgattgccctaagtgccagcacggcaaagccaaggtaacaggatggtcggtaaccaaagattctttgtgggcgggtgatgaggccgtctgttccaaatgcggtcacaaaggtgaaatcgatgctgatggagagaatgcctgggtggaatgggacgaaatcgaggaggcacaatga

SEQ ID NO: 18338 - DNA, 534 bp, Escherichia coli
atgaacgcaaaaatcagatacggcctgtcggctgccgttctggcactgattgccgtcggtgcgcccgcgcctgatattctcgaccagtttctggatgaaaaagaaggtaaccacacaacggcataccgcgatgggtccggcatctggaccatctgtcggggtgccacgatggtggatggaaaacccgtttttcccggtatgaaactgtcgaaggaaaaatgcgaccaggtcaacgccattgagcgtgataaggcgctggcatgggtggagcgcaatattaaagtaccactgaccgaaccacaaaaagcgggtatcgcgtcattttgtccctataacattggccccggtaagtgttttccgtcgacgttttataagcggctgaatgccggtgatcgtaagggcgcatgcgaggcgattcgctggtggataaaagatggtgggcgcgattgccgcatacgttcaaataactgctatggacaggttattcgtcgtgaccaggaaagcgcattagcctgttgggggatagatcagtga

SEQ ID NO: 18339 - DNA, 216 bp, Escherichia coli; identical to SEQ ID NO: 11727

SEQ ID NO: 18340 - DNA, 213 bp, Escherichia coli
atgaacggcaaatctaggttagcctcttacgtgccgaaaggcaaggagaagcaggctatgaagcagcaaaaggcgatgttaatcgccctgatcgtcatctgtttaaccgtcattgtgacggcactggtaacgaggaaagacctctgcgaggtacgaatccgaaccggccagacggaggtcgctgtcttcacagcttacgaacctgaggagtaa

SEQ ID NO: 18341 - DNA, 255 bp, Escherichia coli
gtggacatcgtcgggccgaaaatcaatctcaatagcggcggtagtccggggacgccggtgccggcgctgcaaccggcggtgctgaaagcgctggcagatgataaaagtttagcggctgagcaaaatgatagtaatgcatcgtccgatcagaatgataacaacgatgagggtgaggaagcgccagaaaaatcggtgtgtaaggagtgcctgaaaagggcgcaggaagccgccgccgcttttgcgcctcgtggataa

SEQ ID NO: 18342 - DNA, 522 bp, Escherichia coli
gtgatagctgaactgtctgcggctatggccgctataaaggagactgccggtcttgctaaggttattaatgacgcaaaaacggatgcagaagttaaagctgcaaccattgaactccagaacaaactaatcacgcttcaggcagaatgcttctctcttggcgatgcgatccgccttcgtgatgaagaggtgatgcatctcaaagcaaaaattgcagagtttgaagatttttgtgccaaggtagaaggatatgtccttgatcagcttgactctggtgcttttgtttactctaaaaatgaaattgtgagtggaaaagaaataactgtgcatctgtgcccactttgttattccaaaaatataaaatcgatacttcatccgcttccagtaggtaaaacttctcattttcttacaagccgttgccttcactgtgaaaataaatttcttatggaaaaaaatccgatgtacgaacgaccaagatcattacgtgagttggggcgagatctgaattcgccttggattccttaa

SEQ ID NO: 18343 - DNA, 441 bp, Escherichia coli
atgactaaaaatgcacagcaggttcttgaagactctgcccaacagatttttcccgattattttcctgcagatgttcctccaaaagagtccttggatgctgaaggggttttttatcgcttagccagaaataatccacctgggaaagcttgttttttaaacatgaaagaagaaaacccaaaaagaatgaaaaagttccaagggttacaattgaaatgctgctatggtgtttctatgttcatggacgaaacatcactggtaaatgtatttaataaatttcctgaaggaataggtgaaaggtttattgctaaaggcgagttgaatccacaggatggaagaatgctaaaaacaggagctcctgattcgactcattttaccatttggctttgtaaagatgctcgagttcatgaaaaattcacctgtataagagaggtggttagatga

SEQ ID NO: 18344 - DNA, 1290 bp, Escherichia coli
atgagcaatatttttttggaagatagtgtgttcggcacattatatatgcaaaaaatttatgagttcttcgaagagccaaaacttttctctgtgtctaatgaaataaatagcatgtttgttgtctattggattggcgacgaagaagattatgataaatggattatcataccgatttcaaaagataggttggagcacttcgagcgtaaaagaattgatattagaagtgttttagtgtatcaagaacaaaagctttgctatcagtttaatatttactatgaagataatcatgttgatgaaataaaaataaatgtttctgagttaaatgagaagataaaaattccagaacctaacttatatattagtagtgttcttcctgtattacctaatggtaaaattggaaaggaggtggaattctctacgcatgagattcatgtggagaaaacagcaacttctgtggaacccttggttttaaaaggcgtctcgaagctttttgagtgttttaatgatttctattcatcaatattagctgcatttgatgaaaaagatgtaatgagtccagtatctggacgtcctggttcatttgttctttcattcaaggcagataaaatgcagcaaattgaaccattgctgaaaaaactaaatgagctgattctatcaagaaaagatattattggttttgttaaacagaataatatcgatgttcagatgttatctgctttatttgaaagtgtgatagagacaagttcatgttttgaactaaaaagtaatgtgactgatgatattattcttagagtcagaaaaactgatgctgagttctattctggcacattgattaaaatggctactcaagttgttagtagttatcaggtaccgcaggctaacctaattgaacaagtgtttaagatagttgaattaaaatggcaagagaagcatctgaacctgattagtactggtctggataatcgacatatattgtattatattcatgcggccaaaatacttgggttactaaatagtaatggttctgtttcagctcttggtcagcaattggttgaatctgactatgataagagactaagaatcgctgcacgcggttttgaaacaagtcattgcgggtgggcgtggattacctggagtcaagctaaaaatctttctgagctcgatccacttacagctgaacgatttttgcaagatagatgtatatctctcagctccaaaacaataaagagaagggcttctactttaaggcagtggtgtgaaaaattgcaacctgcttatcaggagctctga

SEQ ID NO: 18345 - DNA, 975 bp, Escherichia coli
atgagaagtttctttctttttttgttaaccctgtctgcaaatacatatgcagctacatattgtgatcttttgtggcaaatccctcattttcaggctcaatctttcaagaagattaatgaattagagtatgatttggtaataaaaacagatcctaacatgcagttactctccagagtgagggagaatatgtggccgtggtattctgtgccagttgcaggatggtatacatattgggtagtgtttgataatagtatatctagcttttctaataatattagatatcaggtaatatccattaataatgaaaccagccctggaacagaacatcgtgttggtactgggagccatgtatggacaaatggatgtacagttttggattatgggggggtgctaaactggggagagtctactaatcttacactccgacttaaatttgaaaatcctatacccgctggtatttataatttttctggaagttctcttccagttaaggttttttatgaggaaaataagggaggctatgctgatagtcagtccgtcttgagaggttatcttggacgcataccatatatttctgtcgataactggcagctcgaagtaaaggctcccacttgtagccacaatcacccctcccttgactttgggcaaattacatacgaacaagccaaagctggaataaatatatcaaaaaatttgtcactgtcttgtaaagataatcctgtttcggttaagttgtattttaaagatactcaaaaaactgttactgaagccttttgcggtaagaattcaacggagaaaaattgcaaaataacaatcggtgataacaataaagataatattatttttaataaagacagcttctcttcatcaggtagtggaactcttaatataccgattaatgcgacgtttaagtcaaaaaaaccagagcccggtccatttaaagatagtgtgattattgtggcggaaataaattga

SEQ ID NO: 18346 - DNA, 573 bp, Escherichia coli
atgagaataattattacgattttggttttattattgaccgggtgttcttctgatgtggtaaatcaacgagggcttctcactcagtttgctggcaacaatgctcctggagatcctgaacccagacctgtgttggttagtattagaaacgttcttactggtgggatactcagaaaccctgtaggtcgtgacttcaatgtaaataattgggttatatcagaagtaaagactaatgatttggatttgatatcggcaccgggggggcatgttcagataaaaaaccctgatggtaatgaatgccttgcaattctaaatgggcaattagcggtggctaaacagtgcactgaaagcaatcgcaatgcattatttacatttataaccagtgaaactggagctgtgcaaatcaagtcgattggaaatggtcaatgtttggggaatggagaaagtgttacagatttcaagttaacaaaatgtgttaatgatctgagccgtccttttgatacggtgtcgccgggattactctggatgctgaatccaccattatctccggcaataatgtctccattgacgatctaa

SEQ ID NO: 18347 - DNA, 1503 bp, Escherichia coli
  misc_feature (52)..(99): n is a, c, g, or t
atgatagctttattaattttgctaaagcatatatgttgcatgtgcattcatnnnnnnnnnnnnnnnnnnnnnnnnnnnnnnnnnnnnnnnnnnnnnnnnatgttgcgtgtgcattcatttaataaatctaagacgaaacactcaacattatcaatgttgaagattgtcgaatttgttttacttaaaatcaatatggaagctaatgtaaactattgcaacaattcaatctttgatgaatgcataaggatagcctctgaaaagtattctaaagcacatgcatttgctattgggaaagaacttgagaaattgagttcatttttaaatgataataggatgactaactcatcttatttattttggataagtccaattaggtataggattactcagtcttggactggttatgattcttcactggaaggccattctagattgcctgatatcaaatcagttattgcgattgctgagattttttcaaagcgggatgaacaattatcgtcaagagatatatttactacatctgtgcttgctttacttatgtgtgcaccgagtaggatatcggaaattttagctttgccagcggattgtgaaattacagaatgtgatggaaagggcattcaaagatacggtttaagatttttttcagcaaaagggtatgaaggcaatataaaatggattccaactttaatgatacctgtagctaaaaaggctattagcagattaaaagaattatcaagtcaagcgaggttgttggctgctgaaattcaaaaaaattactctaattcaacgatgggaacccttaaagaaaatatacctccagatctcttttggtatgatagagagaagaaaatcaaatattctaatgcgctttgcttgttaactgaaggacagttaaatcaaaataaaaaggaaatgttagataagttattcagacctacaacgaatttttttaaaactgatatcgttgattctgactatataaaaggatatttaaatgtatttaaaagacatggttatataaatgatgatggtagcccatatttgctaagaacacatcaactgaggcatcttctcaacacttttgctcaaataaatggtatggatgagtttagtattgctcgctggtctggacgtaagcttatttctcaaaatttttcttatgaccacagatcgcatcttcaaatgtctaaagcaataagagaacaaaagttatcagtgtgtgttaatgagcacagaataaaggatattccagtggtggatcttaatgagtttgattcacttagtagtggtgcagtacttgtatcaaaacatggctactgcaagcactcatatgcgtttacgccgtgtgaacattatccgattgagaattctggtttagataacgaaacgatttcaaacattcacgataaaatttcaaaaagaacactgtatgataaaaatgatgggaacataaatgctgatagatggtatgaattccataagagaataaaaaaaggagaataa

SEQ ID NO: 18348 - DNA, 408 bp, Escherichia coli
  misc_feature (192)..(201): n is a, c, g, or t
atggataaaacaaatattaatttaatggaaaggtatctacttctgcttgatcgattcgttgataaacttacggaatcgggctttgaagaacaggagattatagagcaatcatacctgttttgtgccgggttttacattaaataccagcctgaaatagaaaagctaacgttttcaaacagggaagttgttctnnnnnnnnnntcatattatagtcatataaacaaactggatgatgatttgatcaacaaagagcgtatgaagcatgtatgttcttcattgattaactttatagccagtaatggtagccgaacagagaaagtctatatcaacgagaggaaaaaatatgaggcttctaccctaaaaagagggttgtccatcaaagagaagaaaagaaaatatggattgtga

SEQ ID NO: 18349 - DNA, 666 bp, Escherichia coli
atgagcatctccaccacgaaacgccgcaatgaagaagtcaacgtaggtatttctgatcgtcgaaaagcagagattacagccccaacgtttgatctgtttggtgaaacttacacgtttgttaagactttctctggcactgtaattaattccaacccaagcaataatcagatctgggtaaaaaccgacgcaggggatgagaagcagatttccgactatggtatccccttcagaagttcacacactatttataaatacgagctgcgccagtatagtgaggatggttcgtataacgtgtataaagatgcacttatcgttaataagaacacgggagaacatgaagtaaacttaaacaggaaaaaagttgtcatccccgcttttctgacaatgctgttccataatgcttctacagcatcgtattacagagcaatgcctgtttcgaaactattctctattgttttcattttactttgtgctgctgcacttatttcatttctcacattgccttggggctttaaagatggatatgtgtgggatgagcacaagtatatgtggctcacatatttcctatcaaggatcggaagcttcgtttgtatcaattggattaaaagaagaagctctagatttgatcatgaaatcagaaatcttatcgattcagtaaaaaaataa

SEQ ID NO: 18350 - DNA, 1278 bp, Escherichia coli
atgaaagggatgcagaaaatccgcagaggaaagagtttcgctggtatcgtcctctatgcattaaagcccggttctcatcataaaaaagaccctatcgtgatcggtggaaatataacgatagttggcaatgccgctaaagatctgatcgctgaatttgatagcaccaaacagcttcgccctgacgtgcaaaaggctgtttggcacaactcgcttcgcttacctaaaggtgaatcacttacggctaaacagtggtcctgcatcgcagatgactacatgacaagaatggggttctctgaaacgcatctcagatgctacatcctacatgacgacgaaaacggccagcacatccatatcatcgccagcagagtgtctcttgatgccggaaagctctacctcggtaggaatgagaacctggcaagtacgagaataatccagcaacttgaaagagattacaatctgacaagaaccaaaggaccgaaagcatctccagcagcgccctcacctaaacctaagctcaaaaaatcccgtaatgagatgatgatagaaaagagaactggtgagctatgcccaaaaggaatcatccaaaacgcccttaacgaactgcttgatactaggcaatcgattaccgacttcgtgcaacagcttgtggcacaaaatatcaggccaatccctaacattgcctctactggacgcataaacggcttctcattcgaatacaacgggattgctttcaaagcatctcaattgggaaaagggtattcctggtctgccttgcaaagcagaatcgactaccaacaggaacgtgataatgctttcctgtttaaactgaaatcaactgtcagagaaacatttgttggtgcaactcatgatatggtcataactatagatgctcctgaaaccacgacagaatacgttaaccgccccatagaagcacttatcctcgataaacgagctgctggtcaggacgaatactctatcgcttctgtcgaagcgcttctcccagaagctgttgcaactaacaaagaagcgatagcaaccgaaacgttaaaagtagcgcccaagcgaagctatagggcttcaacgttcagatggttagagaccatcccctatctcaataccatcattaccatcttcaaaaacctcaaaatcccaaccctcaaacgtcctcgaaaacacaaaaccatcactggcgtgagaatgatagagataacatcatcaccccccaaaactgccattgaaacaccacataaatcgcacagagcttcgctttcaatgtag

SEQ ID NO: 18351 - DNA, 414 bp, Escherichia coli
atgaatgatagaaatcatacttttaataatatcaagccattcagaatctgtagctatgaaaatttcgcttctgctgaattagcctctcagaagacacgttctcattgtattagtatcagattaaatgatgccgagttatcctacgttgatggtttacgagaggatcttaaccgtgctgtttggatacgtatgtcagcattgaatcgtctccctcccaaaattcctgaaataaatctaactgtctggaaagaccttgccaaggtatctcaggatctgaacaaccttgttcagcatctcaacactaaatcacacgatagtccttttactatcaccgaaatttatacggtgcaaaaaagaataaaagcactaagagatgcccttctgtcagcaaatcaatctgtcagtgataaataa

SEQ ID NO: 18352 - DNA, 249 bp, Escherichia coli
atgcagtcattaccgctcaatgcctcgctaaacgacctggctgaccgcgaagagccttcaatgcgtaaaagttttgtaacttgccgtgccataccgatttaccataacgtcgcattacgcgcaccgcttaaacgcgctgagcacgattctgacgtaaaaaccacaaaaagagatgttttccccctggctaaaccggaaaaatgcgtcaggaacgttttcagcacgttgcatgactatgcatggaactga

SEQ ID NO: 18353 - DNA, 1125 bp, Escherichia coli
atgatatacagatttgaagttgaggggtttaaggggttttcagacaaattagtgtttgatcttactcataggaagaattatgaatttaatcaagattgtatacttgatggtgttgtcaaaaaatcattggtatacggtaaaaatggtatagggaaaagcaacttagggcttgctctttttgatattgtcgctcacttaactgagtttaatgttaatgatggcatgtataataactatataaatgcagttaacaactctggtattgcgagatttaagtatgattttaaatttggtgataatattgtaacttatttatatgggaaaaggagtgtgaaagagcttgtttttgaagagttgtttatcaatgacaggcttgtaactaaatttaatagagtgcttgattcaaatgcctatttctcattatcaggaacagaaactttaaacactgctcttgcggagtctaaaatatcgatcattaattatataaaaaataacgccatccttaatgatggtatcgaaaaagatctatttaatcagtttattgtttttgttgagaaaatgttgtacttcagatctcttgattcaaataattatcttggactagagatggggcgacacctaatcactccggatatcgtggagagaggtaatgttgatgattttgaaaggtttttgaataaagcaggggttaaatgtaaactttgcgtaatgaaaattcaaagtaataatggagttgttgaagatattggctttgactttgggagtaagcaaattccattctatggagttgcgtccacaggtacaaaatcattagctcttttttattactggttgcaacgatttaaagatgaaaaatgtgtttcatttatctttgtagatgagtttgatgctttttatcatcactcgctttccatgcttattgttaaggagatgaaaaaagccggcgcccaggtgataattacaacgcataatacaaatgtcatgacgaatgagttgcttaggcctgattgttacttcattatggatgataaagggattactccacttttcgagaaaacagacaaagagttgcgagaagctcataatatagagaaaatgtataaagcgggtacatttaatgactga

SEQ ID NO: 18354 - DNA, 783 bp, Escherichia coli
atgactgagcggattttatttgtttttgagggggagaaaacggagaagactatcactgatagtcttttaaaaaaattcattgagaatgataagagggttgttctttcttcatttaagacagatatatattcactttataagttgatgagtgaggatgaagatcttgatgtatttgccgtgttgaaggaaaaaaatcctgacttagtagattttgatagagattctttctctcagctttttctgttctttgattatgatgggcatgctccagctgcttctgacgaaaagatagataagctactaagtttttttaatgaggaaactgaaaacggtaaattatttatcagttatcctatggttgagtctataaaatgtatctcgcatattgatgcgattgaggatttttgtaggcatacagtaaaaatatgtgattgttctaagtttaaggggtatgttgcagaatatgctcataagtcattgattcactttaatttgtattctgatgagatttggaatgatgtggttaggatgcattgtgtgaaatctaatttcataatgaaggggaatatgatttttccttctaattatttttcacagaaagatatattcggtatgcagaaatcaaaatatatagatccaaatggctctgtatctacattaagttcattcccgatgttacttttagacttttttgggcaccaaagattgtttgtgctggtcagcggtgaacaaattgaggatggagacgtattgagttcggaggaagcccagcgtactatttga

SEQ ID NO: 18355 - DNA, 204 bp, Escherichia coli
gtgaacaaacagcagcaaaccgcacttaacatggcgcgattcatcaaaagccagagtctgacactgcttgaaaagctggatgcccttgatgccgacgaacaggcaaccatgtgtgaacggctgcacgaactggcggaagaactgcagaacagcatacagacgcattttgaagcgcagtacggcattggagtagaacaaccataa

SEQ ID NO: 18356 - DNA, 165 bp, Escherichia coli
atggtaaataatataaatacggcctgtagtatggagttgacagttaatgaaccttcgatattgaaatttaatgtgatagagaggaataataaaatgaaacaaggaattattatcagtaatgttgtgcttataaacaattttattgttttaagtaattttttataa

SEQ ID NO: 18357 - DNA, 1101 bp, Escherichia coli
atggaaagagtaaagtctatagtttacagacacttaaccaacgctgattttttcaacattaataagccaccgggcatggaattaggtggtggaggtcaagcttatatagattttccaacaagctcagtaacaccagcacaatggcacgaattttttacaggaataaatggagtttctgttcaacaagaaacacaagggccgagctggacatttccaatctatagtctcacattagataatggtcagaatccggcagttcagtctttgaaaatttatcagagaagacaacagtcagtaagtataactagccagaagcttttttcctctcgctcaaacagagtaagggcctggcacccacaatcaggcttccctatccccgtagataatacagatagatcacaatgccccgatggtctcatggtttatcttgccgctacctatgagggaaaagtatgggcggggtggtttttaaatgacggaacgacacaacttccccttaaaggtattccaccgcaatctattaactccatgttttcattaccggcagacgctgaaggatatagtggaataataaattttcacagcaatgattatctttacttaaacccgttagataaatattatcctcttcaatctcaaggaacggaaacatatacttcaggggtatataaccctgcgaatgacgaatcaacatttattgatgacttatttaataatgataatagtcagttcgaagttctgagcaaggagtatattagaaaagtaaaagcaagaaacaaatccatcgttacaaaactgaagaatttatataataacacatgtcagataactggaaatcagtttgcctttcagaaaaaagatggtattaactacacagaggttcatcatctaatacccctcggtgaaggtggctctgacgacatccgaaatttgattgttgtcaacccattaattcataaaatgctacaccatgctacagttacaggtttaaacctggaaaatatttccatcgatgctcatggggtcggaactttacagattaatataaatgatttgccatatacaataacatggcatccaaaacacacagcactcatttga

SEQ ID NO: 18358 - DNA, 234 bp, Escherichia coli
atgcagacgttcgccagcggctctctgcttcagactgccgttcaggtgatacaggttgcagggcaacatcccgaccgactccgccagcaccctgacacaggaaaaaaccgccgtcagtcgcatggcccgctggctgctgatctgctttccggtataggtgtcgtaggacaacccgatagcatccgccagctctgctggcgtggtcaccggtgcgtcactttttcgttgaaataa

SEQ ID NO: 18359 - DNA, 204 bp, Escherichia coli
atgcaacattttaaatttaatggcgagttaagtcagatcgtagtgggtgaaaaccctcaaatatggaattctgaatggatcgcatcttcaaaaatattgcgaataattagcgatacacctctagtaaactttgacaaattacgaatggtggaaccaattatagaaccagaggaatttgatcttttcccaaaaaaatcattataa

SEQ ID NO: 18360 - DNA, 576 bp, Escherichia coli
atgactcacaccatgcaggagatcgccaccagctcgcaaaaaattggcgacattatcagcgttatcgacggcattgctttccagaccaatattctggccctgaatgcggcagtggaagcggctcgcgccggagagcagggtcgtggttttgcggtagtggcaggtgaagtgcgcaatcttgccagccgtagcgcccaggcagcaaaagagatcaaagggctgatcgaagagtcagtcaatcgtgtccagcagggttcgaaactggtgaataacgccgccgcgaccatgactgatattgtcagttcggtgacccgcgtgaacgacattatgggagaaattgcttcggcctcggaagaacaacggcgggggattgagcaggttgcgcaggctgtcagccagatggatcaggtgacacagcagaacgcctcgctggtagaagaagcggcggcggcaacggaacaactggcgaaccaggctgaccatctttcgtcgcgtgtggcggtatttacccttgaagaacatgaagtagcacgacatgagtcggcgcagttacatattgcgccagtggtatcctga

SEQ ID NO: 18361 - DNA, 1965 bp, Escherichia coli
gtgagcatggatataagcgatttttatcagacattttttgatgaagcggacgaactgttggctgacatggagcagcatctgctggttttgcagccggaagcgccagatgccgaacaattgaatgccatctttcgggctgcccactcgatcaaaggaggggcaggaacctttggcttcagcgttttgcaggaaaccacgcatctgatggaaaacctgctcgacgaagccagacgaggtgagatgcaactcaacaccgacattatcaatctgtttttggaaacgaaggacatcatgcaagaacagctcgacgcttataaacagtcgcaagagccggatgctgccagcttcgattatatctgccaggccttgcgtcaactggcattagaagcgaaaggcgaaacgccatccgcagtgacccgattaagtgtggttgccaaaagtgaaccgcaagatgagcagagccgcaatcagttgccgcgacgaattatcctttcgcgcctgaaggccggggaagtcgacctgctggaagaagagctggggcatctgacaacgttaactgacgtggtgaaagggacggattctctctcggcaatattaccgggcgacatcgccgaagatgacatcacagcggtactctgttttgtgattgaagccgatcagattacctttgaaacagtagaagtctcgcccaaaatatcccccccaccagtgcttaaactggcagccgaacaagcgccaaccggtcgcgtggagcgggaaaaaacgacgcgcagtagtgaatccaccagcatccgtgtagcggtagaaaaggttgatcaattaattaacctcgtcggcgagctggtcatcacccagtccatgcttgcccagcgctccagtgaactggacccggttaatcatggtgatttgattaccagcatggggcagttacaacgtaacgctcgtgatttgcaggaatcagtgatgtcgattcgcatgatgccgatggaatatgtctttagtcgctatccccggctggtgcgtgatctggcgggaaaactcggcaagcaggtagaactgacgctggtgggcagttccactgaactcgacaagagcctgatagaacgcattatcgacccgctgacccacctggtacgcaatagcctcgatcacggtattgaactgccagaaaaacggctcgccgcaggtaaaaatagcgtcggaaatttaattctttctgccgaacatcagggcggcaacatttgcattgaagtgaccgacgatggcgcggggctaaaccgtgagcgaattctggcaaaagcggcctcgcaaggtctgaccgtcagcgaaaacatgagcgacgacgaagtcgcaatgctgatatttgcacctggcttctccacggcagagcaggtcaccgacgtctccgggcgcggcgtcggcatggacgtcgttaaacgtaatatccaggagatgggcggtcatgtcgaaatccagtcgaagcagggtactggcactacgatccgcattttactgccgctgacgctggccatcctcgacggcatgtccgtacgcgttgcggatgaagttttcattctgccgctgaatgctgtcatggaatcactgcaaccctgtgaagccgatctgcatccactggctggcggcgagcgggtgctggaagtgcggggtgaatatctgcctatcgtcgaactgtggaaagtgttcaacgtcgcgggcgcgaaaaccgaagccacccagggaattgtggtgatcttacaaagtggcggtcgccgctacgccttgctggtggatcaattaattggtcaacaccaggttgtggttaaaaacctggaaagtaactatcgcaaagtccccggcatttctgctgcgaccattcttggcgacggcagcgtggcactgattgttgatgtctccgccttgcaggcgataaaccgcgaacaacgtatggcgaacaccgccgcctga

SEQ ID NO: 18362 - DNA, 927 bp, Escherichia coli
atgaagaatcaagcgcatccgattattgtcgtcaaacgacgcaaagccaaaggccacggggcagcacatggatcgtggaagattgcttatgccgactttatgaccgcgatgatggctttttttctggtgatgtggctgatctccatctccagcccaaaagagttgattcagattgcggagtacttccggactccactggcgactgcggttacgggcggcgatcgcatttctaatagtgaaagcccaattcccggtgggggtgatgattacacccaaagccagggggaagtgaataagcagccgaacatcgaagagctgaaaaaacgcatggagcaaagtcgattgcggaaattgcggggtgatctcgaccagttgattgaatccgatccgaaactgcgggcgttacgcccacatctcaaaatcgatctggttcaggaaggtctacgtattcagatcatcgatagccagaatcgcccgatgttcagaaccggcagtgccgatgtggaaccctatatgcgcgacattctgcgcgccatcgcgcccgttctgaatggtattcccaaccgtattagcctttcgggtcataccgatgatttcccttacgccagtggtgagaaaggatatagcaactgggagctttctgccgatcgggccaatgcatcccgccgcgaactgatggttggcgggttgaatggcggcaaagtgttacgtgtcgtcggcatggcggcaacgatgcgcttaagcgatcgcggtcctgatgatgctgtcaaccgtcgcatcagcctgctggtactgaacaaacaagccgaacaggccattttgcatgaaaacgccgaaagccagaatgagccagtaagcgccctggaagaacctgaggttgcaccacaggtcagtgttcccacaatgccatcagccgaaccgaggtga

SEQ ID NO: 18363 - DNA, 1455 bp, Escherichia coli
ttgaatatctcctctgctttacgccaggttgttcacggcactcgctggcacgctaaacgcaagagctacaaagtgttgttctggcgcgagataaccccgcttgctgttcctatcttcatggagaatgcctgtgtcctgttgatgggggttctgagcacttttctggtcagctggctgggaaaagatgcgatggccggcgtgggattggcggacagcttcaatatggtcattatggctttttttgcagctatcgatcttggtactactgtcgttgtagcatttagtctcggtaagcgagatcgacgacgagcgagggtggcgacgcggcagtcattggtgatcatgacgttgtttgccgtactgttggcaacgctaattcatcattttggcgaacaaattattgatttcgtcgcgggtgatgccacgacagacgttaaagcactggcgttgacttatctggagctgaccgtactcagttatccagcagctgccatcactcttattggtagcggggcacttcgtggtgcagggaatacgaaaataccgctactgattaacggtagcctgaatattcttaatattattattagcggcatattgatttacggccttttctcctggccgggactgggatttgtcggggctgggttgggtttaaccatttctcgttatattggcgcagttgcaattttgtgggtgctggcgattggttttaatcctgcgctaaggatttcgttaaagagctattttaaaccgctgaattttagcattatctgggaagtcatggggattggtattccagcgagtgtcgaatcagtgttatttaccagtggtcggttattaacccaaatgttcgttgccgggatggggaccagcgttattgccggaaattttatcgcgttctcaattgcggctcttatcaacttacccggaagtgcgctcggttctgcttctacgatcattacaggccgaaggttgggggtagggcagatagcgcaagcagagattcagttgcggcatgtgttctggctgtccactcttggattaacggccatcgcctggctaacggctccctttgccggggttatggcatcgttttacacccaggatccacaggttaaacacgtcgttgtgattctgatttggctaaatgctttatttatgcctatttggtccgcctcatgggtgctacccgctggatttaaaggtgctcgtgatgcccgttacgccatgtgggtttcgatgttgagcatgtggggttgtcgggttgtagtcggttatgtgctgggaatcatgcttggctggggtgtggttggcgtctggatgggaatgtttgccgactgggctgtgcgggccgtgctgttttactggcgaatggttactggacgttggctatggaaataccctcgatccgagccgcaaaagtgtgaaaaaaagccagttgtgtcggaataa

SEQ ID NO: 18364 - DNA, 951 bp, Escherichia coli; identical to SEQ ID NO: 13472

SEQ ID NO: 18365 - DNA, 204 bp, Escherichia coli
atggaaggcgtggtaatgcgtgacatccacccatttactgcgccacataacgaacgcgcggccgattcgggtaatactgcaacgcccatgccgctggcaatcgctgcggtaagcgtagcaatagactcaatttcaccaatgacttttgccgtgagccgccgtagggaaaacgcctcatcaacacgaagtctaacagcgctgtaa

SEQ ID NO: 18366 - DNA, 2169 bp, Escherichia coli
atgattactcgtattcctcgtagttctttctctgcaaatattaataatacagcccagacaaatgaacaccaaaccctgagtgaattgttttataaagaactcgaggataaattttctggcaaggagctggcgacgcctctattaaaaagcttctcagagaactgtagacaaaatggtcgtcatatctttagtaacaaggattttgtcattaagttttccacgtccgtcttacagactgataaaaaagaaattacgataattaataaaaatgaaaacacgacactcactcaaaccattgctccaatatttgaagaatacctgatggaaattttacctcaacgctcagacgctcttgataaacaaaaattaaatctaaaatcagatagaaaagaaaaagaatttccaagaattaaacttaatggtcaatgttattttccggggcgaccccaaaaccgtatagtatgccgacacattgctgcacaatatattaatgatatttatcagaatgttgattacaaaccccatcaagatgattactcttcagctgaaaaatttctcactcacttcaacaaaaaatgcaaaaaccagactttggcgttgatttccagccgtcctgaggggcgttgcgttgctgcctgcggtgatttcgggctagttatgaaagcatattttgacaagatggaatcaaatggcatcagtgttatggcagccatattattggtggataaccatgctttgacggtccggctaagaataaagaacacaactgaaggatgtacccattacgtggtttcggtttatgatccaaatgtaactaacgataaaataagaatcatgagcgaaagtaaagaggatattaaacactattcactgatggactttatgaatgtagattatagcctcctgaaatggtcaaatgatcatgttattaaccaatctgttgcaataattccagcacttccgaaagaacagctattgatgctaaaaggatctgtggatgaaataccccctccattatcacctgcaacgatgaatttgctaatggcaattggtcagaatcatcaacttacgcaactgatgactcaactccagaaaatgccagaactacatagaacagaaatgttgactgcctataatagtattaacctccccggtttatatttggctataaattatggtaatgcggatatcgttgagactattttcaattcattgtcagagccaggatatgaagggttactctcgaaaaaaaatctcatgcatattctggaggcaaaagataaaaatggtttttctggattatttttagcgatatcacgtaaggataaaaatgttgtaacctcgattctgaacgtcttacctaaactggccgcaacacatcatttagataatgaacaggtgtataaattcctgagtgccaaaaatagaacgtccagccatgttttataccatgttatggcgaatggtgatgccgacatgctgaaaattgttttggacgcgttacctttgttaattcgcacatgtcatttgactaaagaacaggtactcgatctcctgaaggcaaaggatttttatggttgcccaggactatacctggcgatgcaaaatggacatagcgatatcgtgaaagttattctcgaagcattaccctgtctggcccaggaaattaacatttcagcttccgatattgtagatcttctgaccgctaaaagtcttgcgcgcgacacgggtttgtttatggccatgcagcgcggacatatgaacgttattaagactatttttaacgcattacccactctgtttaatacgtttaaattcgataaaaaaaatatgaagcccctcctcctggcaaataattctaatgaatatcccggtttgttttcagcgatacagcataaacaacaaaacgttgtagagacggtttatcttgctttatctgaccatgcacgcctgtttggatttactgctgaagatattatggatttttggcaacataaagcgccacaaaaatactctgcctttgagttggcttttgaattggatcaccgggttattgctgaattaatccttaatacgataaataagatggctgaaagctttggctttacggataaccctcgatacattgcggagaaaaattatatggaagctttactcaaaaaagggtaa

SEQ ID NO: 18367 - DNA, 504 bp, Escherichia coli; identical to SEQ ID NO: 9525

SEQ ID NO: 18368 - DNA, 261 bp, Escherichia coli
ttggatttgcacggtttgacgcagctgcaagccaagcaggagttaggcgcattgattgccgcctgtcgccgcgaacatgtgttttgtgcctgcgtgatgcatggtcatgggaagcatattttgaagcagcaaacgccgctgtggctggcgcaacatccgcatgtgatggcatttcaccaggcaccaaaagagtacggtggtgatgcggcattgctggtgttgattgaagtggatgagtggttgccgccggaattaccgtga

SEQ ID NO: 18369 - DNA, 369 bp, Escherichia coli
atgagcagaaggggtacacagtttagtaacgcaaaagttacaaacccaatgttaagaatccctttttccagtagtgacttgggtgcaatagtaaacgctggcggtggggcaaaggtattggttgatgtaacagccgaatatagacaagggctagtaagaaatttaacaaccagtaaacattatttagaatccaaactttcagagtaccctggaagcttgggtactttggttttcaaattaagagaccagggaatagccaaaacgcataggccgaacaaaattgctcaagaggctggattgcaaaatgccggtcatgccaaaatagatgaaatgttggttgcgctcatgccggctgttttgacgtattag

SEQ ID NO: 18370 - DNA, 3117 bp, Escherichia coli
atgactcatcaaacacataccattgctgaatccaataactttatcgtccttgataagtacatcaaaactgagcaaacaagcgacagctatcagagcgaatcggacctggaacgtgaactaattcaggacctgcggaatcagggctatgagtttatacccgtaaaatcacagtcagcgatgctggccaacgttcgggaacagcttcagaacctcaatggtgtggtgtttaatgacagcgagtggcggcgtttcacggagcaatatctggacaacccgagtgatggcattctggataagacccgtaaaatccatatcgactatatttgcgactttatttttgatgacgagcgtcttgagaacatctatttgatagataaaaagaatctcatgcgcaataaggtgcagattatccagcagtttgaacaggcgggttctcatgctaaccgttatgacgtcacgatcctggttaatggcttaccactggtacaaatcgaactgaaaaagcgcggcgtggcgattcgtgaggctttcaaccagatacatcgttacagtaaagagagttttaacagcgaaaattccctgtttaagtatctgcaactgtttgtcatttctaacggcaccgatacccgttactttgccaacaccacaaagcgcgataaaaacagttttgacttcaccatgaactgggcgaaatcagacaacacgctgattaaagacctcaaagattttaccgctacctttttccagaaacatactctgcttaatgttctggtgaactacagcgtgttcgatattagccagacgctactggtgatgcgaccgtaccagattgccgccaccgagcgcattctgtggaaaattaagagctcctttacagcgaagaactggtcaaaaccggaaagcggtgggtatatctggcacaccacgggttccggtaaaaccctgaccagctttaaagccgcgcgtctggcaacagaactggactttattgataaagttttctttgtggtcgacaggaaagacctcgattaccagaccatgaaggaatatcagcgtttttcgccagacagcgtcaacggctcggaaaataccgcaggccttaaacgaaatctggataaggacgataacaaaattatcgtcactactattcagaaactcaataacctgatgaaagcagaaagcgacctgcctgtatataatcagcaagtggtgtttatatttgatgaatgccaccgcagccagtttggagaagctcagaaaaacctgaagaagaaattcaaacgctattatcagtttggttttaccggcacacctattttcccggaaaacgctttaggctcagaaacgaccgccagcgtatttggtcgtgaattgcattcgtatgtgattaccgatgcgattcgtgacgaaaaagtgctcaaattcaaggtggactacaacgatgtgcggccacagtttaagtctttagagacagaaaccgacgagaaaaaactgagtgcggctgaaaatcagcaggcatttcttcatcccatgcgtatacaggaaattacgcaatatattctgaataacttccgccagaagacccaccgtactttcccaggttccaaaggctttaatgccatgctggcagtgagtagcgtggatgccgcgaaagcctattacgcgacgtttaaacggttacaagaggaagcagctaataaatcggctacctataaaccgctgcgtgttgcaacaatcttctcctttgccgccaatgaagaacaaaatgccattggtgaaatttccgatgaaacttttgataccagcgcaatggacagcagtgctaaagagtttcttgacgctgcaattcgtgagtataacagctattttaaaactaacttcagcaccgacagtaacggttttcagaactactatcgtgatttagcccaacgggttaaaaatcaggatatcgatctgttaattgtcgttgggatgtttttaaccggcttcgacgctccaacattgaacacgctattcgtcgataaaaacttgcgttttcacggcctgatgcaggcattctcccgcaccaaccgcatttatgacgctactaaaaccttcggtaacatcgtcacttttcgggatctggaacgctcaaccattgatgccataacgctgtttggtgataaaaatactaaaaatgtggtgttagaaaagagttatgctgagtatatggaaggctttacagatgctgccactggtgaagctaaacgcggctttatggcagtagtttcagaactggaacaacggttccctgaccctgccagtattgaaagtgaaaaagagaagaaagacttcgtaaaactgtttggtgaatacctgcgtgccgagaacatcctgcaaaactatgatgaatttgccacactgaaagccctgcaacaaatcgatcttagcgatcctgttgcggtagaaaaattcaaagcagaacattatgtggatgatgaaaagttcgctgaattgcaaatgattcgtctccctgctgaacgcaagattcaggattatcgttctgcctataacgatattcgtgactggcagcgccgtgagaaagaagctgacaaaaaagaaaaatcaaccactgactgggatgacgtagtttttgaaatcgatttgctgaagtctcaggaaataaacctggattatatccttggactgattttcgaacacaacagacaaaacaaaggtaagggcgaaatgaccgaagaggtcaaacgcttaattcgttcaagccttgggaaccgtgccaaagaaggtctggtggtcgattttattcaacaaacaaacctggatgatttgccggataaagccagcatcattgacgcgttttttacctttgctcaacgcgaacagcaacgtgaagcagaagcattgatcaaagaagaaaatctcaatgaagaggcggcgaaacgctatattcgcacgtctttaaaacgcgaatacgccaccgaaaatggcacggaattaaacgagacattgccaaaactcagtccgttaaacccgcaatataaaacgaaaaaacagacggttttccagaagatcgtcgcgtttattgaaaagtttaaaggtgtaggcgggcagatataa

SEQ ID NO: 18371 - DNA, 1305 bp, Escherichia coli
atgagcgagttgagttatctggaaaaattgctggatggggttgaggttgagtggttgccactctcaaaagtattcaacttaaggaatggttatacaccgtctaaaactaaaaaagaattttgggcgaatggtgatataccttggttcagaatggatgacatacgtgaaaatggtagaattctagggaattcacttcaaaaaatttcatcctgcgccgtaaaagggggaaaactatttcctgaaaattcaatattaatatcaacgtcggcaacaattggtgagcatgctttaatcactgtacctcatctagccaatcaaaggtttacatgtttggctttaaaagagtcttatgctgattgctttgatattaaatttttattttactactgtttttctttagctgagtggtgccaaaaaaacacaacgatgtccagttttgcgtctgttgatatggatggattcaaaaaatttttaatccctcgcccctgcccgaataatccggaaaaatcccttgccatccagtctgaaatcgttcggattctggacaaattcagcgcccttacagcagagcttacagcagagcttaccatgcgtaaaaaacaatacaactactatcgcgaccagttgttgagttttgatgaggagcaggaaaaacctatttatctggaaaaattgctggatggggttgaggttgagtggagaactttaggagaaatagcagtaatttatgatggaactcacaagactcccaaatatacggcttccggagttcctttcgttagcgtgcagaatatcaaaaatctatacgggacaaataaatatatttcacctgaggatttcaaaacatacaagaacaaaccgcgcaagcatgatttgtttatgacgaggattggcgatgtcggtacttgtgctattgtggaggatgatagaccattagcatactacgtaacacttgcattaatacgaataaatcaacaaattgctgtaccaggattcattcgttatttaatcgaaagcagatttggtaaggccgaattgtataaaagaacgcttatacacgcagtaccaatgaagattaatttaggcgaaattggtaaagttgctgtaccaatcccctgcccggacaacccagaaaaatcccttgccatccagtctgaaattgttcggattctggataaattcgacaccctgaccaactccatcaccgaaggtctcccgcgtgaaatcgagttgcgccagaaacaatacgaatactaccgtgatttactgttcagtttcccaaaacctgaaactgtcagtaattaa

SEQ ID NO: 18372 - DNA, 1557 bp, Escherichia coli
atgaccagtcttcagcagcgcgcggagcttcatcgccaaatctggcaaattgctaacgatgtcagaggttcggtcgatggatgggattttaagcaatacgttctgggcgcgcttttctaccgttttatcagcgaaaatttttccagctatattgaagccggtgatgacagcatctgttatgcgaaactggatgacagcgtaattactgatgacattaaagacgatgccatcaaaaccaaaggctacttcatctaccccagtcagcttttctgcaacgtagctgcgaaagcaaataccaatgacagactgaatgcagatttaaacagcatcttcgttgctatcgaaagttctgcttacggttacccttcagaagctgacatcaaaggtttgtttgctgatttcgataccaccagtaaccgcctgggtaacaccgttaaggataaaaatgcccgcctggctgcggttctgaaaggggttgaagggttaaagcttggcgactttaacgaacatcagattgacctgttcggcgatgcctatgagttcctgatttctaactatgcggcgaatgctggtaagtcaggcggcgagttctttacaccgcagcacgtctctaagctgattgcacaactggcaatgcacggccagacccacgttaacaaaatctacgacccggcagcaggttccggttcgctgttgttgcaggctaaaaaacagtttgatgaccatatcatcgaagaaggtttttttggtcaggaaatcaaccatacgacctataacctggcgcgtatgaacatgtttttgcacaacatcaactacgacaagtttgatatcaagttgggcaatacgctgactgagccgcacttcagagatgaaaaaccgtttgatgccatcgtttctaacccgccgtattcggtgaaatggattggcagcgatgacccgacgctgattaacgatgaacgttttgccccggctggcgttctggcccccaaatcaaaagctgacttcgcctttgtactacatgcgctgaactatctttctgccaaaggtcgtgctgcgattgtttgcttcccgggtattttttaccgtggcggcgcggagcagaaaatccgtcagtatctggtcgataataactatgtagaaaccgtgatttcactggcaccaaacctgttctttggaaccaccattgccgtaaacattctggtgctgtctaaacataaaacggataccaaagttcagtttattgatgccagcgaactgttcaaaaaagagactaacaacaacattctgaccgatgcccatatagaaaaaattatgcaggtatttgccagcaaggaagatgttgctcatctggcgaaatctgtcgcgtttgaagccgttgtcgcgaatgactataacctgtcagtgagcagctatgtggaagcgaaagatactcgcgaaattatcgatatcgctgagttgaatgcagaactgaaaaccacggtcagcaaaatcgaccagttgcgtaaagatattgatgcgattgtggctgaaattgaaggctgcgaggtgcagaaatga

SEQ ID NO: 18373 - DNA, 834 bp, Escherichia coli
atgcaaacagaagctgaagtcttaaccgatcataacgagctaatttgctcgaccagtattgagcgcatcgtcacaggacgtgatagtgcactgaaccagatagcgacgttaatccaaaaacttgatgatatctccagcctgacatccagtattggcggtgatgtggctggagcctgggcaatgcgtaatggatatgcctttgactgttggctaatgcaaccaaccgacaaagcgatgccggtgatcacccgcaatatcgatcgcagcatctggcgcgatctcatgctgaagtccgggatgttgactctgatggatgccgaagcccgcagtcagtgggcaaagaatctggaggagggcgatctcccggcgattagcgaagccaacatcctgagtacctttgaacaacttcaccacaataagcaggacgttttcgaacgtgggattatcaatgtatttaagggattgagctgggattacaaaaccaataatccctgttacttcggtaagaagattatcgttaacaatctggtgaagcatgaccgatggggttacagcctgcactggggctggcgaggagatcagcttgccgatctggaacggatgttctatctgctggatgggaaggccattcccgataaccggcatgatgttgcgattcggtttatggacttcgttagtgctcacccgcatgaacaggtatttgatgacgatttatttgtcatccgctattaccagaaaggcagtgggcatatcactttcaagcgactggatctggtggataagatgaatgacattgtggcgaagcactatccgtcagcgttatcagcaaaatga

SEQ ID NO: 18374 - DNA, 183 bp, Escherichia coli
atgaatgtcgtatgtttgctgtcaaaatgtcgttactggaaccctctgaatttcggcatatccatttactgtaaacaatacctacctgaaaaacagttgattccctatgcaactagaaaatgcacacaggttgaaaaacgagtagcgattttacgtctgaaagaatgctatggccttctctga

SEQ ID NO: 18375 - DNA, 2055 bp, Escherichia coli
atggttcaggattcatcagcattagcccccttctttcgcgctcaaattgaaaaaaataatcaatacaattcagtttggggcaaacactaccgcgagcttgtagaacagattcaggctgaaaaaccaaacttttctgaagccacgattcggcaggtatggtatgaacgtgacaatggtgtctccagcctgatgcaaggtgggatgtcattggttgaatttgaaaatgcacaaaaagaccttctaacgctcacccgtcagatagcagaagagtgtacacaagaaaattataatcgggtcattgaacgccttatcaaacttaaagcggacggagtattaaataaggtatatagggctctttgtaatcgtgcttttgcagcaatatacccatcaaaaattagcagtgtcgtgaatgttaataatttttttagttgctacaattattgcaacaaccatttccagctaggtctttccggagaacgggagtggctggctcgcaatgttgatcttaaagaaacgctaaatcgtgcgctgggtgatgatatcgaccctattgagctgaatatgtcactttggcatctctatgcgtatgaaattcaggataaaaatgctatcggtttagttggaagcgaaagtgctttacaagaaaatgagcaagaagatgatgttataagttcgccattgcctaaaaacacaattctctatggcccgccaggtacaggtaaaacatatcgtactattgagcttgctgtacaaatttgtgatccgatcgcttactccctgcaggagggtaaggatgagagtgaaaaacgtcgcgagttgaaaaagatttatgatcagcttatcaaagataatcgagtgcgttttatcacctttcatcagagctttggttatgaagagtttattgaaggtttaagagctgagactactgatgacggtaatgtaaaatacgaaataaaggcaggtatttttaaacagatatgcgaggatgccgcctttggtcatgctggtgcgcaggaaatgttggatagcgcacttactcgcctacaagaacgtttatctgaaggtgaaaatatcacgctggaaacacaacagggtaaggccttccagctgacgtataaaagtcaaaccaactttggaattttcccgtcacaatcgaaaaaagaggatttaggacagggttacaatgcctatttgaaggatattcggcaagtttatcaggatccacgagcaaaagtacataatccatcttatgtacgcagtatccttaactatttaattaatcaacgttatctgcctctgaatactcagagcgtagcttcagaaaaaaaggaaaactatgttctcattattgatgaaataaatcggggtaatatttcaaaaatttttggtgaactaattacccttattgagccatctaaacgggctggtgagccagaatcgcttagcgtattgctgccatactcttccactccatttagtgtaccgaataacctttatttaattggtaccatgaacactgctgatcattcgcttactgcacttgatactgcactacgtcgcagatttgattttgaagcgatgctgccagatattactgttctgaaagatactgtcattaaaggtattgatctgcctcgtctattgcagacgcttaacgatcgcatccaggttttatacgatagagaacatatgctggggcatgctttttttatccctgttgtgcaggtaaaagaagacgaagctctggcatttgaaagattcaaacggattatgcgaaataagatactaccattgctggaagaatatttttacaatgactggcaaaaaattcgcatggtactggctgataaccaaaaagaggaagcaccagatcttcaatttgtacgtgaggtgaaataccagaaaaagtatgccgatctctttggtgataacggaacagatgacttgggaaccagttttcacctggcagcagaggatgacaacgtttgggacaatccaatcgcctggcagcaaatttatgcacctcaaaaagaaaaacgcaggagtgcggaatga

SEQ ID NO: 18376 - DNA, 1311 bp, Escherichia coli
atgaaatcttccagtcatttcactgtgttcgaatacgggcatttagtgagtgaggaaggtgatgcccgtataaataatgcggtagtgctacctgcagacctatttaaatggcttgagctgcgctgtctgaaagacgatgctgataatactcatcgtttgctcacccttagcagccggaatggagtaaaaacgctgcaggtaaaaaactatgcaggagtaatctcactgccaggggggcgatttctcgaaatcctgcctaaaacaggtcaggataatgaggatactgttcgtcaacaattactgatgatgttacgtacgttaaaatcatttcgtcatattgcctcctctgaatctggcgtcaaaatatctaaaatgcctctgatggatatctttattcaacaatttatagagagcgtgcgtaagattgtgcagagagggttaaaacgtgactatttacgtcaggaagataatcttccatggataaaaggaagattacggatctctgcacaattaagcaaaaactgtattaggcgggatctgtttcaggtggagtatgacgagtacagcgtcaatcgtctggaaaaccggatactcaaaactgcaatcaataagattagtcgccagaccagtaatccacaattattacagcagataacacagctgcagtttcactttgaaaatatcacgtcagttcatgatgcttatatagctttcgagcagttacactttgatagacacatgcatcactatgagcaagcattagcgtgggcgaagatgattttattgggcgattctccacactgtatgtatggggatgttaatgctttttcactgcttttcccgatggaggctgtttttgaatcttttgtgacgacatggatgcgttatcgttattatgataaatggcgagtggacgcacaggtaagttcaaaaaatctgattagttataacggtaaagctttatttaagctgcggcctgatatttgtttacggcctcgtaaaagtactactggttcagttattacctgtgatattaaatggaagatagtaaatggcagaaaggacagtcttgaacaatctcaagccgatctctaccaaatgcttgcctatggattgaattaccaggagggggaaggtgatatgattttgatatacccctatcataacggatttaatcagccatctcctcatccttatgaatttagccatcagaaggaaaataggttacgtttatgggttgtacctttctttattggcgagagtttacagacatcagagttgcgttttcctagtggggctgaatttatttag

SEQ ID NO: 18377 - DNA, 1653 bp, Escherichia coli
atggaagctaaagaatgtaaggtgcaggatatccttactgaaaacaaaaagtttattattccttcttatcagcgtccttacagttggacggtagataatgcagagcaactcattgatgatatttataaaagctctcaatcagaagagaatgaatattttattgggagtatgatttgtatcaataaagggcaaaatcagtatgaagttgtagatggacaacaacgtcttacaacgttaagcattattgtctccgagctaaaaaaaatcatcccgattcaggggataaaagatgatttgcaaaaaagagttctgcctattgatgtttattctgatgaaactgatgaaccaagactaattgttagaaaaaaagagtatgatctttataaatattatatactgcaggattctaaagattataaacctgaaaagccatcggatactgagttagtattcattagcaacgctgaaacaattagagattatttgttgcggttatctgttgatgagttgaagttgcttgctaaatatattttgcaaaatgtatatatcgtatttgtgcaaactgatgatttcgcatcatcatttagactctttaatgtattaaatagtcgaggtttacctttaagtaatgcagatcttttaaaaaatgcactgtttgaatcagcttctacgcataataaaaaatcagagcaaatagaatcagcatggtcgcaaattgaagatatggttggagtgagacggcttgataaatttcttactcttcataagctttccgagaaaaaagatcgtgacagggtattacaaaaaggttttgaagcttttattgaaaatctccagcagcaatttgatggagatgctattgctatgtcactgatgttggttaattctgcaaaaaattatactaagattttagagaatgattttgaacacccttcaatacgacgaaaaatagcatcgctaagtaatttaggggtagatgagtggattcctccggttatggcattcatgaatcgaatggctcgtacagaagattttaatttagatgatttttctcaatttattaccgcctttgagaaggtatatatgcatgggtggttaaaaaaacaaattaaaagccaaagagaaatggtttgttattcagctctggtagcaataaataatgatatgccttttgattctgtgataaatcagataaaccaacatgcagataattcaggttttatagctgctctggatgaagatttatatgagcctcgtccgaatcaagtgaacttaataaaagcaattttgcttcgcttagacatggagcaacaagatgagagcgtgattaaaacctatacggggagaatcacaattgagcatattcttcctcaagcattagttaatgaatactggattaatagattccaacctcaagagcatgtctactggctgcataaaataggtaatttaacactcataagtggttccaaaaattctgaagcacaacactatgattttatcaaaaagaaatctatttatgagaaacttaatagtaaaagctcttttgatttaacaaaagatgtttgtaattcttcagaatggggattggctgaactgaaaatgagacatgaaaaaatgaaaacgcaattgaagaagctttggttggtctga

SEQ ID NO: 18378 - DNA, 216 bp, Escherichia coli; identical to SEQ ID NO: 9961

SEQ ID NO: 18379 - DNA, 357 bp, Escherichia coli
atgaaatatctggtcaaagagtttattaacgagaaatattctaaggctgttaatattttaaaagataatcttaaagaacactatcatgttttttatggtgtgagattaagtgagattctttttcccgccagtgagtatggcactgatgctttctttaaagagtttgaattgattaacagtgtaatacttccattagtaatctttgatttaacacaacgcaagccaatgatgattatcagcttcgataagatacctgatgccagtttgttggaaggaacaaatattgtggttcttgaatgtactaccctcgccgatcttctgacaaatgataacattggttttttatataaaagctaa

SEQ ID NO: 18380 - DNA, 285 bp, Escherichia coli
atgaagaatattgctgctgcttttatcgttatatcttcttttgtgcttacggggtgttttgaagagacaaaatcggtggattggtgggaaacacatcatgatgaagcggttaaaaaggaggctgattgtaaaaaaagtggcagtgatagccagaattgcagaaatgtaaaaaaagctaattttaggtatcaacaacttcatgctaaacagccaagcttcaaagatgtatttgaaaaaatggaatctgagcaagacgattttttcaaagagaagaccaaaaaatga

SEQ ID NO: 18381 - DNA, 1095 bp, Escherichia coli
atgggtattgagacatctcccgctgatgcgggaggtattcctgtatttgaatctgatttgttccaaactatacataaaatagtgttcacattagtgaataaaacattgtcagggaaattagatgagtactcaaatattgcatatatcttaggtaaatatggtgtgacactatatgttttatggtatacatttactgtattagcaaggaaacaacaaacacctgttcctgattttatatggaatatatgtaagttttatattattttgctttttgttaagaattcaggggggattcttacatctgtaactgatgcacttaatgggttaaaagaaacatttgcaggtggtgatccttggatgtggatggatcaactgtgggtaaaggtaatacaagtaagtaaggctttatggaataaagatacatcaatggttccggttgaagggggaatagctgtatttttaacttatgcaggaggaattgtcgcagtattcctttgctctatagtatttgcttccgctgaattaacactattgctactagctgttacagctccattatttattatgtgcctaatgtttggtgtttttcgacaaatgtttaatagttggctacaactaaatcttagctcagtcttggttttcttattttcttcattagggctaagggctggggtttggttgttaaatgtgattctaagtacgaatataaaaactgcaccagatcaagatattttagtttcaggagcaacttctcttgttgctggtttattcatggcctggattatctggcaggcgaaaagttatgcttcacagattgcaggtgtgggtgttgaaggtgccatgcagggcgcagccgctatggggattggtgctggcgttttcggtgcatcccgcatggcgcgtggtgcacttggtatgggcagaaatgccggtattggtacatggaaaggtcttcgtcgtcaggaaggcgggttcggacagtctccgggaataacgggcaaagccgctaacctggccggacagggcgttaatattggtgccaaaaaacttcgtcaggccgctattgagagagcaaaaaaaatgtacggtggataa

SEQ ID NO: 18382 - DNA, 2154 bp, Escherichia coli
atgagactttttatcgcagaaaaacccgcagtagcaaatgatattgttaaggcacttggtggcaattttacccgccatgatggctggtttgaaagtgataacgccattgtgacgaactgttttggtcatattatcgaatcacaaccgccggaaaactataatcctgaatacaaagcctggaaggttgaaacgcttcctttacgtctttatcccgtgaagtatcagcctgttgaaagtgcagcaaaacaggttaaaacgattctcgaacttatcagacgtggagacgtgactgaaattgttcacgctggcgatcctgatgatgagggacagctacttgttgatgaagtcctggaatatgcaggaaacacaaaacccgtgaagcgcgttctgataaacgacaacacgcttccggcagtgaaaaaggcactggcaaatcttaaagataatcgtgatttcaaagggctttaccttaaggcgctggcgcgttcagttgccgatgccgtctatggattctccatgacgcgtgcttacaccattcctgcaaaagccagaggatatcagggcgttctgtctgtcgggcgcgtccagacacccgttcttggcctgattgtgaatcgtacccgtgctaaccagaaccataaatccagtttttactacaccatgaccggagtttttcagcgtggtgctgatgttctcagggcgaactggaaaccaggtgaatttgctccgctgaccgaccgtaaattacttgataaggcgtgggcagacggaacggcagcatcccttgcaggaaaaccggctacagttgaagcagcagcaactgatgataaaaaaacggctgcgccgttgccgtttaacctggtcagactccagcaatacatgaacaagaagtttaaaatgacggcacaaaaaacgctggatattacgcaacaactacgtgaaaaatataaagcaattacttataaccgctcagattgctcatatctttctgatgaacaattcagtgaagcgccgcaggttatcgatgccctgaaatcagtctttcctcagtcgctggatattgattcttcacgtaaaagcaaagcgtttaacagtgcaaaggtgactgcgcatactgcgataatcccgacctccagtgtgcctgatgttaacgcactcagcaccgacgagcgcaatgtttacctggcgatcgcacaacactatcttgttcagttcatgcctgaaaaagcataccaggaagtatcggttgccattcagtgtggtgatgagtcgttctatgcccgtgccagaaaaacaactgacagcggatttgaggcgtttcttggcgcggaaatcacagacgaaggtgaatcagaagataatgatgattccgcttttgaactgctctgtaaaattcgcacaggagaaacactgacgacaaaagaagttgttgttaatgagaagaaaacaacaccgctgccgttattcaccgaagcctccttgcttgctgcgcttgttcgtgtcgcggattttgtcactgatccaacgattaaaaaattactgaaagataaggataaagacaaaaaagatgaacatggcggtattggtacgccagctacccgtgcagccattctggaaacgctgaagaagagaaactatatcacgctggaaaaagggaaacttattccgactgataccggatatgcgcttattgatgccctgccaggtatagcggttaatcctgatatgacagcattatggtctgaaaaacagtctgccattgaaaatggcgacctgacggttgaacagtttattaatgagctgtacggtgaactgacaggcatgatttctgatgttgacctgggcaagatgaagattgaacccgttgcgccagcagggcagtttcaacacctggactctccctgcccttcctgtggtaaacatattgttatcaggccgaaaggttatttctgtaccggatgtgaatttaaaatctggagtgagttttctggtaagaaaatcacccaggcacaggccgaaaaactggttaaatcagggaaaaccgatttgattaagggatttaaaaagaaaagtggtggaacgtatgatacagttcttgtccttgaggataagaaaacagggaagctgggttttccggcaagggctaagaagtga

SEQ ID NO: 18383 - DNA, 543 bp, Escherichia coli
atggctttcgacttcaaaaaagaggatgcggccaaatatggccgcgaggtttaccgagcgtttcgctgcaagggcaatcaccgctgggatacgtgcgtatttgctaacgagtccggcggttatgctgccgtgtttcgtcactcgttccgaaaaaaaattattgaggacggcaaagagttccggcgcaatgtcattgacgatgaaaccgtggtggccgcgccggatgttgccagctttatccgggcgacgttcccgcagctggccgacgcgaaagagctaaaacgctcaggctttttcacttgcctgcgttatttagctgaagctgacgcgtaccggagagactggccgggccatgatggcggcgtggtgctgatatgggaagggaaagcgtatggctggaaaaattgcctgcgcgatgcgcaccatgaacagcctggcgcgatagcgatcgacactgacggccatctttttatagctgaaggaggcaacgattatgacggcgcgaaatgctgggttgccatgcctgaaaaagacgacgtttag

SEQ ID NO: 18384 - DNA, 291 bp, Escherichia coli
ttgcccgccttactcgttcaggaagaaatgctgatggttacgacaggtgaagtctggtttcggtatctcgactattcgggccagacaaaggcggtccgggtggcatccgtgcggttctggccggacattcaggaaacgatattcccccctatccaggtgccggaaggcaagcgtcgcgttgtgcgctgccgctgcgggagtaataactggaataatgatggccgctggctaggtgaatactgctgcgccagctgcgggcaatacatacaggtatttgagaaaaaggactga

SEQ ID NO: 18385 - DNA, 423 bp, Escherichia coli
atgtctaatatcgtcactgcaaaaatctacggccccgctcagaaaatgcgtttccttccttacgcgttcgcagagttttatcttcaggcagaaaactacgtttgcagcttcatgaaaaaatacgctgttggctatgatggcggctgctgggagtacatcacatatgaaaacggcgcgtgtgcgttcatcgcgccggatggctaccagctcacgctccctaactattttgatgaaccagttagtgccaaagaagccgggattatcgttgcgctgtatgcctacagccacttttgctgcgtggcgtttgagcgtggctggcagcgtgtgaatgagacgatggccgaacgctatcacacgctgcgggactttaccgaaacactcccccctgagtcacaaagccgtatttttcgggcaatagattaa

SEQ ID NO: 18386 - DNA, 786 bp, Escherichia coli
atgacattgccaacacccgaaacctacgaagaactccagcacgcctatgatttttttgatgaacggctttttaataacgagctgccgccatgcctgatcactctgcaacgtgaaaagcgcacttacggctattgttcgtttcagcgcttcgctggccgtgagagcgggcaaatggtcgatgaaatagccatgaacccggtgtacttctccatacgcaccatcaaggcgacgttatccactctggtgcatgaaatggttcaccagtggcagtttcatttcggcaaggccggaagacgtggctatcacaataaagaatgggccgcgttgatggaaagagtcgggttaatgccctccgatacaggacaagcagggggaaagaaggtagggcaaagcatgacccactacatcattaccggcggtccgtttgaccaggcgtgtgatgaactgttgacgcgtaatttccagctgtcctggatggaccgatttcctccgtatcagccaaaacccggagcgccgcaatcacccagcggaaagggctacatcgatgatgaagatgatggggagtatcagccggacgatgattacaccgacgaacccggcgaactggacgatgagatcatcgaggcaatgaggtttgtttcgccgccgccagaaaccccggtaaacaagtccaatcgcgcaaaatacacctgcccggtgtgtcatgtgaatctgtggggtaagccgggtctggtcgtgttctgcggcggggagcattgcgagaaggccgaacttcagccctcataa

SEQ ID NO: 18387 - DNA, 507 bp, Escherichia coli
atggcttcacgcggtgttaacaaagtaattctcgttggcaatttaggccaggaccccgaaatgcgctatatgcctaatggcggcgcggtcgctaacctgcgccttgccacatctgaatcatggcgagataaggccactggcgagcagaaagaagtcacggaatggcatacggtagttatcttcggcaagctggccgagattgcaggcgaatacctccgcaaaggttcgcaggtgtacattgaaggccagttgcgcacccgtaaatggcaggataaggaccagcaagatcgctactcaacggaaattgtggttagcatgaacggcgttatgcagatgctgggtggtcgccagggcggcggcgctcccgctggtcagggcggtggttggggacagccacaacaaccacagtttagcggtggtggtgcgccagctgctgcaccgggggcgcaagggcagcaaccacaacagggcgcgatgccggactttgaagatgatattccattttga

SEQ ID NO: 18388 - DNA, 339 bp, Escherichia coli
atggcccgcaaacagacccgcagcatgacgcaagaagaatgggatttactcttgcccgcaatgcagacgtttacccatctttctaccgagatcggtcactcagtgctggttaatggagaaagcaataaagacgtggctgaacgtgtcggacggacaaagcaaaacgtaggttccaccgtgaaacgtatttgggatctgtatcagtccgtcaccatagaggcaggcggtgagaaacttcgtaaagtggatgtgtggctccctgaagcaatggccctgaaggtgctgaaggaagccgaaaaatacgccatcaaccagaacaaagctgaacaacccgaataa

SEQ ID NO: 18389 - DNA, 882 bp, Escherichia coli
atggcagaggacagcaaacagctaaccaaaaggcagcagaaagccatcgatacagcggctctaatccggcaggaaccgccgcagggtgatgatatggcgttcactcactccattctgtgccaggtcggtttgcctcgttctaaagtggccgggcgcgagtttatgcgccgctctggtgatgcctggcttgttgtccaggccggatggctggatgaaggtaatggcccggtagagcagccgctaccttatggggctatgccgcgactcacgttcgcctggatttcatcgtatgcactgcgcaacaaaacaagggaaatttccatcggccatagcgctaatgagtttcttcaccttatggggatggactcacagggaacccgtcataaaacgctgcgtacacaaatgcaggcgctggccgcgtgtcgtttgcagctgggctttaagggccggacctataacggccagcccgtcgaacagtttgatgcctggatcaaagatggtgacgcgaagcagctcacgctatggccgggaacactcaccctgtccgaaggctattataacggcctgatagacagcgccgttccgctcgacaacagagcgttacatgtgctgaaaggctctgcactggcacttgatatatacgcgtggcttgctcaccgtctccaccgcattgagggccgtccggttattttgtactggatgaagctacgagagcagttcgcccaggaatacagcgggaagaatgccgacaaggattttaaacgggcattcatgccagcgctgaaacaggtgctttcagtatacccggcggcgaaggttgagcaggttaaaggcggcttattgctgtattgttctcctccccctattccgtacaaatcgtga

SEQ ID NO: 18390 - DNA, 630 bp, Escherichia coli
atgccaactaagcacattgatacaacatcatggaacactgtcgaaagtgttacggttagagctattgaacttaacggaaaattggtgaaagaaactgatgtcattcgcttattgatcgagagaggcgctaaaacgcttacggatgatgatttgcggaacattaatggatttaagcctaactatggggttatgagctggagcaaggacggcactattactgattttggaaccattgaaccagaagaatacgcggcttatctggcagcaaatcagcccgtaatgacgtgcgtatatggcaatacggcgacgggtaaaactaatttcaaagatagccttttaaggtgcatctcggatgatatggccgaaaactttttagttgaagatgaagataatggtcggatcagtgaagatactagattgcatctatttaagtctttttttgacgagggcaggaacgttgtctttgtagaacatgcccataactgtagctgtatgatcactcgattcgtgaatgcaatggctagcagcaaagttaactttatctttatcggcgaagtaggaccggcccggaaagcaaaaatgatcacggcggtaggtaagggcgggtatacatgggagacttccgtataa

SEQ ID NO: 18391 - DNA, 195 bp, Escherichia coli
atgagacaacaagaaccctttagtgacacaggcacaacctggctttttgattacaaacattatgcagtgatagaaaagcgcatagatggcactgatatagtgcatgttcgacctcatggcagaaaaagtttatgcatggggaaaatcattgctgatttgctctccgatacccacgccaataacaaacgtgactaa

SEQ ID NO: 18392 - DNA, 333 bp, Escherichia coli
atgacagaacgccagcagaatagaaatatttgtgttgtggggaaggccaaagacggaatgaccatcgatacctcaaaaatcaaaattgaggatgtgtcagaaagagttatcagtattgatgatagttttaatatcgaagatgccactttgcttctgcgtacatcaatgagaaatgctccaacacggatttatctaccatcagttttaaaaggcgcatgtccagcatttgaagcatgggcagataaacgctcggttggtgaaaaactaccgcgtggaaagtatttcaaatcgcgtgaatttatccgtcagttcaagatccaaaactacatctga

SEQ ID NO: 18393 - DNA, 609 bp, Escherichia coli
atgtacatatttggatacctccgggcttctgcgcacgatcaggatgcgtcacgcgcccagcagaggcttaaagcctttgcacttgagcataatcaccgggtagccggatggtacgttgagaatgcgtctggcgcgtccctgcaacgccctgagcttatgcgcctgctaaatgatgctgagaagggcgatcttatcctgattgagcaggtagaccgcctttcacgcctggatgatgaaggctggcagcagctgaagcgaatgatgcaggaaaagaacctggcgattatcagtctggacctgccaaccagctacgcggcgttaatgccccacggtagcgatgaatttacacggagtatgctgacggccatcaatagcatgatgcttgatatgctcgcggccatcgcccgaaaagactatacagatcgccgccgtcgccagcaggaaggcgtaaagaaagccaaagagaagggggtttatcgtggccggatgcccgaccagaataagcatgacctgatccgttctttgcggcaccaggggaaatctatcagcgagacggccagactcgctggcgtatcggaacggacggttacgcgggtgagcaaaagttaa

SEQ ID NO: 18394 - DNA, 186 bp, Escherichia coli
atggccgaaccctatttaaaaaatcgccgacgcttcacctcgtcccttgataatcaacttgtcccattgtttgacgcgctagcggccaaaacgcggatacctaaaagccgcctgctcgatgaagctatagaggatttgctggtcaaacacggcgttcctggtaaaaaggtcgatagccagaattaa

SEQ ID NO: 18395 - DNA, 309 bp, Escherichia coli
atgaagaaactaatcccagctatcattgccgccgccctgctctccgggtgcgccactcagaacgacgcggtagcactctcaaatcgaatcagcgatcagcagaagcaaatcaacgcgctttccgttcgcctccagtctgccgagcatcgcttgagtcagcaggagtcagcttttcgctcagaacaaacgcagaacagcagctactgctacctgaacggcgtcaaatactctcagggatcggtgttcgctggccgtatctgtgatggcagttccggcagtgtagcctggcgtctttactcccaccgctaa

SEQ ID NO: 18396 - DNA, 339 bp, Escherichia coli
atgagtaagctaagaaccgttgcaaaaatattattgatgtactgcatcttcagtagcgccagcgcctttgcggagggaaatactaagggtgatccgtgtctcgcgttcacctgtatggccggaaagttacaaggtaacgaggcaacatcagggcctgactgtgtaatgggccgccagagcttctttgagatacgaatttacaccccctactacaaccccggcgcgacagctgcggctcgtaaagtatttctaagcacttgccctatgaccactatttcagaaaacaaaaacacactggagctgattattcagcgatacggacgttcatttcaggagtaa

SEQ ID NO: 18397 - DNA, 351 bp, Escherichia coli
atgggcaatgtgattgagtttaagaggccgaaaggcgaaagaaaccaaaaagacaaaatgcctgaaagggggatactgctgtggttcaaaaagactgccctgtccctcaaaaacaacctctttacctactctaagtcatgttgctgtatttgtttgttttttgtaagcgctgcgtcaagaaagctattgaagttgatcgccacactatcaatcgtgctgtttcttgtcgagtggtttatgggccgtttgggagcaccagagttttataacctgttgttcctaatgggattgctgttggttatcaatgtgatttcaacaagctgtatcaaatggatcagagggaacgtatga

SEQ ID NO: 18398 - DNA, 318 bp, Escherichia coli
atgcttgttcctttgcagtcggagaagcgaccaaaagggacgcctgtataccgtgacccggagaatccatttaacacctggagcgggtacggaaagcgccctgtctggttacaggaacgattgagtgatgggtatcttctggatgaaatgaagctgcctggtgcagtggtggatcgggataccaaatcccctcgataccgtgacccggctaacccggctaatacttggactggcgttggccgtcgtcctaaatggttagttgagctgctggaaaatggtgtggatttggacgatctgaagattcgagaaagggagtga

SEQ ID NO: 18399 - DNA, 783 bp, Escherichia coli
atgaaaaaatcatggtgcttgatagcggtatgtatctccggcctttcttttcagggggtcgctcatgcggcttctgcctcggatacgatcgccagccttgctgcccgatgcgcaccagacgtttcaccgctgacaatggcctatatcgtcggccatgaatccgggaacaacccgtattttattaacgttaaccgtggcgcaaacctgaaacgtcaaccgcaaaccgaagctgaagcggtagaagttgccaaccggctaatcaaaaacctcaagaaagatgaaagcatcgatatggggcttgcgatgattaattctaacaatttgagttcgttaggtatcacggttgagcaggtatttaaaccctgcatcaatctccgcgccagtcagaccattttaaaagactgttatagtacggccctgaaatccaacccgcccggccagatagcattaaggcacgcgctgtcctgctacaacaccgggtcgcaagtgcgggggatttcaaacgggtatgtcacgaaagtaattaacgtggctaaacagtctgatttaaagatccctacgttgctacctgatgggcagaacgaggaagcggagagccagcctgtgagtgcgaagggcgcaacctttgagggtgagcacgatgcgtttacgggtgaaagtgatagtggtggtgatgtgttttcgcaggataacactgacgcgtttctgaccaaagcagagcaaaaagggagtgaggttatgaatgacgaaaatctatctcctgttgcagtctcaaataattga

SEQ ID NO: 18400 - DNA, 279 bp, Escherichia coli
atgacgaaaatctatctcctgttgcagtctcaaataattgatttatgcgaagccggaaaaatacaggaggttgtaattgaaaggatttcactaaagcagtggtatcccatatttgacgtaaaggatgaaaatttgggtgaggttcgttgctctattcggttgaataaagaccacgaacttcgcacctgggcagacctgagactcctgacggagtttcttctggataagtgcaatgtcggcgagtgccgattgatattgaaatcaacaaaggaaaggtag

SEQ ID NO: 18401 - DNA, 297 bp, Escherichia coli
atggttacttttttcaaaaataacgggtttgcgctgctggttgcgctgttatgtatcgcagcgccagaactggccctcgcagctggcggggcagacaccggggccagtacaggtaacaacatcaagtcatggctggatacctggattcctatcgcctgtaccatcggcgtgatcgtgtcattcctcgtttggctgttccatcttatttccgctggttttatgttccgtctcgcaatcgcaatggttggcattggctccgcatcatatctggtatccctgactggtatcggcagctga

SEQ ID NO: 18402 - DNA, 318 bp, Escherichia coli
atgtttgaaaatggacaacggccattatttaaaggtgcaacacgcgtcccccggcttgctggcgttccgcgtacagtagcgctggttatcttcatgatctcggcaacgctgtttatgacgttacatatgtggtcactccttgtatttgcggttctgtggtcaattgcagcagcgctaactaaatacgacgaccgtatgtttcgcatcctttcattatggctacagactaagtttcgtaatgcacacgacacgccatttaaacaatggagtggttcaagttattcccctgtggattacaagaaaaaggagctgaaataa

SEQ ID NO: 18403 - DNA, 2574 bp, Escherichia coli
atggtggcattgcttaaacctaaaacgttcagagacgagccgagcgttaatgaaaaatatttgcagcatagccagcaccttgatgattatattatctcgatgcgtaatggcgatctgcttgcattctttaaagtcgatggccggacacatgattgtgcctctgaccgcgagctggttgcatggaacgatgatcttaatacgttgattaagtccttcgggaccgaccacgtagaggtctggtcgcacgagtatcatcaccagtctaaagagtatccagactctgagtttacccaattcttcccgcgctacctggatgaatacaaccgccgtctgcaaacggggtctaaccagatggttaatgacctgtacctgacggtgctctatcgccagataggtgataagacgcagaaattcctggctaagtttgagcgtccatctgctgacgaactggctcaaatgcaggctgaagccttcaccggaatggaagaagtctgtgagcagatcatggaggggatgaagggctatggcatcaagcgcctgggtatttattacagggataaaaacggcgaggaaataacgttaactgacgctgaagaaaagcagtcgctgcttgaagtggatgaagctgatattttcgacgagccggtaatgctcaatgtcgccgattccatcccgccgacagctcacgcctattctaaagcgctggagtttctttatttcctggtaaatctggaatggtccattgttcctgtttgccgtgaccgcatcggtgcttacatcatggaaaaccgtgttgttagctctgtatggggggatattgttcaggtcagaacgctggacaacaatttttatactacagctatcgaaatccgtgattacgaaaaaaacacagaaccgggtcagttcaatttactgaaagaagctgactttgaatacctgctgactcaaacgttttcttgcatatccgaggcttcagctaaaacgctgctggagcgccaggagaagtccatgatggaaactggcgacagaagccagtcccagcttgaacaactgaatacagcgcttgatctgctgctttctaaagaaattgtgatgggctatcaccatgccactattcacgttttcgataccgatcagcgagcagtgcagcgcaaggcccgcaaagctaaagtcatgttaagccagtgtggcttcgtgggcggcggcgtagggctggcctctgaagcggcctactttgcgaagattccaggcaatcagaaatgggcgccgcgcccgactccgatcaactcatggaatttcttccatttctccccgtaccataatttcatgcgcggtaaacctgacaataatccttggggtccggcagtgacgatgttccgtacagcgaacggcacaccgctgtattttaacttccacgtcaccccactggaggaacgctcaatcggaaagcgcccgctggggcatatgttacttacaggtacgtctggtgaggggaaaactacgctgctggatttcctgttatgccagtgcatgaagtttagcccgcgtatgttctgctatgaccgtgaccggggaatggagccgtttattcgcagtgtcggcggttattataaagttttacaacagggcgtaaaaactaacttctcaccgctcaaacagaaaggcactccgcgtaatattgcgaccactaaaaatatcatgcgtgtctgtgctgaaattacaaataacggcccgttagataaagatatgggaatggaactcaataaagccgtagacgctgtaatgggcgagcattctttagttcctgttgaggccagagatataacccgactgaaagggtacatcacaaatctatacctcaaagacctgattaacgactggaccaatgacggtcagtacggctggcttttcgataatggtgaagatgcgttagatctcgatgcccatgatgttttcggcttcgacctgacagaattcattgctgcggaaggtgagattccaagccctgccagaacgccgttattaatgtacctgctttaccgtatccgtaattcaatagacgggaagcgccgtgtcattcagtgctttgatgaatttcatgcttatctagatgatcctgttttaaagctggaaataaagcgcggtattaaaacagaccgtaagaaagatgcgatttatttgttttccacgcaagagccaaatgacgcactcgcaagcagcataggtaaaacggtcatgtcgcaaacgccatcgaaaatctgcctgcgtgatcctgatgccagccgtaaggactactccttcctgactgatgcggagtttgaggtactgtccaaaatccctgagcactcgcgccagtttttggttaagcaagggtcacagtcagctctcgccacattcaacctgaatatcaacggtagcaatacacctgaacgggatgaaatcgagaagaacaacattatcagtattctttccggggagccgcagaatgctgaactggccgaagaattgatagagaaatacggtccagagccggaaaactggattgaggaatactggcgtctttgccgtcactaa

SEQ ID NO: 18404 - DNA, 711 bp, Escherichia coli
atgaaagctaagttaatagctattgcactggctgggttgttaggcgcgggaaccatcggaaccgctgccgctgtcggtactggtgttgtggtctacgatccgaccagcctggctaaaacgcttgaggaaatggcgaaccagctggaccagttgaagcagcaactggctacccaaaaagcgacgtatgagagcctggcaaagacaaccaatattggggatttgctggatacatcaacaagcagcttggctaataaccttcctgacgattggaagaaggtttatagcgatgccatgaactcatcatcgtccgtaactggtgatgttcaaagtatggttggtgactttaattcggaagttgatgatatgaatccttctgatgcaattaaagcgctaaataaaaagttggccgagaaaggagcatatgaccgtgttatagctgaaaaggcatataacaaccagatgcaggaattaagtgatatgcaagcactaaccgagcagatttccacaactaaagatgtaaaggaagttgctgatcttcaggctcgcattcaaaccgcgcaaggcgcaattcagggcgagcaagcgaaactgaagctcatgagtatgcttcaggaatcacaagataagttgtatgaagcccaaagagaacgcgccgtaggtaattttatttatggtactgatggtggtcataaccccgccccgttgaaataa

SEQ ID NO: 18405 - DNA, 243 bp, Escherichia coli
atgaaaacgactttaaaagtagctttagtttttatcggtgtttccactctcgctggttgtaagcctgagcatgacaaagattggtataagtcgcatgagacagagcgaaaacaaatgcttgttgaatgcaaaaaaaatgctgaatccttgcaggatgctgattgtaaaaatgcaagagacgcagagactgaactttttgttcatgggaaagataactctcatagcgtgccgaagttaaactaa

SEQ ID NO: 18406 - DNA, 1038 bp, Escherichia coli
atggcatttaatactgttcagcagatatttgacataattgatgatctgataaatatgatggttgataccaacgtaacaaccatcattgcaaccgtcacaccaacggttgcaatatttttgaccatcaagtttatggctcaaggtgcatattccgctcttagccccggagggggcggggaggcgcttggggatttaattacacaatatatgaaagctgctgttgttttgagttttgcaacggctggcgggttatatcaaaccgaccttgtgcatttggctttaaccctgcctgataactttgcttcaatattggtgactcaaaataaaacctcaagcacagggatggcagccattattgatactggggtagaccagtctataacggcaatacaaacagcgttcgaaggggctggcattagcgctaacggcataatgagcgcagtaatcggactcattctaatagcagcgaccgtagttctttgtggattgggttctgcctttgtcattatggctaaagtgctactggctataagcctgtgtttagggccaatagctatattctgtctcctgtggaatccaacaaaaggcatatttgctaagtggatggggaccgttattaattacagcctagtcatagttcttttggctctcgtatttgggttgttaatgagcctctttacgaaaatgatttctggtcttaacggcagcgaaggttttgatgccttatcaacggctattggattggtcattctcaccattgtttctgtctatgtgttattccaggttcctgcggtagcgtcgaatttcggtagcggtgtttctgctgatatagcatcagcggcccgccatgcgggccactcgatgaatacgatgggtaatgttgcctctaatgggatttttggtggtgcgaagccttcagcaagaccttcagcagcgggcggcggtggtggacaaagtggcaacagtagcggcagtgcaggggctggcggttcaggtcttacaggaaaggcgcgtggtagccggggaaaagcagcataa

SEQ ID NO: 18407 - DNA, 132 bp, Escherichia coli
atgcgcgcaatcgtacttttaggggtgttgttgttaggggcatgttccagcagtttcaagccaccgccggagccggactggagccacaccgtgccagtcaataaaacgctcccagtagatacacagggataa

SEQ ID NO: 18408 - DNA, 696 bp, Escherichia coli
atgagagagaaaaagaaagggctgaccaaagaggccatcaaagagttcaacgaaagccgtaaagggctggaagtggacgttatgcacgaggtgctatcttcacgtcgcacggcgtggatagttgctgtggccgcttgcgttgtggcagttgtggcaatcggtaatgctacctatgtgaattatcgctacagccagccgctaccaccctttttgttgacgctgaacccggccactaaagaggtatcgcaggtcaagctgacgcgtgacgaggccacctatggcgacgaaattgataagtatttcctgactcaatacgttatccatcgtgagtcctacgatttctattccctgcaagtggactatgacgccgtaggcttaatgtccacgtcaaatgtggctgagtcctatctgtctaggttcaagggtaaacaggggattgataaggtcctgggtgacagtgaaataacccgtgtaaccattaactcaaccattctcgataaagaacatggtgtggcgaccattcgctttacgaccgttcgccgcgcacgtagcaataacttcgacgatccgccgaagcactggattgccatcttgggctatgagtacaaagcgctggcgatgaatgcttctcaacgctatgtaaacccgctcggcttccgcgttaccagctaccgcgtaaaccctgagtcgaactga

SEQ ID NO: 18409 - DNA, 888 bp, Escherichia coli
atgaaaaagatagtcttatccgcagtgatcacaatggcgctggccgggaccgcatttaacgcagcagcgctggatttaccgaaaagctcaccatatgactaccgcataaagtcggtagtctataacccggttgatgtggtgagaattgacgcggtagcgggcctgtttactcatatagtcgtttcaccggatgaaacatacatcactcacgcgtttggtgattctgatggctggacgttctcgcataagctcaatcatatgtttgttaagcctaagcgcgaaatgagcgatacgaatctgactatcgtgactgacaaacgttcttataacatcgtgttgcattacattggtgaagcgaccacaaagaacgctgacggtacagaagaaaaatcgtttatcaaaacgccctggtcaatgaaacaggccacgctacagctgacctatgagtatccgtttgaggaacagaaaaaagcggccagcgcagcggagaaaaaacggctgaccgaaaaactgcgtcagtctggttttgcaggcccgaaaaattaccagtatgtgatgagtgacgagccggaaatggcagaaattcagccgatccacgtatgggataattaccgtttcacccgctttgagttcgcggaaaatgctgacttaccacaggtcacttatatctcgtccagtggtaaagaaacggtccctaactgccgtccggttggtgagaaccacaatatcctagagtgccagaacgttgcaaaagaatggcgtgtgcgacttggcttaacaaaagtagtaggtatcaaaaatatcaactatgtgccagcagcaggcgctgttgccactggcacagcctccccggatgtaagaagggtgcaaaaaggaggggataactaa

SEQ ID NO: 18410 - DNA, 1134 bp, Escherichia coli
atggcccgtaaagtcgatattgatagcgagctggataataacagctttgacgatgagcgcgggggaatgcccgcacagaaacgccgtaccgcaccgggactgagagcctttattgctattctggctatcatcgctatgtgcttcgttggcgtcacaatctacacgcacacacgaaaagccccggacacggccaaaactgatagcggcaataaaaacgatggggttagcagtctgcctaactaccagttcaacactaacccgaacgttggcggagctgcggccccggacgctaatcgccaagcgatgcaggacaaagctaaagcggattatgaggccagccataataacgcgggccgagccaacaacgggaagaagcagctgacgccggaagaaatggcgatgcaacgccgcctgagtggcgatcttactggcgaaaatggtggtggtcagacagctacaaaggctgaccagcagcagggcgatgaaagcagtgacggcagcagcgcgttagctaaacagctgacgcctgcccgtctcaaaggtactaaagcaggtgttatgcagaatatgagcatgaccatagccaaagggacgatgataccgtgtggaatgtctaccgagctggacacaaccattcccggtatggtgtcctgccgcgttacgcgtgatgtgtactccgttgatgggttggtgaaacttatcgataaaggggcaacggttacaggtgaaatgaatggtggccttaaaaacggacaggcgcgggtatttgtcctgtgggaacggtcggtaaacccggatgggacattcattaacctggatagcgcggggacaaattccctcggtagttccggcatccccggacaggttgatacccacttttgggatcgtttttccggtgcggtctttatttccgttctgtctgacacgcttcaggctggcgtggctgcggcccaaaatggcaataacatccagtttagcaatacgcaaaacaactcgcaggaactggcctctgaagcgctgagagccactattaacatcccgccaacactctacgaccagcagggcgactcaatcaatatctatgtcgttcgtgatcttgatttcagtgatgtttactcactggctgacaactaa

SEQ ID NO: 18411 - DNA, 1002 bp, Escherichia coli
atgaatcaatcatcggcttattatcagctggggccgctgcgtgagtatttcgaagatccgggcgtatttgaagtccgtatcaaccgttataacgaggtggtctgtgatacattcgaaggccgcaaaatcatccagaacgacagcattaccggcgcgtttatcgataacctgactgcggcactatccagtgccaataacgtgacgcgccagatgattaatgacgtggtgttgccggacggctccaggggaattatctgtttaccgcctgcggtgatcgataacaccgccgctatcgcctttcgtaaaaatatcgcgctggataaagacctggcgacgttaagcaaggaaggtatctttgaattttgccgggaaattgacagccataagcgcgagctggacgacgacgatctcctgctgaaagagttataccgggctaaacgccgggaagaatttttacttactgcggtacggaaaaagcgaaccgttgtcgttgtgggagaaaccgggtcagggaaaacggtactcacccgcgccctgctcaaagccattagcccacaggaacgcgtgataatcatggaggatgctcatgaagttgaagctacccacctagaggaagccgtttatatgaaatatggcggcaaagataaacccggactggctacgccgacgcagtgccttaaagcctgtatgcgcctgacaccagatcgtattttcatgacagagctgagggatgatgctgcatgggattaccttcaggcgttgaataccggacaccctggcggcttaacctccacacatgctaactcggcgatggatgcctttacccgtatagggttaatggttaaagctaccgaagtgggccgtatgctggatatttctgacattatgcgcctgctgcactccactattgatgtggtcgttttcatggcgaaaaggaagattcgcgaaatctactattcgccagaatataagtatgagtgcatgaatggagggataaagtga

SEQ ID NO: 18412 - DNA, 528 bp, Escherichia coli
gtgaaaaaaggagcaatcatattcctgacgggccttctggctctttcctccctaccctcgatggcagcagattcgccatcggtacaggttgggttttcccctgaaggtagcgctcaaacgctggtgattggcgctatcgactccgcgaaatcctcgatccgaatgatggcttatagcttcaccgcgatggatataatgcaggcgctggtcaaagctaaaaatcgcggtgttgatgtgaaaattgttatcgacgaacgcggcaatcgtaatgacgtaagccatcgagcgatgaagttcattgtgaaaaacgacatcccgttgcgggtggatagcgactttcctatccagcatgacaaggtgatgattattgatgaacggtcagttcagacgggcagcttcaactacacaaaagcagcagaatctaaaaactcggaaaacgcggtggtgatctggaacatgccccagctggcgaaaccttatcttgagcactgggaggaccgttggaatcgtggggaggactataaatga

SEQ ID NO: 18413 - DNA, 261 bp, Escherichia coli
atgagagaaaaatttgaaggctatattttcaagcatgccgtacagccactgaaattggttgcggtggtagcaatagtagcggagctatcgcgcagaggattgatgttcataggtgtacccgcgtttacctctttcattacgaatatgctcggtattctgatcatcatgttaggggtcagtttggatatagagaattattgtactataagggcttccccggcatgtcaacgccggtgtttacggtttctgtctgcactatag

SEQ ID NO: 18414 - DNA, 363 bp, Escherichia coli
atgggtgagcaaattactaacgcggagtgggaaaaaatctcacctgataattttgaaacagcctctttgttgcgagctgttgatgctattgatgatttacgcggggattttaatgatggcgagtattcagcgccgccgcaaatcagaactgatttactcaggcttcatgagatagcaatggcagtgattaacgaaggttcacgtagccgggtttcagcattgttcgagctggcgagtgacctggacgaacaaatatcccatctggtaaatcggctggatgaagtgcaggacacgctatctcagctaatggagttgtatccagaaagcctttactacgatgatattgaaggcgatgaggaataa

SEQ ID NO: 18415 - DNA, 666 bp, Escherichia coli
atgatgttctggaaccgaaataagaaaggaaaagccgctgccggcaatgaaaaaaatcgcttcgatcacctgctttcggtggccgaaaaattacccgttaaggcgctacctgatctcattcgcgccatcgtgcggccagtacagagtgatttcttgctggcggtagccgaggaagggactgatgcccgcccggatatgaccccgcaggagttcttctttgaagggcttatccaggtgcaatcttacgagaagatgaaagagggtgaactggacggcgctgattatccgttgtcgctggcaagtgaaatggtgctgccgtggccctggagcctgacacgctatatcgataacgtttcgcacattggaacccataagggcaggccgtggaagcaggataaaatcaaccactatgttgacttgtggttgccctggcgcattggctttgtgcgcggcggcaaccattccataacggcgggcattctggccggagaagggaccgtgataccggatcacgtttacgatatgtcctacctttttgagctggtccgaacggacggtaatcactggttcgttgacggccagaaggttgaggcggtgaaatccgggcggtcagcggctgttttcgaaattggccgtttacttacggaaggagcaaaaaatgggtga

SEQ ID NO: 18416 - DNA, 3219 bp, Escherichia coli
atgcttgatattacgactatcacccgtatcgatattgcgtcagttgtaggttactacgctgacgcaaaagacgattactacagcaaagacagtagctttaccgcgtggcatggtcagggcgctgaagcgctgggcctttccggcgaggtcagttcccaacgcttcaaagagctgcttgtcggggatattgaccctttcactcagatgaaacgctccagtggcgacgcgacaaaagagcggctggggtacgacctcacattttccgcgcctaaaggcgtatcgatgcaggcgctgatccacggcgataaggcaattatcgccgcccacgaaaaagcggttgccgctgccgtccaggaagcggaaaaactggctcaggcccgcacgacccacgcaggaaaaaccattacgcagaataccggtaatctggttgttgcttccttccggcatgaaacatcacgcgctcttgacccagagctgcatacccacgcctttgtcatgaatatgacgcagcgcggggatggtcaatggcgggcacttaaaaacgatgaactgatgcgggccaagatgcacctgggggatgtctataagcaggagctagcgctggagctaacaaaggccgggtatgagctgcgctataacaacaaaaacaatacctttgatatggcgcattttacggatgaacaaatccggggattctcacggcgttccgctcagatagaagaagggctggcggctatggggctgacccgcgaaaccgctgacgcacagaccaaaagccgggtatcgatggcgacccgcgacaaaaaaacagacgactattcgcgtgaagatattcataaagagtgggttaatcgggctaacgagctggggatagacttcaatgatctgtcctgggcgggcaaaggcaaggatggcccgcaaacgtcaatgaataccgtccctaacttcacaagcccggaggtaaaagccgaccgggcgatccagtttgcacttaaatctctttcagagcgcgatgcgtcttttgaccagtcgcgcttgctggccgtggcaaataaaaaggcaatcgggcaggcatcaaaacaggatgttgaagcggcctattatcgtgctgtggcgaaaggggccattattgaaggtgaagcgcgatataccaccacaaccgaccagagaagcaaagacgcgccgccactccctgcaatgacgaaagcagaatggcaggcgcagctgaccgacaaaaaagggatgaacgacagccaggcgaaggcattagttgctgaaggtatcaagtctggccgcctgaaaaaaaccagccatcgggtaacgaccgttgaaggtatccgggtagagaaagcggtgctgaatatcgaggctcgcggtcggggcaaggtgatcgccgcgctgacaagcgaacaagtcaccgcgcagctggtcggcaagacgctgaaggccgagcaacagaaaagcgtcgtagatatttgcaccacgacagatcgctttgtggcggctcatggcttcgccgggaccgggaaaagctatatgaccatgagcgcgaaggctgttctggagtcgcagggctataacgtcaccgcactggctccttacggtacgcagaaaaaatccctggaagatgaagggatgcctgcccgtaccgttgccgctttcgtgaaggcaaaggacaaaaagatagacgagaaaagcgtggtctttatcgatgaagcgggcgttattccggccagacagatgaaggtgctaatggaaaccatcgagaaggccggggccagagcggtattcctgggcgatacctcgcagacgaaagccgtcgaggcgggcaagccatttgaacagctgatcagcgccggaatgcagaccagctatatgaaggatattcagcgccagaaaaatgacgtgttgcttgaggcggtgaagctggccgcagagggccacatatccggctcgctggcccgactcagcaatattagcgcagagaaggaccaggataaacgactggaggctgtagctaatcgctggctgtcattctccccggagcagcgcgaaggtacgctgattatttccggcacaaacgaatcaagggtaatcctcaacagccagattcgggaggcgttgcagctgcaaggaaaaggcgtggaggtgaattttctggagcgcgttgactccacgcaggccgaacgccgggacagtaaatactaccaggtagggcaaattatcatccccgaaaaagactataaaaacgggcttcagcggggcgagtcttaccgggtactggatacaggtccggggaacctgctgaccgtggccgggagcgacggccagaaaatcagcttcagcccgcgcacccataaaaatttatctgtttataccagcgtggccgccgagctggccgtgggcgataaagtgatggtgacgcgtaacgataagacgctggatgtggcgaacggcgaccgcttcaccgtgaccgggactaccgagaaaggcacttttacgttaaccaactcgaagggccgggaaatcgagctggaccagaagcaggccgcctatctttcgtatgcctatgcaacgaccgtccataaagcgcaggggcttacctgtgatcgggtactgtttaacatcgatacccgttctctgacgacttccaaagacgttttttacgttgggatttcccgcgcccgtcatgaagtcgagatcttcaccgatgacaaaaagcgtttgttgagtagtgccagccgcaacagtcctaagaccacggccagcgaaatagaccgattcttagggatggaagaacgttacaaagacgtaaaccggagctatggccatagcgatggccaacaggaaaaaagttatggccatgatgctggccatcaaaccgaagagaaggaaaacaccatgaaaaacgcgacagaagccgcgcatgatggccctgatacttcaggtactgaaaacacgtctcaggatttgcgccaacgtgagcaggaggaagtcaacgcagctatccggtacgagcagaggcaagaagctacaccggaaatggaggcgaacccctaccacgactatgagcggtatgctgacgaagggccggactatggcgacatgcaggactacagcacgtatgaagaatatgaacgtgcgcgtgacgtggaactaccgcagcatgagcacgaaaatcatcaacatgatcatgacaaggagggctacggcctatga

SEQ ID NO: 18417 - DNA, 1533 bp, Escherichia coli
atgacggaacaagaaagaggacttatatttttatgctcgctgctgggaccaataccttttgtatggtttattactgcaaagtttacttatggtattaacagcgaaaccgcacactatcttgtcccatatttgctaaaaaacacgttcaacctgtggccgctatgggcagcgattattgcaggcgtggttataggtttgtgtggttttatcggattcatcatttacgataagggaagggtatataaaggaccacgcttcaaacgtatcttgcgtggaaccaaattagccagagcatccacactagccgaaaaaacaaaggaaagaggtaaaaaacaattaatgattgcaggtgttccagtacctactgaatatgaaactcttcatttttcaattggcggggccactggtacgggtaaatcaactgttatcaaagaagccatatattcaagtctgaaaagaggcacagataaacgcatagtgcttgacccgaacggagaatatgttgagacgttttatcgccccggtgacgtgattcttagtccctatgataaacgctctcccggttggtcaatgttcaacgaaatacgcgatgattttgattatgatctctatgctgtatctattattcaggaaagtaaggaacgttcagcagaggaatggtacaggtatggccgtcttatttatcgtgaggtgtcaaagaagttactcacgctaaaacgtaacccaacaatggaagaagttatgcactggtgtaccattgttgagaatgacaaattaaaagagtttgtgaaaggtacacctgcggaagccctgtttattaaaggtgccgaaagggccaccgggagcgcccgttttgtcctgggtgacaaattagccccacacctgaagatgcccgctggcgatttctcgctgcgtgactggctggaagatgataaacccggcacgttgtttatcacctggcaagagcagatgaaaaagagcctcaatccgcttatttcatgctggctggatattatgttttcaagcctgctgggtatggggaaacgcgatcagcgcacgttgttttttatcgacgagctggaatcactggaatacctgccaaacctgcaagacttactgacgaaagggcgaaaaagtggcgcgtcggtatgggctggctaccagacgtactctcagctgattgagcgctacggcatcaacatagcggaaacactgctgggaagtatgcgctccggtatcgtcatgggtagcagtcgattaggtaaagaaacccttgagcaaatgtcccgcgcattgggcgagattgagggtgaagtggaacacaagcaaggcaatccattccaggcgggcattggtaacaggccacgcattgaaacgcgtactgtcagagccgttaccccaacggaaatatcagagctgaaaaaccttaccggatacgtctatttccctggtgatctgcctgtcggcaagttcaagactaaatatgtgaaatacacgcgtaaaaacccggttccgggcatcatcatgaggtag

SEQ ID NO: 18418 - DNA, 423 bp, Escherichia coli
atgccgatcatcacatgcaaggtaacggacgaagaaaaagagcttatcgacaggctggccggaacgaacagatcggactatatgcgccgttgtttgttggccggatcaggtggccggataggtggattgagtcaggttacggaacagataaacgaagtaaatcgacgcctcgatattctgtttgaccaggtatcagagacagacatgagcgcgttttcctcggagctaaaaggtctggtcaggcagctggcacaactcaagttaccgcctcccggccagatgatgctccatgaatcactggcaatcgagacggtgatcctgctgcgttcgatggcaacccctgccaatatgaaagccgcctggggagagctggagcgtaacggatacaaggtgtgggaaagtaaacaagagaggacggaataa

SEQ ID NO: 18419 - DNA, 432 bp, Escherichia coli
atgaagcccaaaagcatcagggcagcaattcagatgatgttgccggaagtagaagaaatgctgtcgctgggagtctccagagaggaggttttcaaggcggtatctgaacgcttcggcctggagaatgtgaacgttcggagttttgatactgccctctatcgggccaggcaaaaccgggcgaaacatgccgcccctgattctgtattgcacaatacagaatcaaccggagccagtgagcaacaaaagaaaactgtattgcacaatacagaaaagcccgcgaagtctgagcaggtaaaaaaagatgcaatgcacaatacacaagacgcgaccgaaggagacaaaaagaaacagccaccgggtatcatcggaaaggaattttttgacgaggcaaaagccgagttcgatcctaatgagttcatcaaaaaatattga

SEQ ID NO: 18420 - DNA, 717 bp, Escherichia coli
atgaaagtagcggttattaattacagtggcagcgttggcaaaactttagtttcaacttaccttctcgccccgcgcctgaaagatgcgaaatttttcgctgtcgaaacaattaaccaatcagcgtctgatttaggaattgaaaacgtcaccagttttaaaggggatgatttttcccgcctgattgaagatgttgttttcgaagatgcagcgattattgatattggcgcgtcaaacgtggaaccgtttttaatggcaatgtcccgcttcgatggcggcgcaaatgaatttgatatgtatttcatcccggtaacgccggaagataaagctattaaagaaagcatgaaaacggcacacacgttaagcaaggctggcgtggataacaaaaaaattatctttattccaaaccgtgttaatccgggtgacgatgttgaaaatgttttcggccctattttcgattttgtgaagcaaactaaagtaggccgcattaataaaaattctgcgatctataatagtgaggtatacgaatatcttgcacatcacaaaatttcgtttgaaacgctgaccgctgaagatgcggaagaatttaaagcccgcgctaaagcatcagctgacgtagacgaacgccgcaaaatggcgcgtcgttatacttacatgaaacaggctatcccggtaaaaagtaacctggataaaacattctccctgttaatcggagattaa

SEQ ID NO: 18421 - DNA, 369 bp, Escherichia coli
atggataagcagcccgataaattagacgtattgatggactggtttttgggagacgcgaaggaaattttagaagccatgaagctaatgaaggccgaacaagccgacatgcttcagcagctgggcgaactcaaaagcgcacttgaattgacggcagacgattcgagagcggaaatcatcggcagtctgagagacatacagacagcgatgaaggaggaaaacaaggcgcggtcagacttcctgacgcgctggcaatcactccagcacaacaacgccagcaccatcgttaaccgcgtcgtgatcatgacggctgtttgttccatcgtcggtgcggccattggtgcggcgctgaccttgctgatcctgaaataa

SEQ ID NO: 18422 - DNA, 357 bp, Escherichia coli
atgaacatggataaaactgaacgcgagaggatgttagccaggcggcggcaagctcgccgccgcgaacggttacgcaatgaaggtgttagcgtgaccgtcacgctaacgcatgatgaagccgcgcagctggaagaactacggcaggtgcgcaggatgggtaaacagccctattcaccaaatgagtttttccagctgctgctgatccgcaactggcaacagtgggagaaagaaaaagccgcgctgggtacatgccagcactgcggaaaatcaaaagccggtggcggctgcggcggggagtttcaaaaggaaacataccgatgctggctggcgcaggacgcaaacgcgcttaatctttag

SEQ ID NO: 18423 - DNA, 183 bp, Escherichia coli
atgacacaagtcacaacaccgtcccagctgaaaacagagctggagagccagaaaacctaccttctcgaagcctgcctgatggccttcaatcagttacctaaccagcgaacaaaaggcgtgtacccgtcaacatacgcactcgcagcaaagattgatcacctgttgcagcaggaaaaaaaataa

SEQ ID NO: 18424 - DNA, 207 bp, Escherichia coli
atgaaacaacatatcgctgcaattatccgcgaatacaacacccctacagtaaccgtcgaagtagccaatacagaccgctacgatagcgagcaaatcgagatccgccaggttgttgatggtcgccttatctggcgggcgtgggactatgaggcaggttttgaaagcgccctgcatcgcgagatggcctattaccatatcccggcctga

SEQ ID NO: 18425 - DNA, 678 bp, Escherichia coli
atgaaactgactcgcgaagcaaccacagcagcaaacccggatttacgcggccgcaaacatcatttcatcatcgagagcgccacggcggcagagctggaagcgatggacgagatcctgacgctggcaggctgggaaaatgacagctgcccttgctatgaggacggctttggttgtggttactggatcgacatttccgaagtggcttgtttcaaagcggcatacaaagcagcgaaaacgggcctgaaaggctatatggcagttgaagcagagaaggccgcagcagtgtgcgaagtcaccgcagaaccagccccgcaacacattccggcggcaagcctggacgattacaccgtgtacaccttgcatgaacctattgaagcggaagaaggcaagccatacgcagagaagcgcgtaactcgcgcctacgttgcccgcagcatgacccgcgccctggcgagccaggagaagcatgtagagaagtacaaagcgcaggatgttatctggctggcggaacacaacgcagaccacgcttttagaatgggcgttttaagcccggaagaattcacagagatctatcacatgatacgtgcagagaacgcgcagcccttgcttattctggcggccttgcgtgatgccctgctaaccggagcgccagcacttgccgccgcccgtgcggcataa

SEQ ID NO: 18426 - DNA, 498 bp, Escherichia coli
atggcagaccatgacgacgcgccggataaaattagatgcctggagtgtgggaaagagttttctttccttgcccctcatttgagtaaagcccaccagatgaacgccagacagtaccgggaacgctggggcataccactacaaacgccgcttgccagcgccgagcattcccgccagtgtcgggaaaatgttttgcgccgtatccggcggggcgagattcgccccgctgaccagctcgcactcatggccgaagggcgcaggaacgccccgaagcgggaccgaagtacccgcctgcataaagtggcggcggcacaggtcgcgcgggtgcatcagatatggaagcattctccggtggtgaaggtcgttcctgatacgctcagggacgaagccgtgcaaagaatgacggccagaaaggtgactggtgagaaagttaaggatattgccgccgatctgaatctgtcggttgggtgtctgtacaaatgggtggcgggcgctaaatag

SEQ ID NO: 18427 - DNA, 201 bp, Escherichia coli
atggaaaccggaaaactcgcacaacagcagggttttgatctggagttgcagatcctgaaaagccagaagggctattacattggcacagcgaccagtgaaggctacccggtatcaagggaatccgctgaatacttcccggacagcagcgccgcgcagcaggctttgacggataaccgctggacacagcgggaggattattaa

SEQ ID NO: 18428 - DNA, 270 bp, Escherichia coli
atgaactatctgattatcatcccaatcgtgcttatccttgccgccgccgcgctggcgcttccgtggtttatggttcgtcagggctaccgtgaacaagttcagctgggcggcgcgtgtactaccgtgctggggctggccgcatcaacaggcgttttcagctatgccgataatatgccgctggcgttactgtatggttctgcgtcggttgtgtcattcctgtatgcgcttgattgcttcctgccgctttatctttcacgtaaatctcactaa

SEQ ID NO: 18429 - DNA, 558 bp, Escherichia coli
atgactactttaactgtcggccagtacctcacctcttctaacaacgaacgcgccagcgctgaccaggaaaacgctggattgctgaccacggccaccgaaagcaacaccaccaagctagccgctaaaaacatccgtattctgctgaaaaagcatttccccggcgtgaagttttctgtccgtatgcgtgactataacgcgctctatgtttcgtggacggatggcccaaccaaagaggctgtagaagcgattacagacaagtttgaggaaggcagcgttaactcaatggaggacatttacgaatacaacattacgggctttcaccgtgtttatggtggcgtgaaatacctgttttgctcacgcgacctgaccgacgcgctgatcgctgaatctatcgaactgctgcgcaaagaatacggcgaaaccactatcccggctgatgtgacacttgaggcgtacaaatccggggcgctggcggggcgcgggcatgaccgctttacctgggggcttgcaacgcaaatacgcatcaatgcgggaaaggtggataaatccagccgctga

SEQ ID NO: 18430 - DNA, 567 bp, Escherichia coli
atgggcgcccgccagctgcagctgcttttcagctgctgccggctacgagtgtcattcagcaaatttgatcgtatcggccaacgtcaccagcggcgctgtaaggccgtttacagcccatccgggcgcgtcagctgcgctgacccaccacggacccggaaatcacgccctgcgtgtcgctacgcgccccacagcccgctcaccgggacagggctaatgtgtggccgtagcgtggcgttttgggcggttgaaaagagggctttgcagggagggggtgggggcagagtttacgcggcggcgtgcgtgagcgtgctgtggtggcccaggtcgggttttgtggtagtgggcgtgtcgccctggtcagggggagcaaggcccggcgattggcgttctgagtcccctttatcctggtgctgtcgccttcccgctgtcgcgcaatcgaatgaaatatatgtaattaatatatttactaatgttgactttgagggcaaaaaaggcgatacttatattcatcgggaggcaataccgccgcccggtgacacagcccaaagcggcgattatcaggagtaa

SEQ ID NO: 18431 - DNA, 1371 bp, Escherichia coli
atggctcgttcttttaaagtgttatcgccaacggcaatcctcgggtatggattcccggaagagagcttccgtaaagcgatggcagaatcgcccgatctgatcgccgttgatgcaggctcttccgatccaggcccccactacctcggggcaggcaaaccgtttaccgatcgcgcaggggtcaagcgcgatctgcgctatatgatcaccgcaggcgtgcaaaataatataccggtggtgatcggaacggctggcggttctggtgccgcaccacacctggagtggtgccgagaaataattcatgagattgcccaggaagagcacctctcgttctcaatggcgctgatcccggcagacgttgacaaagccatcgtccaccaggcgctggataacggcaaaatcacggcgctggagtttgtcccgccgttaacccacgacgcgattgacgaaagtacgtatatcgttgcgcaaatgggcatcgaacccttccagcgggcgctgaaagaaggcgcgcaagtggtgctgggcgggcgcgcttacgacccggcctgctttgctgcgcttccgatcatgcaaggctttgatgaaggtctggcgctgcattgtgggaaaatccttgaatgcgcggcaatcgccgcaacgcccggctcaggctctgactgtgcgatgggcatcattgatgacaacggctttacgctgaagacatttaatccgaagcgtaaatttaccgaaacgtcagcggctgcacacacactgtatgagaaatccgatccctacttcctgcctggacctggcggcgtgttgaacctgaaaggctgcacatttaaagcggtcaatgacagcgaagtgtacgtcagcggttctaagcatgaagaaacgccgtatgccctgaaactggaaggtgcgcgacgagtgggcttccgctgtctgaccatcgcaggaacgcgcgacccgatcatgatcgccgggatcgataaaatcatcgatgaagtcaaaaccagcgtttcgcgtaacctgtcgctcgacgatgacagcattcgcatcaatttccacctgtacggcaaaaacggggtgatgggagaccatgaaccgatgcaaactgccgggcatgagctggggattgtccttgatgtagttgcaccgacccaggaaattgccaacagcgtttgctcgctggtgcgctctaccatgctgcactacggctatgaaaaccgcatcgctaccgcaggtaatctggcgttcccgttctccccttctgatatccagggcgggccagtatacgaattttccatatatcacctgattgaagccaacgacgctctgcgttttgatttccatattgaacaggtgacgccagaaggagttcaggcatga

SEQ ID NO: 18432 - DNA, 753 bp, Escherichia coli
atgcgttatgccgtacagtctggcatcatcagatataatcctgctctggatatggctggcgcattgaccactgtaaaacgccagcatcgccccgctcttgatctttcacgtcttcctgaacttttgtcgcgtattgacagttataaggggcagcctgtcacccggcttgccgttatgctgaatctgctggtgtttattcgttccagtgaactcagatatgcccgctggtcagaaattgatattgaaaatgccatgtggaccattcctgccgaacgcgagcctctgccaggtgtgaaatactcacaccggggttccaagatgcgaacaccacatcttgtgccactcagcaagcaggctgtagccatactgacagaacttcagacatgggctggtgaaaatggtctggtctttacgggagcacatgacccgcataaaccaatcagtgaaaacaccgtaaataaagccctcagggtgatggggtatgacacaaccctggatatctgtgggcatggattcaggacgatggcatgtagcgcgttaatagaatcaggattgtggtcccgtgatgcagtggaacgtcagatgagtcatcaggagcgtaatggtgtacgtgctgcttacattcataaagcagaacatctggaagaacgccgactgatgctacagtggtgggccgattttctgaatgcaaacagagaaagatttatcagtccatttgaatatgcaaagattaataatccgttaaaacagtaa

SEQ ID NO: 18433 - DNA, 1500 bp, Escherichia coli
atgaatatcagaaagctgttttatacggacaatatatcccggattttattgtttttattcttcccgggcatgtgtgtaataaccactgccgcatgcggatacactgagaagaatgccaccgggaatgtgttgctgctgtttctccttctgattcttgcacacagaaatacccttacatccattacagctctgttatttctgttctgttgtgcactgtatgcacctgtcggtatgacgtacggaaaaatcaacaacagttttattgtcgcgttgttgcagaccacggcggatgaggctgcggagtttaccgggatgattcctgtttatcattttctggtcagtgccgcgattctggtgttcatggttattttctggcggacacaccaccgtggtcaacgtaacgcgatggctctgttgttattcgtattatgctctgtaaacagctggccgttacggatggttaaaggaacagttgtggggacaactgacacattgcgtgaaatgcagcgttatgaacaactgagtcggcacggtgctgacagctggaaaatcctgccgggagcaccattatatgacacgattgttattgttactggtgagagtgtccgcagggattatatgtcggtatatggttatcccgagccaaccacaccatggctgaatacggctcccggtttatttattgacggttatacatcggcagcagccagcaccgtgccttccctgagccggacactgatttatgactatgagcagaaccctgattccggcaacaacgtggtggcgctggcagcaaaagcaggatacagcacatggtggatatccaatcagggaaaactgggagagcatgacacacgcatctctgttattgcttctgatgcggaccatactgttttcctcaagaaaggcagctttgcttcccgtaaaacggatgacatgttgttgttacaggaaacagaacgtgcgctggcagatacatccactccgaaggtgattttcctgcacatgatggggtctcatccgaacccgtgtgatcggcttcactcctggcagaataattacctggagcagtattcccgaaaaattgcctgttatcttgccagcatcagtaaactggataactttcttggtcagcttgatggtatccttcgccggcattcccgtcactttgcaatgctttacttttctgaccatgggctgtcggtcagcgacagtgctaatcctgttcatcatgatggtcatgtgcaggggggctacagcgttcccctgattattaccgccagtgacatcacgtctcatcagtccgtcagcaggaaaatcagtgcccgtaatttcgcaggcatttttcagtggctgaccggtattcgtaccgaaaatataccgccattcaatccgctgacagacgaagataatgaacccgttatggtttttaacggagagaggtatgtacaggaagacagtctgaaaccgcagccacttattcttccggaccacaggtaa

SEQ ID NO: 18434 - DNA, 2310 bp, Escherichia coli
atggagttatggatatttatagtagctatttatttgatttatattctttttttcaaaaagaagaaaactaagtccgcgggctcttatacttccgctcctgtgaaagcaccacctaaagaatggcttgctaacaacaaaaaaaatcagtctgtaatgcaaaacgaggacagcgaagatgacaatctggctacgtttacactaagtggcgggcggaatgtcgaatacagcataacagccactcaacgccagaatttctcaaaaactaccggtgctttggctcgttggatttttccgggagagatgatcacaatcagtgggatagaggttaccggcggtcacttctatcttgggcagcgtatgaaacctgccgggcataactcaggcggttattatgatggcaataacgaggcatcgctagttgacgacacgcttaaaatataccccacaccttacatttacgaagatagttcattagggtattggcccagtttttcctcactttcacctgaagctcgtggtgcgtacctgagttggcttgccagcgacagatgcgacacttcctgcccaattggttacgttttcatttatctgtatggtctggaaagaagggcgcttgttgacagcagggacaacaatatatccgacgatgagttctattctcttttcaaagagatctgccgtctcagatcggttttcaatgaaaaccgatctttccggaattactcatcccagttacttgaagcgatgtccattcttcgtctgaacgaaaatcttgcagcagctctcaacgatgattcggagttcagcaatagcatgcagttcaggttaatcctggcaaagactgttgatacaggagccccggttccagcggatctggctctgacgtgggtgacaaaccatgctgaatactcattacgaacccccgcccgccgctgtgcgaaagaatttgctgcactatttaaacggcgttacacccttaaatacggtgaagggatggtagtgaagccgaataaagcgcgtctgcgtttagattacacgcctgcaagtcccagtttgcgaggtattcggcttcctgttcccgacttgcctgatccaggtgcattgaaaggccctgttcagaagcttatggccattgccgatatatgcacaggtgaactggatgcttacagtcgttaccttggtagaaaaggtacttcagcaaatgataccgctgcaattttgttgctgccttcagaaatcgttaacgaaagcgcagaaaaaatattaagtacattcaaacactgggctgatgacgcaatccgcagtaagggtgggatagtttcagttgctgactactggtcacatatgaatgccacctgtccggcgaagatcaataaaaaagaggccgacttaatgcaagcctttgcacagaaaatgggatactgtctggctcctgacccctatcaccaccacgtaaaggcagatgtcgatggtgtacttgttttattccctgctggtgaaagaggacgtttctcaccttctcctgaatttatcacagctgtattgacgctccgattaggttcggtagtcgccttgattgacaattctctcgatcaagccgaacagaaagtgcttgagaatgccatcaacaacaatgccagcttcagcgatgatgaaaagcgctctctgcacgcatatttaacgtggcagcttcatactccggcgaatatgacgggaatgaaaagccggattgaattactcggtgcagcggaaaaatcagctgtgggtaaggttatcgttagtgtcgcttgctctgacggcagaattacgcctgccgaaatcaaacagcttgagaagatttatacaagcctgggactggatccctcatccgtatcaagcaatatccatcagcattccgcaactgaaactgctctcgtttcatctgtaccagctaatcagtcgacggcaggatttacgctggatgccaacgtacttgcccgccacgaatctgccactgatgatgttcgtaaattactgaactcaattttcactgaagaagaaccagaacaaccagaaagcgctccagcctcattaaccggggaagggggacttgactccgctcatagccaactttatcgcaggttgctggagaaagaacaatggtccagaaaagaggcgacagagttgtgtagtaactggaacctgatgctcggcggtgcgcttgaggtgattaacgattggtcctatgcggtggttgatgcaccagtgctggaagatgctgatgatcacatttggattgacctggaaatagccaaagaattagagggttag

SEQ ID NO: 18435 - DNA, 1317 bp, Escherichia coli
atgtctgtaacacgtataagagtgaaagagcgcgacgctatcattcagtcacttaagtcgggagtaacgccaagaataggtattcagcatatccaggttggccgcgtgaatgagataaccgccctccatcaggatattgaacggattgctgatggcggggcaagcttcagacttatcattggtgagtacggttccgggaaaacattctttttaagtgttgtacggtctattgcgttagagaagaagctggtcacggtcagtgcagacctttctcccgacagacgtatccactcatcgggaggtcaggctcgtaatctctactcagagcttatgaaaaatatgtccaccagaaacaaaccagatggcaatgcattacttagcgttgtggaaaggtttgttactgaggcaaggaaggaagctgatgcgaacggctccctggtctcatccgttattcataaacgccttgctgctttgtcagatatggtgggaggatatgactttgcgaaggtcattgacgcattctggcgcgggcatgagcaggataacgaaaccttaaaatccaatgctattcgctggttgcggggcgagtacaccacaaaaactgatgcccgtaatgatcttgacgtccgaacgattatctcagacgcctcgttctatgattctttgaagttgatgagcctttttgtccgtcaggcaggctatgccggacttttagttagcctcgacgagatggtgaacctcttcaagttgaataatacgcaagcgagaacggccaactacgaacaaattttgcggatcctgaatgactgcctgcaaggctccgctgaaaatattggttttatcctcggggggacgccagaatttcttttcgatccacgtaaggggctctacagctatgaagcgctccagtcgcgtctggcagaaaaccgattcgcacagaaagctggcgtgattgactactcgtcccccacgctgcatcttgccagcctcactcctgaggaactgtatattttactgaaaaaccttcgtcatgtttatgctggtggagatcccgcaaattatctggtgccagatgatgctctgaccgggtttctgcatcactgcagcaaaaccatcggagatgcttactttcgaactccccgcaataccataaaaggttttctggatatgctggctgtgctggaacaaaacagaacgatgaactggcaaaccctcattgagggggtggcgattgaagaagacaagctcagcgatatggatgatgccattgtggaggaaagtgatgacgatgatggcctggcgaatttcagattatga

SEQ ID NO: 18436 - DNA, 228 bp, Escherichia coli
atgcataaaatcccttttgaagtattaatccactctgaaaacgcattaattaaagcacgcgaaatgaatgcgttgttaattaaattaattgaagtgccggaaggtggcgaagatcattcatcattaatgtttgccgctgttcagacattattgacacctgttattgatgaactcaataaggctatggcaattcacgagaataataaagcgccccacaccggagaataa

SEQ ID NO: 18437 - DNA, 231 bp, Escherichia coli
atgcacaataaaaccacaccggacgcagcagaagaagcaatgcaaatactgatacgtgcgctcgttgatgttacccacatggtggagattatggagagaaaatcacagtcggagcacgacaaaagaaaacttaaaacaataaaaataattgccaaaaactcgctgataaaagttacagacatccttaatgaggacattaaaagaataagggagaaaatttgtgatgcataa

SEQ ID NO: 18438 - DNA, 201 bp, Escherichia coli
atggttgctgtaaatcatataccacaccttgtacacacacaaacggcctttgtgtggcgttttctggccctgagtgccggagaatctcaaatcatccacgtaaccgcctggacggaacgcgaagcgcgtagccgttgcccgtccggttgtgttgctgtattcgctgcaaaaatccgccagggagaaacctatgcacaataa

SEQ ID NO: 18439 - DNA, 819 bp, Escherichia coli; identical to SEQ ID NO: 6059

SEQ ID NO: 18440 - DNA, 744 bp, Escherichia coli
  misc_feature (718)..(727): n is a, c, g, or t
atgaaaaatattggtgttattggttgcttacctgaacttccagtcgatttcccacttttgatgcctgaaaactcgggaaacatgattcatgctgaagccccattaagaatgtttccgagggcagttcattacaaagatagccgatttattttatcaggcgaaacaagctttagaaattttgtaaataaaacatgttctcatttgattattacccttgctaattcactttcattagaaaagccaaatccggagaaatataaaaggcttcttgattctcttaagcagtatgatgtacctattattgtttttggcctaggtattcaatcgagttctcgagatataaataaagcagagctttgtaaggaagctattgagttgcttgagtttttatctcttaaatcaacacttcttggtgtaagaggtgagtttacaaaacaggtgatagaaaagtgtaccaatataaataatgtgttcgttactggctgtccatctttattttcagacccagaggcattacgtgacctttataaaaaatgttctctaagagattttaatgtagcatctataaatgtgacaaatttgtcacgaatatcagagaagaaactttttgagagagcagtgttaagcaattcattttttattgaaccggtaaataaacgcactcatcaatattacattgatctcattaaggggaaagaaaactcagacgtgccatacnnnnnnnnnnataaaaacaaaatatag

SEQ ID NO: 18441 - DNA, 249 bp, Escherichia coli
atggcctctgttcttagtggtgttcctgcattatggctaactcacgatgcgagaacacaagaattgacagagttttttaatctacccagtattgacttagatgctattaattccatgtcattaagtcaaattaaatcatatataaattatgacagattctttaaaaatataaatcaattgtttaataatttcaacgaatatcttgaagtcaatgggttgccaaaaattaaaacatttgaagaagtttaa

SEQ ID NO: 18442 - DNA, 1170 bp, Escherichia coli
gtgaaaattacaatctccggtgttggttatgtaggtatgtcaattgccacattgctttcacaaaaacacgatgttattgctctagatatagatcttgagaaagttaagttaattaataaaaggctatcaccaatatgtgatcctgaaatacaaaactttttatcaaataaaaagttgaatctatatgctacaacagaaaaatacgaagcgtatagagatgctgattatgttataatcgcaacaccaaccaattatgatcccattaataataacttcgatacactctcagtagaatcagtagcatgtgacgtactaaatataaatcctaatgcaactatcataatcaaatctacagtccccgtcggctttactgaacgactcaaacgtgatctaaacacgaataatattatcttttccccagaatttttacgtgaaggtaaagctctttatgacaacctatatccatctcgtatagttgtcggagagcgtagcgaacgagcaagaaagttcgctgagcttctctgtgaaggtgctataaaaaaagatattccaatattgttaacggatagcactgaagctgaagccattaaactttttgcaaatacttaccttgcaatgcggattgcttatttcaatgaattggatacttatgcctccgttcatggtttagatacaaagcaaattatagagggtgttggtttagatcctagaattggtcaacattataataatccttcttttggttatggaggttattgcttacctaaggataccaagcaattactcgcaaattatcgtgatgttccgcagaatttaatccaggctattgtcgatgccaatactacccgaaaagactttgttgcggaggatatattaagtcgtaaaccaaaagttgtaggaatctatcgcctcataatgaaagcaggtagtgataactttagagcaagtagtattcaaggtgtaatgaaacgactcaaagccaaaggaattgagatagttgtatatgaacctgtactaaaagagcctcatttctttggttcttatgttgagcgtgatattaattcttttaaagaacatgttgatgttatagtagccaatcgccgcacgtcagaattagaagatgtaagtgaaaaagtttatacgcgagatttatttggtgtcgactcttaa

SEQ ID NO: 18443 - DNA, 1341 bp, Escherichia coli
atgtattggtcattacataatcttactgatacaccgccagattggcggtgtaaattagcaattaaaatagctaaaattgcctgtggtgacataagcttaactccggaattactcatggagtttaaagacgagtacacagaaacacatcaaaaagttgagttagcaaaaaccttagcatcatactctcctgagttttcattatcattattagataatgccgataattgtcccttagacttgtatacagctcttcaattaagaatcgggttaactcaaaaagctatatcaacactcgctcagattgatgtcagtgatattgtatactcccctgatatattactcttgcaaaataatgctttcagagaaacggcagaaatctctttaaatagacttaacgaatactataagtactttggtttatctccagtcgcacttgcagataactcatctcctttgtcaccttgtaatattattacattggttccttatcctgtccaaacgggccccctggtttctattttaatgacaacatacaataccggcaggcgggtagaaaatgcagtaatatcattgcttaatcaaacatatcgttcatttgagctaattattgtggatgatgccagcaccgatgatacgctatttcgtcttcagagattagcactcaaagatactcgaataaaaattattagcctgccacaaaatgttggaacatatgctgcaaaacgaataggtttaatacaagcaaagggagagtttgtgacatgccatgactcagatgactggtcccatcctgaaaaattatttagacagatatcacctttattgttaaaccataaactaatttgttcgatctctgattggataaggttgcaagataatgggattttctatgcgcgtgcggtctatccactaaaaagactgaatccttcttctctgctgtttagaagagcggatgtattgcaaaaagcgggcgtttgggactgtgttaaaacgggtgctgatagtgaattcattgctcgacttaagctaatttttggtgcttcctctatacatcgtattaaattgcctttgacactaggaagccatcgtaccgactcgttaatgaattcacctacaacaggatatacatctcagggaatttcaccggatcgccaaaaatattgggattcctggtcgcgatggcacattcaggcgttaagaaataaagaaagtctttacataggaaattctgatttcactaataaaaatcgaccattttctgcacccgactcaatattagtagatactaatgccatcaaaactgcattacaaagtgctcatgttaactttgccagtatataa

SEQ ID NO: 18444 - DNA, 222 bp, Escherichia coli; identical to SEQ ID NO: 4519

SEQ ID NO: 18445 - DNA, 441 bp, Escherichia coli
atggatctttttgcccgcagggttatcggctggagcctgtcagcgaatgccgatactgccctgataagcagtgccctgcggatggcgtatgaggtgcgtggtcagccgcgggacgtcatgttccatagcgaccagggaagtcaatatacaggactgaaatatcaacaacttctctggcgttacaggataaagcaaagtgtcagccgacggggaaactgctgggataacagtccaatggaacgcttcttccgcagtctgaaaacagaatgggtgccaaccgatggctacacaggcaaagacgtggcccggcagcaaatcagcagttatattctgaattattacaatagcgtcaggcctcaccattataacggagggctgacgccggaagagtcagagaacagatatcatttttactgtaaaaccgtggccagtattacttga

SEQ ID NO: 18446 - DNA, 510 bp, Escherichia coli
atgagtcctgataatatcggttcggctgtcaatcgcttctcaggttggccatctaatgattctctaaaaacagataaagaatcaatgacatcacccgtgactgtgcaggtaataaagatgattgccgccatccttgacccacatcggatagtcgttggaatcgatacactttatacaacgcagcgcgaaacatttacctcagagagtcaacagctcattgaatcagcattgcaaacacttcatgtgatgaatttaaataacctggaaacaaatctcgatgaggaaggtcactatctggcttttggatataacgttgacactcctgacagaataaccgtttctgcttataatgaaaaaaagcctggctgctatggccaatgtcttttaatacaggatgacgaaacagacttatttaacctgataaaagttaaaatttttgaagccaggcataattatgtcgctcaattgatgagcgttccggaatttatggtaatgactccaacttactga

SEQ ID NO: 18447 - DNA, 237 bp, Escherichia coli; identical to SEQ ID NO: 9729

SEQ ID NO: 18448 - DNA, 759 bp, Escherichia coli
atggtttcctttgcctcttttgcaacaggcaaatggatttatggctcaccaaaactggagcaatataatggtatctctgctgtcgaaatcctgggggaaccggcaccaggatacagttccggggatgcaatgaaagcaattgaggatattgcggcaagacttcccgaaggtttccatatttcctggacaggtttgtcttttgaggaacgactttcaggttctcaggctcctgcactatatgcactttcactgttgatcgtctttctgtgtctggctgcactgtatgaaagctggagcattcctttctcggtcatgctggttgttccgcttggtgtcctgggggctgtctgtgctactttgttgcgcggccttggtaacgatgtctttttccaggtcggtttattaacaacaatagggctgtctgcgaaaaatgccatacttatcgtggagtttgctcgtgaattgcatgagaaagaaggactaagcattaaagaggctgctgttgaagcggcgagagtgaggttaagaccgataattatgacttcgctggcatttgtaatgggggttatcccactggctgtctcgactggagcaagttccggaagtaaacatgccatcggtactggtgtggttggagggatgatcactgctacgatactggcaatcttttatattcctctcttctatatgttaattgccgggttcttcagccgcagaaataagaaatcatcggataagactgaagctgagcaatcataa

SEQ ID NO: 18449 - DNA, 681 bp, Escherichia coli
atggcaacgacgaacgcattctgtctggcgtcaccgccactggcacgcatctgccttcacggggatttgcaacgatttggccgccgcctcagcctgtatgtgaacacggcagcggaagccatccgtgccctgtcgttacaggtgccgggctttcgccgtcagatgaacgaaggctggtaccagatacgtattgccggtgatgacacggcaccggaggcggtgtacgcccgtcttcacgaacagctgggtgagggaacggtcatccacattgtgccgcgactggccggagccggaaagggcggactgcagattgtgctgggggcggcagccatcgtgggctctttcttcacggccggtgcctcgatggtgttatggggtacagccctgagtgccggcggtttttctgccaccacgatgctgttttcactgggggccagcatgatactgggcggtgtggcccagatgctggccccgaaggcaaaaacaccggattaccgcgcaacggataacggcagacagaacacgtacttttcctcgctggataacatgattgcccaggggaacccgatgccggtgccttacggggaaatgctggttggctcccgccgtatatcccaggacatcagcacccgtgatgaaggcgggggcggaaaggtcgtggttatcgggcggcaggggtaa

SEQ ID NO: 18450 - DNA, 1026 bp, Escherichia coli
atgaatatattagtaactggtggggcaggatatattggctcacatacggctttatgtttattaaataaaggacataatgttctaataattgataattttagtaattcgtctaaagaatctgttgtaagagttgaaagtattgctaaaaaaaaagctatactatatgagttagatataaataatgaaaatggcgtttcagaaataataaaaaagcataaaattgaatgcattatgcattttgctggagcaaagtctgtagcagaatcattaaaaaaacctattttttattatagtaataatgtttctggtacactacagctaattaacctcgccatcaggaataacgtaactaaatttatttttagttcttctgcaacagtttacggcaatggtaatataatgcctattactgaagaatgtgctataggttgcactttaaatccttatggtacatcgaaatatatatcagagttgatgattagggatattgcaaaaagatacagtagtataaatttcatttgccttagatacttcaacccaataggtgcccatgaatcagggatgattggagaaagcccatctgatataccgagcaatttagttccttatataacacaagttgcaattggtaaattagaaaaactgatggtctttgggggtgattatcctacaaaggatggaacaggtgtacgtgactatatacacgtaatggatttggcggagggacatgaagcagctctatcatatcttactaataaccatcaaagtaattatcatatattcaatttaggcacgggtaaaggatattctgttttagaattaatttcttgctttgaaaagatatcaggcagaactattccttatgaaatagtatcaaggagagatggagatattgctgaatcttggtcatctccgctgagagctaataagtatttaaaatggcaagcgaaacgggatttagaaaaaatgttagcagacgcatggcgatggcaattgaaaaatcctaatggctataatgataggtga

SEQ ID NO: 18451 - DNA, 729 bp, Escherichia coli
atgagaaaaaataatacggcaataatattcggcggcctgtttttttcctgcagcgtgatggccgcaaacggtacgctggcccccactgtggtgccaatggtgaacggtggtcaggccagtattgccatcagcaataccagcccgaatctgtttaccgttcccggtgaccggattatcgccgtgaacagtctggatggtgccctgaccaataatgagcagaccgcctccggcggtgtggtggtggccaccgtcaacaaaaagccctttacgttcattctggaaacagaacgtggtctgaacctttccattcaggctgttccccgtgaaggcgcggggcgtaccattcagctggtcagtgacctgcgcggaaccggagaagaagccggagcgtgggaaacgtccacgccttacgaatccctgcttgtgaccatcagccaggccgtccgtggcggaaaattacccgcaggctggtatcaggtcccggtgacaaaggaaaccctgcaggccccggcggggctgtcttcagtggcagatgccgtatggacggggaatcacctgaagatggtccgctttgccgtggaaaataaaacgctgtctgccctgaatatccgggaaagtgatttctggcagccgggaacccgtgccgtgatgttcagccagcctgccagccagttactggcaggtgcgcgcatggatgtgtatgtcatccgtgacggggagggcaactga

SEQ ID NO: 18452 - DNA, 246 bp, Escherichia coli
atgaaagttattctggctgaagaagcgaaactcattaaaaaagataacgtgaattctgcttttttccagaccagtgtccgtgtctggcctcagtatggtcgtgtggaaatccgtggaattcggaaaacatggattggtaactccgaaccttttactgatatcaaacattacatccttattctgaagcgggaaaacggggtgacctggctggataatttcggggaaacagacgatgagaaaaaataa

SEQ ID NO: 18453 - DNA, 966 bp, Escherichia coli; identical to SEQ ID NO: 7254

SEQ ID NO: 18454 - DNA, 330 bp, Escherichia coli
ttgcccacacaggacagccgggacattattgccgcagcatgcagagcgttaaaccatgtctggcgtgaagggtaccgctatatgaaggcaggtgtcatgctggctgatttcacaccatcgggtatagcgcagccgggattatttgatgaaatccagccccgtaaaaacagtgaaaagttaatgaaaacactcgatgaactgaaccagtcgggaaaagggaaagtgtggtttgcggggcgaggaaccgcccctgaatggcaaatgaaacgggaaatgctttctcctgcgtataccaccagatggacagatttgccagtagcccagttatga

SEQ ID NO: 18455 - DNA, 537 bp, Escherichia coli
atgtatacccagaatgtgaccacggataaagagcgagaaatgcgcaaaaaagatctcgaagaacaagatcgttacgtttctgaaaagcacacccaaaagcaaaagaatcaaaactttactcaagtataccctctagggtggaagcgcctcagagaacttttcagaggaaacccgggagccgcagagctttattcgatgcttgcggagaacatcgatggctcttgtggtgctgttgttgctgatcaaagccacttagcatcgttacttggcgttggaagacaaactatttctagatacgttaagtggttggaagaacaaggtgtattggtcaaaattcctgtggctggaaaggtatgcgcttatgcgttaaaccctcatgaagtctggaagggatacgacaatgccaagccgtatgcggcatttttgaccaagactttggtcaacaaagacggtgacatccaacgccgaatcatggctatgttccacggaagcaatgcccgtcagggtatggaaggcgacacacctgaagccgaatag

SEQ ID NO: 18456 - DNA, 738 bp, Escherichia coli
atgacatcagacaatatcgctgaatatgttggtgagaataatcaatttactgagaagcctgtaactgaataccccccggtgatacaggataatacagtgaccactaaagactatctgtacagcaataatattgatactgaccttttagtggttatcggagggcttattgttatattgtttctcatgatgcttatcatgtactttattaattctctcaggcataaggaattaactgaaatactggaaaaaatatcttttcctgaaaaatccgggagcaatttgcttaaaccggaggcggtcagctgtaatttgttgtccctgtgtgtgctggcaccggtactctgtacacccagaaagctggcagaagtctccagggagatcatcgtggcgagtgcgcaggaaattgcatggacgccggggagcagtcgtattgatggtcatcagggcgaaaatattacctggtctctgtcatcgcagtctcctgccgataagtatgatctcatcaataaaacgtcctgtgtttctcctgacagtggccgtttttatgaaccggacacagttctggatcaccgtgaacgggtacgcctttttattcagatccagtttccgcacgggagtgactggtctgaagtattgcgactgactgacattgttacagagaaggtctcttccggcagggctgcaggcgggtatcaccaccggcatacagggtacacctggtctgtttctgtgaattaa

SEQ ID NO: 18457 - DNA, 663 bp, Escherichia coli
atgagcacagcaatcaagaagcgtaaccttgaggtgaagactcagatgagtgagaccatctggcttgaacccgccagcgaacgcacggtatttctgcagatcaaaaacacgtctgataaagacatgagtgggctgcagggcaaaattgctgatgctgtgaaagcaaaaggatatcaggtggtgacttctccggataaagcctactactggattcaggcgaatgtgctgaaggctgataagatggatctgcgggagtctcagggatggctgaaccgtggttatgaaggcgcagcagttggtgcagcgttaggtgccggtattaccggctataactcaaattctgccggtgccacactcggtgtaggccttgctgctggtctggtgggtatggctgcagatgcgatggtggaagatgtgaactataccatgatcacggatgtacagattgcagagcgtactaaggcaacggtgacaacggataatgttgccgccctgcgtcagggcacatccggtgcgaaaattcagaccagtactgaaacgggtaaccagcataaataccagacccgtgtggtctcaaatgcgaacaaggttaacctgaaatttgaagaggcgaagcctgttctcgaagaccagctggccaaatcaatcgcaaatattctctga

SEQ ID NO: 18458 - DNA, 771 bp, Escherichia coli; identical to SEQ ID NO: 5760

SEQ ID NO: 18459 - DNA, 729 bp, Escherichia coli
gtgcctgctccggagctggccgctggtattccaggcggtggcaagctcatatgcctccccgccgaagctgcgggccgtctcacggtgcagccggtcccgcgtgtactcgaccagtggcgtaccacccagcttcattcccgcaagataaccgctgccatacgtcagccactccaccggcggcagaccgtccggctcctgacgggtcgccagcccctgttcgctgtagacgtgcctcgtctcatgctcccacagcatctcccccgtctcctggttctccaccgtctgccgttcgcccgtcaggcggcctttatcgtcgtggccgtagtggaccgccacacggtggccttcgctgatatggctgatttctgtcagccagccgtgctcatcatactgccactgctccgccgggtcgccgttcaccgtccggtgcgtgatgcggtccgacgcatcgtaatgccagagggtgataagtccctcgtcttcactgtggacaagctgccctgtggcgctgtaccggtaacgctgcgtcctgccgtcaaagccgcgctgctccgtcagcctgtccaccgggtcataccggaacgtggactggctgccgttctcgttggtcagcacggtgatgcgcccggcagcgtcataccccatgctgcgcgtcagaccgccttccgtcacactcaccggacgcccgcgtttatcatattcgatggtgctgcgtttaccgtccggtga

SEQ ID NO: 18460 - DNA, 1164 bp, Escherichia coli
atgacgctggtgaaaacagggggaggggatgcgtcgtttacgctgggcaataccggtggtttcgttgatcttgggacctatgagtatgtcctgaaaagcgacggcaacagcaactggaacctgactaatgatgtcaacccaaatccgaacccaaacccaaatccgaaaccggatccaaaaccagacccaaaaccggatccaaatccagacccgactcccgatccaacgccgacacccgttccggagaaacgcatcacgccttctacggcagctgtactcaatatggcagcaacattaccgttggtatttgatgctgagctaaacagtattcgcgagcggttgaacataatgaaagcgagtccacacaacaataatgtctggggggcgacgtataacacccgtaataatgtcaccaccgatgcgggtgccgggtttgagcagacgctgaccggaatgacggtggggatcgatagccgtaatgatattcctgaggggattgcgacgctgggcgcttttatgggttattcccattcacatatcggttttgatcgcggaggtcatggcagtgtgggcagttattctctgggcggctatgccagttgggaacatgaaagtggtttctatctggacggtatcgtgaagctgaaccgctttgaaagtaacgtagccggtaaaatgagcagcggtggagccgccaacggcagttatcgcagcaacgggctgggcggtcacattgaaaccgggatgcgatttaccgatggtaactggaacctgacgccgtatgcatcgttaacggggttcaccgctgataaccccgaatatcatttatccaatggtatggaatcgaaatcagtcgatacccgcagtatatatcgtgaactgggcgcaacgctgagttacaacatgcgtctggggaacggcatggaagttgagccgtggctgaaggcggctgtgcgcaaagaatttgtcgatgataaccgggtgaaagtgaataatgacggtaattttgtcaatgatttgtcgggcagacgtggaatatatcaggcaggtattaaagcctcattcagcagttcgttaagcgggcatctcggggtggggtatagccatggtgccggtgtggaatccccgtggaacgcggtggctggtgcgaactggtcgttctga

SEQ ID NO: 18461 - DNA, 729 bp, Escherichia coli; identical to SEQ ID NO: 18459

SEQ ID NO: 18462 - DNA, 198 bp, Escherichia coli
atggacattgagttttcgcagattcatgaaatggtctatatgcatgatattgtaaattcggactcgaaaaagaaaccaaggattccgttaaaaaaattccttaatgctgagaaagttctcacgcaaacaacatcatgggtactaaattcaagatatgtgaatgttaattctgtcagtaaagatagcggatatttctga

SEQ ID NO: 18463 - DNA, 258 bp, Escherichia coli
atgagcatatataaatttccgataacagatgatttaatgagtatggctacaaatgaactcataaaactggccaaaatagagaataatttagacctgaataaattctctactatatgcaccgacgttctatcccccctcgtcaccagacataataaagaaaaaaaactagacgacttactacccttcgcaaaaatcccctttttaattttcatcgaaaaaagggaaattgataatatgaatcaaggtcatgcatattaa

SEQ ID NO: 18464 - DNA, 489 bp, Escherichia coli
gtgcagagtgatttgccgtggtggctggtctgccgggggacgattcataagttccgctgtgtgccgcatcttaccgggcggcgctttgagcacggtgtgacggactgttacaccctgttccgggatgcttatcatctggcggggattgagatgccggactttcatcgtgaggatgactggtggcgtaacggccagaatctctatctggataatctggaggcgacggggctgtatcaggtgccgttgtcagcggcacagccgggcgatgtgctgctgtgctgttttggttcatcggtgccgaatcacgccgcaatttactgcggcgacggcgagctgctgcaccatattcctgaacaactgagcaaacgagagaggtacaccgacaaatggcagcgacgcacacactccctctggcgtcaccgggcatggcgcgcatctgcctttacgggaatttacaacgatttggtcgccgcatcgaccttcgtgtga

SEQ ID NO: 18465 - DNA, 234 bp, Escherichia coli; identical to SEQ ID NO: 10186

SEQ ID NO: 18466 - DNA, 600 bp, Escherichia coli
atgcgtaaattatgtgctgttattttgtccgcagtagtctggcaggtcgccgctgctacgccagcgagtgcagcagaacatcagtccacgctgagcgcggggtatctccatgcctcgacgaacgttcccggtagtgatgatctgaacgggattaacgtgaaataccgttatgagtttacggacgcgctggggctgattacgtccttcagttatgccaatgctgaggatgagcaaaaaacgcgctacagcgatacccgctggcatgaagattccgtgcgtaaccgctggttcagcgtgatggcggggccgtctgtacgcgtgaatgaatggttcagcgcgtatgcgatggtgggtgtggcttacagccgtgtgtcgactttctccggggattatctccgcgtaactgacaacaaggggaaaacgcacgatgtgctgaccggaagtgatgacggtcgccacagcaacacgtctctggcgtggggagctggcgtgcagtttaacccgaccgaatccgtggccattgatattgcttatgaaggctccggcagtggcgactggcgcactgacggtttcatcgtgggtgtcggttataaattctga

SEQ ID NO: 18467 - DNA, 279 bp, Escherichia coli
atgcttcgcctggttcgtgcagtgatcccggttgctgttctgatgatgttgttccctgagttagctatggctgctggtaaaggcgacctgatggctaaaggtcaggaaacggttaaggcgaccttcggtaaggactccagtatcgttaaatgggttgttctggctgaggtgctggtcggtgcggtcatgtacatgatgaccaaaaacatcaagttcctggtcggctttgccatactctctgtatttattgcagtaggtatgtctgttgccggattctga

SEQ ID NO: 18468 - DNA, 312 bp, Escherichia coli
atgtcgggagacgagaataaacttaagaaatatcgtttcccggaaacactgaccaaccagagccgctggtttggcctgccactggatgaactgatccccgcagcaatctgtattggctggggtatcataacatcgaaatatctgttcggtattggtgcagcggttctggtttatttcgggattaaaaaactgaaaaaagggcggggcagttcctggttacgtgacctgatttactggtatatgccaacagccctgctgcgcggtatttttcataatgttcccgattcgtgtttccggcagtggattaaatag

SEQ ID NO: 18469 - DNA, 315 bp, Escherichia coli; identical to SEQ ID NO: 13001

SEQ ID NO: 18470 - DNA, 432 bp, Escherichia coli
atgacggcggagcagcgccttgccgaacgtcagttgaaaacgaaaccgctgctgaaatccctggaaagctggctgcgtgaaaagatgaaaaccctgtcgcgacactcagaactggcgaaagcgttcgcatacgccctgaaccagtggccggcgctgacgtactatgcagatgatggctgggctgaggcggacaataacatcgctgaaaatgcgttgcggatggtcagtctgggccgcaaaaactacctgttcttcggttcggatcatggaggagagcggggagcgctgctgtacagcctgatcgggacgtgcaaactgaacggagtggagccagaaagctacctccgctatgtccttgacgtcatagccgactggccgataaaccgggtcggcgaattgctcccctggcgcgtagcactgccgactgaataa

SEQ ID NO: 18471 - DNA, 489 bp, Escherichia coli
gtgcatagtgatttgccgtggtggctggtctgccggggtgagattcataaattccgctgtgtgccgcatctcaccgggcggcgctttgagcacggggtgacggactgttacacgctgttccgggatgcttaccatctggcggggattgagatgccggattttcatcgtgaggatgactggtggcgtcacggtcagaatctctatctggataatctggaggcaacggggctatatcaggtgccgttgtcagcggcgcagccgggcgatgtgctgctgtgctgttttggttcatcggtgccgaatcatgccgctatttactgcggcgacggcgagctgctgcaccatattcctgaacaactgagtaaacgagagaggtataccgacaaatggcagcgacgcacacactccctctggcgtcaccgggcatggcacgcatctgcctttacggggatttacaacgatttggccgccgcatcgaccttcgagtga

SEQ ID NO: 18472 - DNA, 444 bp, Escherichia coli; identical to SEQ ID NO: 15903

SEQ ID NO: 18473 - DNA, 240 bp, Escherichia coli
atgatgccggatggcgaccgttttcatctggttaacggtgaaaactggtttgaccgcaccgtgagtgctgatgccgcaggcatcatccttacctcccttgtgattaaccgccagttgtggctgtaccacgacagcggggatgcagggttgacacacctgtacaggatgcgcgatgcgcagttgtggagccacatcgaatttcaccccgaatgcaacgcgatttacgcggcacttgactga

SEQ ID NO: 18474 - DNA, 441 bp, Escherichia coli
gtgacatttatcgccgatgtcagcacggcgaagatcgctgatctggtggttattaaggatggttcagaggcggacggttcgacggcgaacacgctgcgggtgagggtgaccgatgcgttcgggaacacgctagccgggcagacggtcagcgtgttggcggacaacggcgcaacgactgccccgacggtcatcacagagccggacggtacggtggagatctcagtcaccagccagacggcgggagtcagtgcagtcactgccagcatcaacagcagcagccagagccggaacgtgacgtttgtcgccgatgtcaggacggcgcagatcgcggatctggtggttattaaggacggttcagaggcggacggtgcgacggcgaacacgctgcgggcgagggtgaccgatgcattcggtaatgcgcttgccgggcggcgagggtaa

SEQ ID NO: 18475 - DNA, 246 bp, Escherichia coli
atgaaacatatccctgaaggcgtgattcaggcaccagaatcacccgacgccccggaggcgctgccggggtgtcgttccatttctgatgatgacctgtgcgcctggtgtacccgtctgctttaccgtcccggagaaatcagtctgtgcagactgagtacaggcaatggcatctggccatccgtctgtgaccggaacggttacgcgtacggctgtccggaatttcagccgaatatcattcatccctga

SEQ ID NO: 18476 - DNA, 141 bp, Escherichia coli
atgctgaaaggcgggatttccggtcgcagtgccagaggaaaacgtatccatacccgggccattcacagcattgataccgacattaagctcaatcgcgcattgtgggtgatggcagaaacgatgctggagagcctgcgctga

SEQ ID NO: 18477 - DNA, 291 bp, Escherichia coli
atggctggaacacagcatacccaaactcaccctaaatttatatacatctttctggcgctacatcgcgatcgcatagcagatggagcaactacggtacatgtagccgctgacacgctgtttattcagaaatgtgaaaacaatttcatctggcgttttatcgccctgagtacggcacaaccgcgcgtgattaccatcgaggccaccagcgaacaggaagcccgccagcaatccccaactggctgcgtgatgatattcgccgcccgtattcgtcaggaggtgtgccatgaatga

SEQ ID NO: 18478 - DNA, 1323 bp, Escherichia coli
atgggattaatggcatcattcgaacgtggaatggaacgttttcttgttccagttgctatcaagttaaactcacaaaaacatgttgcagcggtgagagatggattcgtttttacgtttccaattatcatggcaagctcattaattatattaattaactttgccatattatcgcccgacggttttattgccggattactgcatctgaacagcattttccccaaccttgaaaaagcacaagctatttttactccggtaatgaatggttctgtaaatatcatgtcaattatgattgctttcctggtcgccaggaatgtggcgattagctatgagcaagatgatcttttatgtggattaacggcaataggagcattttttattgtttataccccataccagatgatagatgggcaggcattcctgacgacaaaatatctcggcgcgcaggggttgtttgttgctgttatcgttgcattgatcaccagtgaaatattttgtcgcttagctcgaaaccccaaaatcaccataacgatgccggcagctgtacctcctgcggtagcgcgttcatttaaagttttattgccaatattttttgtcatggtgttcttttccgcacttaattattgcctgacattgatatccccggcaggattaaatgatctcatttacacattaatccagacgccgctcaaacatatgggaacgaatatctttgcggtaattatcctgggggctgtgggtaatttcctctgggtgctggggatccacggacctaatacaacgtcggcaattcgagaaaccgttttttctgaggctaatctggagaatctctcctgggccgctcaacacggcactacctggggcgcgccatatccgattacctggacttctattaatgatgcattcgccaactgcggcggttcagatatgacgttggggttattgttggctatttttatcgcttctaagcgtgcggaataccgtgatctggcaaaaatgtcatttatccccggtattttcaatatcaatgaaccgataatgttcggccttcctattgtacttaaccccatcatgatggtgccgtttattatggttcctattgttaacagtgccattggttacttctttgtttcgatggaaattattccaccggttgcttatgccgtgccctggactacgcccggacctttaattgctttcctcggaaccgggggaaactggctggcattactggttggttttttatgtttaggtgtggcgacaatgatctatttgccttttgttatcgccgccaacaaagtcaataacatgacaactaacggataa

SEQ ID NO: 18479 - DNA, 1251 bp, Escherichia coli
ttgttgataaataaagattacaaaaatgtaatatataatgctggctatttgctatgtactcaaggtgttgcgtatcttgcaccgattatcgtgctgggtcatcttataacaaccttgggaattgatggctttggcaaatatgcatttgcattggtactgatggcttatttccaggttgttattgattatggatttgcttacagttccagtcgagctatttcacaaagtagggataatatttgtcaaatatcacgtatatatttcgcaaccaatttcatcaaatttgttctaacaattttattatatagcatcttatatattatatgctggagttttgttaatgatagcaattattatactataatactcagtgcctttttatgggcattttctaattcaatgtacccactatggttttatcaaggcattgaaagattaaaagtagttgctgttatcaatattttatcgcgaataatgtcatgtatttgtgtgttatattttgttcgtaatgaaaatgatattagtactgctatattttcacaagcatttcctgtgcttattggcgcggtttatgctaacatatatattattcaaaaaaaatatataaatttcatactgccttctataaaatatataatggtatcccttaaggaagggtgggattattttttagcaacacttgcctcaacattgctaacaaacagtgctgtttttattcttggtatataccatacgccatctactgtaggtatctatgcagttgtagagcgaatagcaaaagctatagtatcattattttctccgttgacgcagtcactttatccacatagttgtaggaagtttaaggaatcatttgatgtcggcatgtcgtcagctatacgcactgggcgtcccttagttttattaggtctaatcgtaagtatgatttttatacttacatggtggatcgtatcttctagagaagatttgccccaagaaactctggcttttgccttcttacttgctccatggatgtgtttgggcgttcttaataatgttcttggtattcaaatcctgagtgccgcaggttttgccaaaatgtatagttgtagtttcatttattctgctgtatttacggtaatttttcttttattacttgcaggcttatataatggctatggggctgcaatagcagtatcgagtggagaactacttttaagcatactgctgctaagtaatataagtaaggtcaaaaatcaacattttatttaa

SEQ ID NO: 18480 - DNA, 1086 bp, Escherichia coli
atggctcctttaatagaaagcttaaagggggataatagattttgttgcaaggtttgtgtaacgggccagcatcgtgaaatgctcgatcaagttttagacctgttccaaataaagccggactatgatttaaatgtaatgaagccgggacaaacacttgtatctctgactagtattatcttagacaagcttaatgagatctttatagcagataaacccgatatgattctcgttcatggagatacaactactactatagctgcgtcccttgcagcatattataatcaagtaaggatcggtcacgtagaagctggactacgtaccggagacttatactccccttggcctgaggaaggaaatcgcaaacttacagctgctataactgatttgcactttgctccaacagagactgcaaaattaaatttattaaaagaaaatatagctgaaaaaaatatttatatagttggtaatactgttattgatgcacttatggctattgttaccaaagttcgcaaagagccggaattgcagaaagaaatggtgaaaaatcttccatttgatgtcaacaccaataaaattatcttaataacaggtcatagaagagaaaacttcgggattggttttgaaaatatatttttcgcaattcgtaatgctgcattgaaattcaaagattataattttgtatatccggtacatcttaatccgtcagtacgtaaaccggtaaaagacatactaagtggcataagtaatatctacctgattgaaccattagagtatatgcagttcgtttatttaatggacaaagcatatattattgtgactgattctggtggtattcaagaagaagctccgtctttaggaaaacctgttttagttacaagagacactacagagagaccggaagctgttacagctggtactgttagactagtaggtactgataaagacataatatttaatgaattgaaccttttactgactgataaaggtgtatatgaaaaaatgtcaactgcttctaatccgtatggtgatggtcaaacctcgacacgaataacagagatattggctgaatggtataatttaaactaa

SEQ ID NO: 18481 - DNA, 672 bp, Escherichia coli
atggtgattgatgcaatgttaagcgttcagatgactccacaagcaaaagttagcttcgaggagcaatgtttttttcatgcttcaggtcttgttgttgccccaataaatgttggagcattctcctactttggcgctaattgtatgctcggcggctttacgatgggtagattttgttcagttgctccaggagtaaaaattggccttggcgagcatgaaactgggtatttttctacgcatccttttttctttggctcaaaaaatggttttaaaatccctgatggtataggaatgcaacgcgacctctctcaacagaagcatggtataccaagaattggtcatgacgtatggataggtgcaaatgcggttatcaggcgaggtataactattggtactggcgctgttattgctgctggcgctattgtcaccaaaaatgtcgagccatattcaatcgtaggtggcgtttctgcaaaacacctagggtacagatttgaggaatcaatcatcaaagagttactggatagccaatggtgggaatatgatttaagctcatttattgggattgatacaaggacaccgactacttttttagagcagtttaatgctgtaaaagataaaaagaaggcatcttataagagatttacaattcttccatccggtgaaattgttgaatag

SEQ ID NO: 18482 - DNA, 1296 bp, Escherichia coli
atggctacttggcaaggatcaaatggcggattgttggccggtatcggtggtgtgaactcaaacgctccgagcgtaaatgacatcggcaatacgcttcagcttatcaggcagaacaatgatattgagcgttcaggagccaataatattgggttgactgctttgcaaggtatttcaggtattgcgggtgtttttcagcaggaaaagcaggctcagcggcagaaagaatttcagcaggcatacgctaatgcttatgcgtctggtgatcgcggtgctttgcgtcagttggctactcaatatccagaccagattgaatctgttcgtaaaggcatgggattcattgatgaagaccagcgcaattctatcggcacattagcggctggcgcacgccttgcatcatcgtctccagaagcaatgcaatcatggctgcaaaacaacgccaaggaactggcgcgcgtcggtgttgatcctaacaacgttgctcagatgtatcagcagaatccttcaggatttggtgagtttgttgatcaccttgggatggctgctcttggtccgattgattacttcaatgttcaggacaagatggcaggtcgtgagattgaccgaggtaggctggcagagacaatccgcagcaatcaggctggcgaggcactaacagcacgaggtcaggacatccagatacgtggccagaacatcagcgcacagaatgctgctctttcccgcgaaatacaaagagcagaattacaagaaaaggctctggacagacagatagccagagaaagcaatcagttaaagcttgaagagttaaagcagaaacaggcagatgttcggcaaaaggctgacatagcccgtgcggacagacaggccgccgcgcagggcgctgttgatacgttcagcactgcgcttgattctctcaacgagatagagcaaagccccggcctttcaaaagcagtaggcattcgctcagcgtttccgacagttcctggttctgatgcagctaactttgaagcaagactcgacacctttaaagctcaaactttccttcctatggtgcagtcccttaaggggatgggtgctctttcagatgctgagggtaaaaaattatccgatgcggttggtgctctaagtcccaaaatgagtgaaaaggcttttcgtgactctatcggaaagattcgaaatcagcttgaaagcaagttgagcactgttaaaaaacagtttgattaccaggagccggtgcagaatacgccaggacaacaatctcctgctggcagtaatttttcttcactatggggtgattaa

SEQ ID NO: 18483 - DNA, 696 bp, Escherichia coli
atgttatatgcatttaagctgggcagaaaactgcgcggcgaggaaccttattgccctgaaaaaggcggtaaaggtggcagttctgataaaagtgcaaagtatgccgcagaagctcagaagtatgccgcagacctgcaaaatcaacagtggcagacgatcatgaaaaaccttgctccgttcacgccgcttgcggagcagtatgttaaccagcttcagaatctttccagtttagaaggtcaggagcaggcacttaatcagtattacaactctcagcagtataaagacttggcaggtcaggctcgctaccagaatcttgctgctgcggaggcgacggggggacttggttcgacagccacaagcaatcaactggctacgattgctccgactctcggtcagtcgtggttatcaaaccagatgagcaactacaacaatctggcaaacattggccttggtgcgctgcaaggtcaggcgaacgccgggcagacatacgccaacaacatgagcagcattgcacagcaaagcgcagctcttgccgctgctaacgccaataaaccatcaggccttcagacagcaattagcggcggagcttcaggagctatgactggcgctgctcttggctctattgttcccggacttggcactggattaggtgcggcaattggcggcggacttggcctgcttggctcgttgttttaa

SEQ ID NO: 18484 - DNA, 519 bp, Escherichia coli
atgaatcatcaattggctaatctcgatttccgggacatggtggttgtttctggtgatcgcgtgatcacaacctcccgcaaggtagcagcttacttcgacaagcagcatcaccacatcattcagaaaatcgaaaagctagactgttcggatgaatttctaaccagcaacttttcgcgggttacctatgaacacaagggtaatcagtatgttgaatatgaaatttccaaagacggcgcgatgtacatcatcatgtcgtttaccggcaaaaaagctgccgccatcaaagaggcgtttatcaaagcatttaattggatgcgtgacaggctgatggagatggctcactcataccaaagagagcacaacgagttaatgctggagttcatgaaggaaaaggatgttgccagtatgtcaggacgcttgctgaaccgctggggcaggatcaaaaaaccgcaactcatagcaagaatcgaaaggcttgagcagcaggcgcaaatatcgatccccggactgccaaagtga

SEQ ID NO: 18485 - DNA, 402 bp, Escherichia coli
atgcttttaattcaacctggatttggccttagcatcaaaaaaggacacatgtttggcgagaaagagtcacaacgaaaaatggtgtctatccggttgccatttatcagtatttattggctaaacagagaggcaacaaattattggtatacatgcgccagagcagcatttaacgaccctgactggtttgtgaaaaaccaccacgcagttcgtcaggcaaagagaaaggccaatacaacgtacatgaaggcgtatcgaaaagcatggaaagaacaccgcgatcgataccaacaagacatggaaaagcttgaatcagaaaacatggaattaagacgaaagctcggtgaagcaaaacgagacattgatgcttacaagcgactttttaatggtgaaagccatgcttag

SEQ ID NO: 18486 - DNA, 255 bp, Escherichia coli
atgtcatttatcaaattaaccatgcgatgcagcatctatcagccaccaagcacaagcgcgatagaaagcaccagaagtgcatatgagcccttgtacgttaactctgacaacatcgaaaccctatttgatgccggatttacgattgtaagaatggcaagtggtgagcggttcgatgttattgagaaaccagaagctattttggcgttaattaatccatgcgtgcagaaggtgagccatgaggaaacgaacgtttga

SEQ ID NO: 18487 - DNA, 186 bp, Escherichia coli
atgagtgcatcactaataaccgccttcaatcaaagtgcaaatccaagcaatgagcaggttgttgtgttcggctggattgctgagtatttcgaaagcattttcgacgatgaatccgctaggtattgcaggaatatttctgaatcactcaaaaatcaggcttctgctcaacaggaggtgaagtcgtga

SEQ ID NO: 18488 - DNA, 213 bp, Escherichia coli
gtgagcaagcacatcatcaaatatgactatcgagagggagttaaactccctaagcacgagattgagacatggtgcggtcatcggcctgggtcattcgaatggctttttcaggatgctcagcatgcgctattgagcattgagcatggagcgctgcttgttccttgcaagaattgtctggcagcaatcatcaaaacggcgcaggaggtgaagtga

SEQ ID NO: 18489 - DNA, 273 bp, Escherichia coli
atgtatcagcaaatcatttttgaagaaggaaaagaaccaagactgcacacaagccaccaagacatcaagtctatcgaaataagtgataacagtggaaaagttcaagagatttctgttatggagttcaaggataccagaggagatgttttttatgcttacaactatgcttattctggtaaaaaaccatcaaatgacgaaatctataaggctattgatgagctaaagccaatcggtgaaaaattcgaaatgtctaagactataagcgatcaataa

SEQ ID NO: 18490 - DNA, 156 bp, Escherichia coli
atgtccggtgccaaattgcctgatgcgacgcttaacgcgtcttatcaggcctacgagttcgcgcatatttttatgtttgcacccgttcgtaggccggataaggcgttcacgccgcatccggcaaaacaacgggcacgttgccaaaatctgaattaa

SEQ ID NO: 18491 - DNA, 645 bp, Escherichia coli
atgaaagaaatacgtgacgaatatttcgctaatttcgtaagcaagtttggtgaggcaaccagtacagttactgttcctaattcctccataaaaaaatggcgggaagccctgcccagtcaactactccactactgggagactgaaggatggaatacatatcatcacggattaataagtattgtttaccctgatgattatgaaaatattatcgatatctggctaaaggatactttccttaaagagagagattcttaccatgtaattgcacgaagtggatttggttctctttacgtgtgtggagagaaaagtggtagaaatattatcgtcgattgttataatcatagcatttatttttcaaaaaacaattcctcacttaaatctacagatgaacttaatttagatattaaagtgttttttggcatatccaaatttaaacgttttgatttagagtatcaggacggtaaatatctattcgaattagcaacaaggaaatgtggtcaacttaatagtgatgagattttcgggtttgaaccagccctgattttaggaggaagagctgatatctctcacgttattaaagttaatattcaagctcatctgacattattgcgtgagtttgcgcagcctactatttatgaattataa

SEQ ID NO: 18492 - DNA, 711 bp, Escherichia coli
atggcgtgccgtaggcacaccatgatctcgcccgggatgataggtaaaatgttaaaacaagacagaattatcttgctgaaattactgacgatattaattttcgtgtttatagcttcacactgttatgctacaagcaatcgagaattatccttgcctttcaattccgcaaagtctatacaactgactaaccactataaaaatatcaccaatggaattacagaactctccttatctgaaacccaaaaatccctaacgacacctttcaatcagcaagaaatcaccatccctgtcaaaggcgataatttcctctctccctggatagctaaagatactcgttattacaaattgggtcagttcgaagataaaaataatatcttcaaacttattatatataacaccatcggtgaaagtgacaccccattactcaatgtccaactgaatagctatgacaggaaaggaatccttttagattccctgttacttagcaccttctttggctacgaagatatcatccgtttttcacattttaaaattaacccagactatacgatcgcgatcgataactatgttatccatccttacgaacctggtgagtatggaacgacacagcacaaaaagaacccaaaacctgaagtgtatatacgagcaaagtacaaaataataaaaggatactttgagttaacattcagggaggaatataaaacaaactaa

SEQ ID NO: 18493 - DNA, 210 bp, Escherichia coli
atggcgatcatcgccggacgggcgtgcgtggatggcgtatttctggaggaatcgctggagcagaaagcagagtatttgcgggggtacagtgcggatattttggtgatgggcgatgactgggccgggaagtttgatagcttcgcgtatatttgtgaggtggtctatttccccgcacgccgtcggtgtcgacgacggggatcattgaggtga

SEQ ID NO: 18494 - DNA, 1077 bp, Escherichia coli
atgaaatggaacccagaaatcccctacaacgatctgccgggtttacccccagatttagaatgcatagaaacacgtagcgttctgaaagcctgtatcagtgcacgggctgccattgcagagctgaaaacggcgggtgagttgcttcctgatcaggggctgcttatcaaccttctcccgatgctggaagcaaaggactcttcgcgtattgaaaacatcgtaaccaccagcgatcaactgtttcagtatgccgatcgtgcagaaggtgccgatccggcgaccaaagaggcgttgcgctatcgcactgccctgaatgatggttttacccatctcgaggcctggccgctttgcactaacactgctatcgcgatttgcacaaagttgcgcgcggtgcaaaccgatatccgtaaaacaccgggtaccgtattacgcgatcaggataataacaccgtctacacgccccccgttggagaagaggctatccgcaaattactggcgaactgggaacggtttattcatggcgatgatgatttagatccgctggtaaaaatggccattgcgcactatcagtttgaatgcattcatcctttcccggacggtaacggacgaacgggccgtattctgaatatcttgtatctgctccagtctgaattactctcactgccgattctgtatctgtcgcgttacattctcgaaaatcgcacggcttattacacccatctgcgcagagtgacggaagaaggagattgggagtcgtggattttatttatgctggcggcggttgaaaacacctcgcgatggacgacgacaaagatatcagttgttcgacaattgattgctgaaacaacggaatatatccgcgagaacctgcccaaaatctacagccatgagttagtgcagacgctttttgcccaaccctactgccggatcgaaaaccttgtcgaacgcaacatagccaaacgacagacagcatcatcttatcttaagcaattgacagaagcgggtgtactggaggagatgagcgtgggccgggaaaaactgtatctcaataccagactgctgcgggaattaaatcagtag

SEQ ID NO: 18495 - DNA, 2094 bp, Escherichia coli
atgtccagcaaaataagtggtctggcttttccgtgttatgcccccccggtgttccctgaagatgggcgattaatattatctgaagcgcaggtaaacgcgaactacctaaaacaaatcaataaaacagaagagcacaaaaccaactgtagtaaacaggctggatttagaattggctttacgtgtaatcaaagtctgcatattagtctgttttttgatggtacaaataataatgaatataatgacactcctggacacccaaccaatattgccaaactgtttcatacgacctatcagaacgcagaagaacagggatattttaactactatataccgggtgtaggcacaccatttcccaagataggtgaaatggattacagcaacagcgggctggagttcgctactggtggtgaagatcgaattaattgggcattattacgcctcgtggatgccctgagctattccattgacccttcccataagcgactggatgataatgtggcaaaagagcacattcctcttatgcgcgctccctggcctatgactggtgaagtgaatcgtcgcaatgtgattaacccctacctggaaaaattacagggactgttagagcaagccagtccgcgcctgctaaacgtaaagctgtttatctacggattttcccgtggcgcagcggaagcacgaacttttgttaactggttgactcagttagcttgcccgcaggagcaacaggtgatgctggccgggttagctgtcagtattgagtttttggggctgctggataccgtagcttctgtgggggcggcgcatgttttaccgggcgctgccggtcatatgggatgggccgatagtactcagcaactccctgatgagaggcagtttcccggcctgattaaatgctgccgccacttcgttgccgcgcatgagcagcggctgtgctttccgctggattcaatccgtcgtccagacggaaattatcctttaaatgcagaggaaattatctatccggggatgcactctgatgtcggtggtggctatcccgttcgcgatcaggggaagtcctgtggtgactcaggcgacattctttctcagatagccctgcatgatatgtatcttgctgcatttgattcaggagcaccacttgctgtttattctaaatttgttactccattaataaaaggtgtgtcgcctctgcgaattatgagtccttctagcgtaaaggaatttacgattgctaattcattaacaaaacgcttcaacatctggcgacaaacgctgctgaacaccactttgcagggcacagaagaaatgattgatacgagggaaggttatcacccctatcaacttgcccaggttcttgaaagcgcaattagtgaccagatcggctggatcaccgcctggcgtatcggtcgctatgcgaataacagtcttcttgtacaacctttttatattaaggcgccacaactggataaagatggacttgataaagaggcccaagcgcgcgaagaacaaatggaaaatatcgaaaaagagcgggtgaacaagcagaaaggcaatggcacacttgatgaaagtaatcagggcatacctatccttgacccgacgaacgctcagtaccagttgcgagaggcagcccgagaatttcagagcgattataaaggatggacgcgcgatattaacggcagcgtcacggagagagccattcagattcttgtggatgtcattcctaaatatccggtgtatctgattaatggcgatgatgaagcaaaagaatatcagcaaattaaggctatgggagacggactctatccacaattttttattgattcactgggaacgggaacgcgaactcagccctgcgctgaattactggctctctatgatgaccaggttcacgactcccgcgcctggtttatgcaaagttcgctgggtggacgcgaaccctggggcggttattttcgctaccgcatgatttacttcggtgatgaggctaataaagagctgaagctaatctctgcagatggcgaagttgttggcgatcagcccacatccaaccgggtcatttattggatggaatcgaaaacggtgagccgaggttaa

SEQ ID NO: 18496 - DNA, 1911 bp, Escherichia coli
atggatgttgagtatggccagtacagcgtcgccctgctggttgaaggttttccgccttcacatgccgggaccatcaccgtgtatgaggattctaagccggggacattgaatgattttctgggcgctgcaacagaagatgatgtttgtccggaggcactgtatcgttttgaaaagatggtggaagaggcggcacgcaacgctgaagccgcctctcagagcgcagcggcagcaaagaaatcagaaacagcagcggcatcgtccaggaacgcggcgaaaacatcagagacgaatgcaggtaacagcgcgaaagcggcagcttcttcaaaaacagccgcacaaaacgcagcaacagcggcagaacgttcagagacaaatgcccgtgcgtcagaagaagcctccgcagacagtgaagaggcttcccgccgtaatgcagagtcagccgctgaaaatgccggagtcgccaccacaaaagcgcgggaggccgcagcagacgcaacaaaggccgggcagaaaaaggatgaggctctgtcggcagcgacacgagctgaaaaggcggcagaccgcgcagaagccgcagcggaagtgactgcagagccctgtgcgaatatagtgccgccgctgcctgatgtgtggataccgtttaacgattcactggatatgattgcgggtttttctccgggctataaaaaaatagctattggtgacgatgtggttcaggtcgccagtgataaacaggttaatttcagtcgcgcatcaacggcaacatatatcaacaaatctggcgaactgaaaacggcggaaattaatgagccgcgatttgagtgtgatggcctgcttattgagggacaaagaacgaactacatgctcaattcggaaagtccagccagctgggggaagtcatcaaacatggatgtgcccgaaaccgggacggatagttttggttttacttatggaaagtttgtctgcaacgattctctggttgggcaaacttcggctattaatatggcatcaattgctgcaacaaagtcagttgatgtctcaggcgataacaagtacgtgacaacctcatgccgttttaaaacagaacgacaggtaaggttacgtatacggtttgataagtatgatggtagtgcaacaacttttcttggcgatgcgtacattgatacgcaaacgcttgaaattagtatgacaggtggtgctgccggcagaattacggcacgagtcaggaaggataagaccacgggctggatttttgcagaggcaacgattcaggcaattgatggtgagttaaaaataggctctcagatacagtattctcctgggcagggtggggcaacagtatctggtgactatatttatcttgccaccccacaagtagagaatgggccgtgtgtatcatcatttattatttcaggaggcagcgcaacgacaagagccagtgatttggttagtatccccaccagaaataatctttataagttaccatttacttttttacttgagattcataaaaactgggatattgcaccaaacgccgcaccccgcgtgtgggatatagcagcagccaataccgggcaatcagcaattgcagcaatcaacagaggtagtggtaagttatatatgagtctgtcaaacccttcaggctcgtatgttaatagcgcagcgacagatgtatttgcagagaaaaccacatttggatgtattgcaaaagctgatggtcactttcatgtggtgacaaatggtaaagcggttaatgaagtttattgtgaatataatggcgtgaccgctgataaaaatatccgatttggagggcagacgaatactggagaacgacatctgtttggccatattcgcaatttccgcatatggcataaagaattaaatgacaggcaattaaaagaggtcgtatga

SEQ ID NO: 18497 - DNA, 747 bp, Escherichia coli
atgaggtatataggttgggttacatctattttgatattagtagtctttggattatactattatcaatttggtggaagctcaaccactctttctgaaaacaaagagatatggggacagtttggtgattattttggaggtgttcttaatcctatattgagtttcatttcaatattacttctaattaaatcagttaaaatgcaattaactgcgaatgaatgtttaattaatgagactaaaagacaggagtttcttgataaaaggaagtcatttgaatttcaattttataatttaattaacgcgcaaaaaagtgcttttgatgatttctctttgatttttccatctccaagtggtgattttgaagttaaaaaggttaatgctgtaaataaacttgagcaactgattaaaaccagtattcaaagaggtattgctgaagatgctttgattaaaataattgaatcattagatgataaatctgatgataagatgttttcatttgcaagaaggttttatcttgcagttaaacttgttgataatgaagttataactgaaaatggtttcgatgagcaagataaacatatgtatattgaaactctcattaatctgtctgattttgcaatggttcgactaatatgtattattattgcttatctgtcatggcctaatgttgtttatttgaaaaaatcaccagaagtgatgggagttataaaatcaacaggattaaatacgtatattaattcattgaaataa

SEQ ID NO: 18498 - DNA, 822 bp, Escherichia coli
atgaaagttagtcttgatttggttatcaatagcggcgacgatgaaatagatatggattatgctctccagacactattgggtgcatctggagttaccagtattattacagaggcaatacttcgaggtaaagttaaagaaaacagacatcaatctaatgaaataagaacaaaccttaagcattcttttacaggatcttttggtcagcgatttgatgttgttatatcagatagaaaagttgcagcgcgtctttcaagtatgactcgcactgtatttgcagaagttatgagttattatatttatgagtctctttttttagaaggtccggcattgagtgacgctgcaaaaaaagtggtttccggattagacgatattgaagatgagttgactaaagctattcgaaatagacttaaaaatatgcataaaatttccaccatgtgcaactattcagttgatttgaattatagaaagccgggtgagaagcaaaagataattactttaaacaaaaataccgctttgaatataactgagctaattgaaactaatcatgatcatcagatagaagctatagttactaggtttaatacttttactggaaatggtagactgttagtcaggggggaagaaaaaacgacttcttttggttttttgaatggtctaaaatacgttactgatgcccagaccaagaaaataacgagtaatctagatgctaacaatagactggcagaagaagagcgagagtatttgttattaaaagttagagatttaaccatcagtaatggtgaggtagtgaaatacttaattattgaggtggatggggtatga

SEQ ID NO: 18499 - DNA, 189 bp, Escherichia coli
atgaggcgcttcgcaggcgcatgtcgtttcgttttcaatcgtgctctggcgcttcagaatgagaatcatgaggccggtaataaatacatcccttacgggaaaatggcttcctggctggttagtggaaaaatgccactgaaacgcaatggcttaaagattctccctcacagccattgcaacagtcactga

SEQ ID NO: 18500 - DNA, 558 bp, Escherichia coli
gtggcaaatccggtcagcgataacgcggcgctgactgggttaagtaaacttttccggcacattcaacccgccgtgaacgatcctcaggatctgcgcgcaaaactggaaatgctgtgggcgtcttactatggcggcgtagcgataacccatgcgggcacgcatctcgttcatgcgctctcctacccgttaggtggcaaatatcatctgccgcatggcgtcgcgaatgccatcttgctggcgccgtgcatggcgtttgttcgcccctgggcggtcgagaaatttgcccaggtctgggattgcattcccgatgcggaaaccgccctgagcgcggaagaaaaatctcatgccctggtgacctggttacaggcattagtcaatcaactcaagctacccaacaatctcgcggatctcggcgtaccgccagaggatattgcctctctgagcgaggcggcactgaacgtgaagcgccttatgaacaatgtgccgtgccagcttgatctacaggacgtacaggccatttaccaaacactgtttccgcaacatcaatttaaggaataa

SEQ ID NO: 18501 - DNA, 888 bp, Escherichia coli
atgccgaaaaccattgaaggtgtattaaccgctatcgtcaccccgtttaccgcgaccggcagtctgaatatcccggcgttaaaagtgcaggtgaatcgtcaactggaagcgggtaacgcgattttttgcggcggcaccaacggcgagttttttgtgttgaatgaacaggagaagctcagcgttacgcaaacctgcgtggatgaagtggctggtcgtgcgccagtcgtggcacatattggcgagatctctacgcgcgaaacgattcgtctgggtcagcagattgaaaaacttggcgtagatgccgtgtcggtcattgccccttacttcgtaccgctgaaacaggaagagttgattgcgcattacagcgcaattgccgacgcactgagcattccgatgtttctctataacatcccggcccgcactggcaatacgatccagccagaaaccgcgcgtgctctggcgtcgcaccccaatatcattgggattaaagacagcgccggaagcgacgaaagcctgaagggttttctcgatgcggtgtgcgacattgacggctttaatgtgctcaacggcccggattcgctgatccataaagggtttgtcgagggatgttcagcctgtatctctgggctcgccaacgtcgcgccgcgagaaatcaatgccatctggtctcgcttccatgccggtgatattgaagggtcttatgaagcacaggagagagtaacgggcctgcgtaccgatctttataaagtagcattctccccggctgcggtgaaaaaagcgttgcagcttatggggcatgatgttggtgatagccgctacgcggttaatttcacgcctgaacagatcagcgagattcaacaaattattcgtcattataacattaattaa

SEQ ID NO: 18502 - DNA, 705 bp, Escherichia coli
gtgccgcagtgtccgcatcaggcgttgcagattatcgacggcaaagtggcgtggagcgcggctgtctgcgagcaatgtgatacctgcctgaagatgtgcccgcaacatgccacgccaatggcgcaatccatgagcgtggacgaggtgcttaaccatgtccgcaaagcggtgctgtttattgaagggataacggtaagcggcggcgaagccacgacccagttgccgtttgtggtggcgctgtttactgccatcaaaaacgatccgcaactgtgccatctcacctgcctcgtggacagtaacggcatgttgagcgaaaccggctgggaaaaattgctcccggtgtgtgacggcgcaatgctcgatctcaaagcgtgggggagcgaatgtcatcaacaattaaccggacgcgataatcagcagatcaagcgcagcatccgtttgctggcagagcgcggtaagctggcggaactgcgtttgctggtaatccctggccaggtggattatttgcaacacatcgaagaactggcggcgttaatcaagggacttggcgatgttccggtacgcctgaacgcgtttcatgcccacggcgtgtatggcgaagcgcaaagctggccgagcgccacgccggaagacgttgagaggttggctgattcattacgggagcgcggagtgagcaggttgatatttccggcgctgtatctttga

SEQ ID NO: 18503 - DNA, 570 bp, Escherichia coli
atgaataaaaaacttctcgcaatggggctgttattaagcatgaccgcaggttcagctatggcagcagcaaattctggtacaaccatcggaactggtacattagcggtaacaggcactgttggaacatctacttgttcagtgacttttccacaaaatgtgacaatgccaactgttactactgccatgtaccaacaaaccgcttaccaaaatgccatggttcaacagcctgctggtagtattcagttttcaggatgcaatggtcaagccgttgaccttaaagtgatgggcaccggttttggtgggattgctgggggtaaaacaattgcttatccgaaaatttctaataatcaacaaggatggttgggtctgacttttggcgtatctaaagataacggttcatcttttacgaatatgaagctagacaataccccattacgtattgacgttacgaatgacacatttgcattacctgtgcgtgttgaagcagttaaaatgtcatcaaatactgcaactgatataggtcaaggcaattatagcgcatcttttgttgtaactgctacatacgcttaa

SEQ ID NO: 18504 - DNA, 1326 bp, Escherichia coli
gtggggtttaatgtggaaataaaatgtattgaaagtgagcaaattttttttgctaagatgaatagatatagtttcaaactgtcagataagaaatggcaacttgataaagaaaattgcgtataccctcataaagttgtagatagaatgcctacaaaaatgaaacttagctacttaaaaatattagcttactatgcgtctgaatatagttctttttatatacaaaatattaacaatctattttataagtggtttggtgcaatgaccatcgatactattgatgacaaagcaatatatcaattgaatgtttatttaggttcagaaagaaactacaaactaaacttaattaaggctttcatcactaaatggaaaaatctcaattaccctggggtagatgcgactgccattagaatgctggagaaaataaaaatcattccaaaccaaacaggagatgcagttaaaagacgagatccaaataaaggacctttaactgaaacggaattcaataacattattaacgccgttggaaaattttatcatgagaagaaaattcaatgctttttgtattgttatatccttttgctggcaataacaggaagaaggccattacaattgatatctctaaaagctaaagatctcattaaaaatgagagagggtgctttttgaatgtaccaaaagtaaaacaaagaaaatgtttcagaaaagaatttaacatggtaatgatagaaccgttcttatatgacagtttatcaatgctaattaatcaaaatcaggcgtttgttgaagataaattcagtgttgggattaataactatagaggcgagttaccaatcttcatgaatttagataagattacggaaacaaaaaggattgaggattttttatctgatttaacaacagattttttccatatgaaaaattcagttatgtcaaaactattaaaacactttccgtcaaaattcgatgttaggtcagaaaggactaacagctatatagaacttaatgctagaagattcagatatacgttaggaagtcgactggctaacgaaggagcctcaattgaggtgattgctaaagccttagatcataaatcagtaaactcttctatgatatatataaaaaataatcctgacaacgtttatgacatcgataagagactaagtgcgttttttaaccccttatctaatatacttatgggcatagggattgaagaaaacaagaacttttttatcaagtgtgtttcagatgcatttttcttattagaagatacgaaagaggatttgaaatgtttaatgtgtaaaaaattcaatccctggagagcattatga

SEQ ID NO: 18505 - DNA, 312 bp, Escherichia coli; identical to SEQ ID NO: 18231

SEQ ID NO: 18506 - DNA, 2199 bp, Escherichia coli
atgagttttaacgcaaaggatatgacccagggcggtcagattgcgtccatgcgtatccgcatgttcagccagatcgccaatatcatgctttactgcctgtttatttttttctggatactcgttggtctggttttatgggtaaaaataagctggcagacgtttgtgaacggctgtatttactggtggtgtaccacgctggaaggcatgcgggatttaatcaagtcccagccggtctatgagatccagtattacggcaaaaccttccggatgaatgctgctcaggtactgcatgataaatatatgatctggtgcggagagcagctatggtccgcattcgttctggccacagttgtggcactggttatttgcctgattaccttctttgttgtctcctggattctggggcgtcagggtaaacaacagagcgaaaatgaagtcacaggtggtcgtcagctgacagacaatccgaaagacgttgcccggatgctgaaaaaagacggcaaggactccgatatccggattggcgacctgccgattatccgggattctgaaatccagaacttctgtctgcacggaacagtgtcgacgggtaagtcagaggttattcgacgtcttgccaactatgcccgtaaacgtggcgacatggtggtgatttatgaccgttcgtgtgagtttgttaaaagttactatgatccctccatcgataagatcctgaatccgctggatgcacgctgtgctgcctgggatttgtggaaggagtgtctgacacagccggattttgataatgtcgcgaacacgctgatcccgatgggaacgaaagaggacccgttctggcaggggtctggacgtaccatttttgcggaagcggcgtacctgatgcgtaatgaccccaaccgtagctacagcaaactggtggacacactgctttccatcaaaattgaaaaactgcgtacctacctgcgtaattcaccggcggccaacctggtggaagagaaaattgagaaaacggcaatttccatccgtgctgtgctgaccaattacgtgaaagccatccggtacctgcaggggattgagcataacggtgagtccttcaccattcgtgactggatgcgtggtgtccgtgaagataagaaaaacggctggctgtttatctcgtcaaatgccgacactcatgcctccctgaagcctgtggtttccatgtggctgtccattgccattcgtgggctgctggcaatgggagaaaaccgtaaccgtcgtgtgtggtttttctgtgacgagttacccacgttacacaaactgccggacctggtggagatcctgccggaagcccgtaagttcggaggctgctatgtgtttggtattcagtcctatgcccagctggaagatatctacggtgagaaagcggcggcaacgctgtttgatgtgctgaatacccgagcctttttccgctccccgagccatcagattgcagagtttgctgctggtgaaattggtgagaaagagcacctgaaagccagtctgcagtattcctacggtgctgaccccgtgcgtgacgggatatcaaccggtaaggagatggagcgccagacgctggtcagttattccgacattcagtccctgccggatctgacctgctatgtcaccctgcccggaccgtatccggcagtaaaactctcactgaaatatcaggcacgtccgaaggttgccccggagtttattccgcgtgacatcaacccggaaatggagaaccgtctgagtgcagtacttgctgcaagggaagcagaaggtcgtcaggtggccagcctcttcgaaccggatgtcccggaggttgtttccgaagaagacgtgactcaggctgaacagccgcaacagccgcaacagccgcaacagccgcaacagccgcaacagccgcaacagccggtgtctcctgccatcaacgataagaagtcagattcaggtgtgaatgttccggcaggagggatcgagcaggagctgaaaatgaaaccggaagaagagatggaacagcaactgccacccgggatcagtgaatccggtgaagtggtggatatggccgcttatgaggcatggcaacaggaaaatcatccggacatccagcagcagatgcagcgtcgtgaagaggtgaacattaatgtgcaccgggagcgtggggaggatgttgagccgggagatgatttctga

SEQ ID NO: 18507 - DNA, 204 bp, Escherichia coli
atgctgctaccattgcatcgcacatttgtcttaactgggataacatttgcattatcggcagtgtattcattgagctatgcacgagatgaatttaaccttcgtatcctggagctggatagcccacttgaaaatacacaagtgctggaggattttgttaataataataacttaactccgggagtatatcttacctctgttatgtga

SEQ ID NO: 18508 - DNA, 1668 bp, Escherichia coli
atgatccacgcctttattaaaaaagggtgttttcaggattcggtcagtttaatgattatttcacgaaaactcagcgaatcagaaaatgttgatgatgtttccgtaatgatgggtacgcccgccaataaagcgttattagatactacaggtttctggcatgacgattttaataacgccacgccgaacgatatttgcgtggcaattcgtagcgaagcggcggatgcggggatcgcgcaggcggttatgcagcagcttgaagaggcgctaaaacaactggcgcagggttcaggcagcagccaggcgttgacgcaggtgcgtcgctgggacagtgccagtcagaaattacccgatgccaatctggcgctgatttcagtggctggtgagtatgcggcggagctggcgaaccaggcgctggatcgcaacctcaacgtgatgatgttctccgataacgtcacgctggaagatgaaatccaacttaaaacccgcgcgcgggaaaaaggcttgctggtgatggggccagactgcggtacgtcgatgattgccgccacgccgctggcttttgctaacgtgatgccggaaggcaacattggcgtcataggcgcttccggtaccgggattcaggagctgtgctcacagattgcgctggcaggggagggaattactcacgcgattggtcttggcgggcgcgatctcagccgtgaagtgggcggcatcagtgcgctaacggcgctggaaatgctcagtgcagacgagaaaagcgaagtgctggcatttgtttcaaaaccacctgccgaagctgtgcgtctgaaaattgttaatgccatgaaagcaactggcaaaccgacggtggcgctgtttttaggttataccccggcggtggcccgcgacgagaatgtctggtttgcctcctcgctggatgaggccgctcgtctggcttgtctgctttcacgcgtcactgcgcgacgtaacgcgatagcgcctgtcagcagcggatttatttgcggtttgtataccggcggtacgctggctgctgaagcggcgggattacttgccggacaccttggcgtggaagccgacgatacccatcaacatggcatgatgctggacgccgacggacatcagatcctcgacctgggcgatgatttttacaccgtcgggcgtccccatccgatgatcgacccgaccttacgcaacctgttaattgccgatctcggcgctaaaccgcaagtgcgcgtgttgctgcttgatgtcgtgattggcttcggtgcgaccgccgatcctgccgcctcgctggtgagcgcctggcaaaaagcctgtgccgcgcgttcagacaatcaaccactgtatgccattgccacggtgacaggcactgaacgtgacccgcaatgccgctcgcagcaaatcgccacgctggaagatgcggggatcgcggtagtgagttcgctgccggaagccaccttgctggcggcggcgttaattcatccgctctcgcctgccacacagcaacacacaccgtcattactggaaaacgtcgccgtgattaacatcggattacgcagctttgcgctggagctacaaagcgccagcaaaccggttgtgcattaccaatggtcgccagtcgccggcggcaataaaaaactggctcgtttattagaacgtttgcaataa

SEQ ID NO: 18509 - DNA, 1050 bp, Escherichia coli
atgaaaatcagtcgggaaacactccaccagctaatcgagaataaactctgccaggctgggttaaaacgtgagcacgctgcaaccgtggctgaagtattggtttacgccgatgccagagggatccactctcatggcgcggtgcgcgttgaatactacgccgaacgcatttcaaaaggcggcaccaaccgcgaaccggagtttcgtcttgaggaaaccggaccgtgctcggcaattttacatgccgacaatgccgccggacaggtcgcggcgaaaatgggtatggaacatgccatcaaaaccgcccagcaaaaaggcgttgcggtggtcggtatcagtcggatgggtcacagcggcgcaatctcttattttgtgcagcaggctgcccgcgccggattgattggcatttcgctgtgccagtccgatccaatggtggtgccgtttggcggcgcggaaatttactacggcactaacccactggcctttgccgcgccgggagaaggcgacgagatccttacctttgatatggcgactaccgtacaggcatggggaaaagtgctcgacgcccgctcgcgcaatatgtctatcccggatacctgggcagtcgataaaaacggtgcaccaacaaccgatccgttcgcggtacatgctctgctccccgccgctgggccgaaagggtatggcctgatgatgatgattgacgtcctctcaggcgtcttactcggcttaccgttcgggcgacaggttagttcgatgtatgacgatttacacgccgggcgtaatttggggcaattacatatagttattaacccgaactttttctcctccagcgaattattccgtcaacatcttagccagaccatgcgcgaattaaataccattacccccgcgcccggttttaatcaggtttattatcccggacaggatcaggatattaaacaacgcaaagccgccgtcgaaggcatcgaaattgttgatgatatttaccagtatttaatttccgacgcgctttataacacgtcatacgaaacgaaaaatccctttgcgcaataa

SEQ ID NO: 18510 - DNA, 1221 bp, Escherichia coli
atggcaatgagtgaacaaacccagcctgtggcgggcgcggctgcgtcaacgacaaaggcccgaacatcgtttggtattttaggtgctatcagcctctcacatctgctgaacgacatgatccaatcgctgattctggcgatttatccactgcttcagtcagaattttctctgacatttatgcagattggcatgataaccctcaccttccagctcgcctcttcgctactgcaaccggtggtcggctactggaccgataaatatccgatgccgtggtcgttgccgattggcatgtgttttaccttaagtggtctggtgctgcttgcgctggcgggcagtttcggcgcagttctgctggcagcggcgctggtcggtaccggttcatcggtctttcatccggaatcttctcgcgtggcccgtatggcttccggcgggcgtcatggcctggcgcaatctatctttcaggtcggcggcaactttggcagttccctgggccccttgctggcggcggtgattatcgcgccttatggcaaaggcaacgttgcctggtttgtgcttgcggcactgctggcgatcgtggtgctggcgcaaatcagccgttggtactcggcacagcaccgaatgaataaaggaaaacccaaagcgacgattatcaatccactgccgcgcaataaagttgttctggcggtcagcattctgttaatcctcattttctcgaaatatttctatatggcgagcatcagcagctattacaccttttatctgatgcaaaaattcggattatctatccagaatgctcagcttcatttgtttgccttcctgtttgccgttgcggcaggtacggtgattggcgggcctgtaggggataaaattggacggaaatatgtgatttggggctctatcctcggcgttgcgccgtttacgctgattttaccctacgccagcctgcactggacgggggttttaacggtgattattggatttatcctcgcttcagcattctctgccattctggtctacgcccaggagctgcttccgggacgtatcggtatggtttctggactatttttcggttttgctttcggcatgggaggtctgggggcggcagttctggggcttatcgccgaccacaccagcatagagttagtctataaaatctgtgctttcctgccactattggggatgttgaccatattcctgcctgataaccggcataaagactga

SEQ ID NO: 18511 - DNA, 1164 bp, Escherichia coli
atgcaaccagaagattatgaagaaaagcaatacgaggatgagccagaatcctatccaattgatgagtttcaacttactactacgcccaatgattttaatataatcacaattataagttttattaaatcaaaagtttttaaaatccctaactttcaaaggcattatgtttgggatatcaaacgagcatcaaaactcattgaatctcttttaataggccttcctatacctcaaatatttttatatgaacaagataaaaatgaatttttagtgatagatggtcagcagagattaatgaccctttattactttgtaaatggtgtattccctagaaaagagaaacgttctgaactgagaaaaatctttgaagataatggaaacattccagaaaacattcttcacaatgatgaatacttcacaaagttcaacctaaaacttgatggtctatcagacacccaaaaaaacaagtttaatgggaaaaactatgaaacattaaacgaatttcaaaccactttaaatctggcaaccatacgaaatatggtaatcaaaccggttgcacaagattcggaagatggtgcaatgtttgaaatatttaaccgcctaaatagtgggggaatgaacctttctcctcaagaaattcgtatgagtttatatcactcagactttctttcaaatcttgtttcattgaatgaaaacaagacatggagaaaaattctttcaaaaaatgttgttgacatgcgattgagtgatattgaagcgatattgcgcacatttgctatgtccctttttacatctcaatacaaaagctcagttagcggttttttgaacaatttctcaaattatgcaaaaaactacgacactaaagacataactttatttagtaatatatggaatgaatttatggatagtgttgatggaattgatgaaatcaatttcagaactggtgggaatcgtatgagtataactttatttgagtcaattttttatgctgcaacttatgactcatttaaagataaagatctaaaaataagacaagtgacggtgaattacatcgataagcttaaaaatgatcctgaatttctgacatttagtactgataaaacaacaagaagagagcatgtaattggacgtctagaacgtgcaagaacaattttggagggaatgtaa

SEQ ID NO: 18512 - DNA, 201 bp, Escherichia coli
atggaggatatgggatatacttctattgaaagtatgtttaataactataagtgttattatgattttcttctaactcataatgagattagttttgctaatgattacaaatcacaattttcaaaagtaatgctattagcatgtgctagctattttgaaactttagttgtaactaagatacattgtatgcttaacccaagctaa

SEQ ID NO: 18513 - DNA, 222 bp, Escherichia coli
atgattgagaaggtaaaatcaagcacagagttgaccaagtctatctctgattttatggaaatcggagagctaagaaataaattagcacataataattatgctacttttgtattagaaagcacagctgaagagatttataataaatttttaaatgcacattcatttgtctctcaactagatacgttcagtacacagtttagagagcaaattggtgaacagtaa

SEQ ID NO: 18514 - DNA, 195 bp, Escherichia coli
atggaagtcaacaaagatcaactggctgacattttgggcaagagttgtgcaatacttttgtcagacgtaaatatttttgaggaacattattatattgatgtaattagagatatgtttgataggactagaaataaagcagacgccttagttatgtcaattgctgaaataataaaggaaaatagcaatgataaatag

SEQ ID NO: 18515 - DNA, 780 bp, Escherichia coli
ttgatttgccgttttatcgacacccactgccattttgatttcccgccgtttagtggcgatgaagaggccagcctgcaacgtgcggcacaagcgggcgtaggcaagatcattgttccggcgacagaggcggaaaattttgcccgcgtgcaggcgttagcggaaaaatatcaaccgctgtatgccgcattgggcttgcatcctggtatgttggaaaaacatagcgatgtgtctcttgatcagctacagcaggcgctggaaaggcatccggcgaaggtggtggcggtgggggagatcggtctggatctctttggcgacgatccgcaatttgagaggcagcagtggttactcgacgaacaactgaaactggcgaaacactacgatctgccggtgatcctgcattcacgacgcacgcacgacaaactggcgatgcatcttaaacgccacgatttaccgtgcactggcgtggttcatggtttttccggcagcctgcaacaggccgaacggtttgtgcaactgggctacaaaattggcgtaggcgggactattacctatccacgcgccagtaaaacccgcgatgtcatcgcaaaattaccgctggcatcgttgttgctggaaaccgacgcaccagatatgccgctcaatggttttcaggggcaggcaaaccgcccggaacaggccgcgcgggtgtttgacgtgctttgcgagttacgccgggaaccggcggatgagattgcgcaagcgttgcttaataacacctatacgttgtttaacgtgccgtag

SEQ ID NO: 18516 - DNA, 1074 bp, Escherichia coli
gtggggcagcgaatacctgtaacgcttggtaatattgcgccgttgtcgctaaggccgttccagcctggacggattgctctggtgtgcgaaggcggcggacaacgtggaattttcacggctggcgtgctggatgagtttatgcgcgcgcagtttaatcctttcgatctttatctcggcacatctgccggggcgcagaacctctcggcgtatatctgcaatcagcccggttacgcgcgcaaagtcatcatgcgttacaccacaaaacgcgaatttttcgatccattgcgctttgtccgtggaggaaatcttatcgatctcgactggctggtggaggccaccgcaagccagatgccgttgcaaatggataccgcagcgcggttatttgacagcggcaaatcgttttatatgtgcgcctgtcgtcaggatgactatgcgccgaattactttttgccaactaaacaaaactggctggatgtgattcgcgcctccagtgcgatacctggcttttatcgtagcggagtgtcgctggaaggtattaactacctggatggtgggatcagtgatgcgatcccggttaaagaggcggcaaggcagggagcaaaaacgttggtcgtcatccgcactgtgccgtcacaaatgtactacacgccacagtggttcaaacgcatggaacgctggctgggtgacagtagcctgcagccgctggtcaatctggtgcagcatcatgaaacaagctatcgtgagattcagcaatttattgagaaaccaccaggccagctgcggatattcgaaatttatccgccgaagccattgcatagtattgcgctcggcagtcggattccggcgctgcgtgaagactataaacttgggcgtttatgtgggcgttattttctggcaacggtcggtaaattattgactgaaaaagcgccgctgagccgccatctggtgccggtggtgacgccggagtcgatcgttattccgccagcgccagtcgccaacgatacgctggttgccgaagtgagcgacgctccgcaggcgaacgacccgacatttaacaatgaggatctggcttga

SEQ ID NO: 18517 - DNA, 162 bp, Escherichia coli
atgtttcgttggggcatcatatttctggttatcgcgttaatcgccgccgcacttgggtttggtggtctggccggtactgctgcaggcgcagctaaaattgtctttgtcgtcgggattattctgttcctggtgagtttgttcatgggccgaaaacgcccctag

SEQ ID NO: 18518 - DNA, 606 bp, Escherichia coli
atgactatgacaagactgaagatttcgaaaactctgctggctgtaatgttgacttctgccgtcgcgaccggctctgcctacgcagaaaacaacgcgcagactaccaatgaaagcgcagggcaaaaagtcgatagctctatgaataaagtcggtaatttcatggatgacagtgccatcaccgcgaaagtgaaggcggccctggtggatcatgacaacatcaagagcaccgatatctctgtcaaaaccgatcaaaaagtcgtgaccctgagcggtttcgttgaaagccaggctcaggccgaagaggcggtgaaagtggcgaaaggtgttgagggcgtgacctctgtcagcgacaaactgcacgttcgcgacgctaaagaaagctctgtgaaaggctatgcgggtgacaccgccaccaccagtgaaatcaaagccaaactgctggcggacgatatcgtcccttcccgtcatgtgaaagttgaaaccaccgatggcgtggtccagctctccggtaccgtagattctcaggcacagagcgaccgtgctgaaagtatcgccaaagcggtagatggtgtgaaaagcgttaaaaatgatctgaaaactaagtaa

SEQ ID NO: 18519 - DNA, 1590 bp, Escherichia coli
atgacgttgtctccttatttgcaagaggtggcgaagcgccgcacttttgccattatttctcacccggatgccggtaagactaccatcaccgagaaggtgctgctgttcggacaggccattcagaccgccggtacagtaaaaggccgtggctctaaccagcatgctaagtcggactggatggagatggaaaagcagcgtgggatctccatcactacgtctgtgatgcagtttccgtatcacgactgcctggttaacttgctcgataccccggggcacgaagacttctcggaagatacctatcgtaccctgacggcggtggactgctgtctgatggttatcgacgccgcaaaaggtgtagaagatcgtacccgtaagctgatggaagttacccgtctgcgcgatacgccgatcctcacctttatgaacaaacttgaccgtgatatccgcgacccgatggaactgctcgatgaagttgagaacgagctgaaaatcggctgcgcaccgatcacctggccgattggctgcggcaagctgtttaaaggcgtttaccacctttataaagatgaaacctatctctatcagagcggtaaaggccacaccattcaggaagtccgcattgttaaagggctgaataacccggatctcgacgctgcggttggtgaagatctggcacagcagctgcgtgacgaactggagctggtgaaaggcgcgtctaatgagttcgacaaagagctgttccttgcgggcgaaatcaccccggtattctttggtactgcgctgggtaacttcggcgtcgatcatatgctggatggcctggtggagtgggcgcctgcgccgatgccgcgtcagaccgatacccgtaccgtagaagcgagcgaagataaatttaccggcttcgtatttaaaattcaggccaacatggacccgaaacaccgcgaccgcgtggcgtttatgcgcgtggtatccggtaaatatgaaaaaggcatgaagctgcgccaggtgcgcaccgcgaaagatgtggtgatctccgacgcgctgacctttatggcaggcgaccgttcgcacgttgaagaagcgtatccgggcgatattctcggcctgcacaaccacggcaccattcagatcggcgatacctttacccagggtgagatgatgaagttcactggtattccgaacttcgcgccagaactgttccgtcgtatccgcctgaaagatccgctgaagcaaaaacagctgctcaaagggctggtacagctttccgaagagggggcggtgcaggtgttccgtccgatctccaacaacgatctgatcgttggtgcggttggtgtgctgcagtttgatgtggtggtagcgcgcctgaagagcgaatacaacgttgaagcagtgtatgagtcagtcaacgttgccaccgcccgctgggtagaatgtgcggacgcgaagaaattcgaagagttcaagcgtaagaacgaaagccaactggcgcttgatggtggcgataacctcgcttacatcgctaccagcatggtcaatctgcgcctggcgcaggaacgttatccggacgttcagttccaccagacccgcgagcattaa

SEQ ID NO: 18520 - DNA, 708 bp, Escherichia coli
ttggcggcagcacaaaatatcggcattaaatatgcaaaagatatattaaattcgacacatataattttatttgatcaggatagcatcatagaacccaactttgttgtgaatttaattaatgaggaattaaagttaaaacatgaaggttataaaattgcagcaataggtcccagcttttatgaccctgagaataataaaatttatccggccactttatactgtggtccattcatacgaaaagttatgcttgataaacaaccagttgaagcaacctttctgatagcatcaggttgcttgattaatatggatgttatcaaacatattggatatatgcttgaggatctttttatagattacattgatgttgaatggtcactgcgtgcaaaaaaattcggctataaattatttattactcccaaatcttctatggctcactcaattggtgataaacgtatctctttttttggacgtactatatcttgtcatagtccattgcgtcgttattatcttgttcggaatagtttcaaaatgctgagattaccttatgttcctattggatataaaattcgtgaaactatcttcaatattttaagagtcatcattgggtttgcaacgagtacagataagaaaagtttcactaaatatactgtcgttgcatttaaggacggcgtttctggtaagtttgggccttgtaagtataagttttga

SEQ ID NO: 18521 - DNA, 1146 bp, Escherichia coli
atgattaaaattgctcacatacaacttcttccgctattaagtggtgtccaacgagtttgcctggacgaattaattcgtcttgacccaaggacatttgataggtatttgatatgtaaagaggagggccccctaacaattgaagcgcaaaaatatggaataaaatgtttatttgtgaaatctcttgttagagagatatcgttaaaaaacgattttaaagcactttggtatttatggaaacttattaagcagcataattttgatatcgttcatacccactcatctaagacaggggtgctaggacgagttgctgcgtggctaggtcgcacgaaactgatagtacatactgtccatggattttcctttcctgctgctaaaaataaattacaaaaattattattttatttaatggaaaaaattggttctctttgtggtgacgtaataatttgcttgcatgaagatgatgctaaaatagcacaaaccatacttaggaccggtaaggataaaatattcataataagtaatggcgttgatacggaaaaattcagaccatatgctaaaaatgataaggaactttgccggcgtaatatatacaatatatgcgatgacgacattattattgggatgataggacgtctttggccacaaaaaaacccactttgtttattaaaggctatttcacaactcattaaaagtaataaaaaaataaaatgtgtttttattggtgatggtgagttatatggtgaaatggctgacttcattaatgataatgcacttcatgatagtgttcaattattggggtggcgtaatgatacacctattttacttaatgctatggatatctttgtattaccttccctttgggaggggatgccattagctattcttgaagccaaaagttgtgggcttccttgtgtcgtatccaatattcaagggaatcgcaacataattaacggagttgataatggactattgtttgatttgaatttaaattggcatgatttacatgataaattaaaactgcttattgaagattcaagattaagaactatccttggcaaaaactcgcgtcttgatgtgatgattaatcataatatttcaagtagaattaaaaagatagaaaaactgtatttaaacaagatcgtgtag

SEQ ID NO: 18522 - DNA, 978 bp, Escherichia coli
atgagagtagaaaataataatgtttctgggcaaaaccatgacccggaacagattgatttgattgatttactggtccaactatggcgtggcaagatgactatcatcatttctgtcattgtggctattgccctggctatagggtatctggccgtagccaaagaaaagtggacttcaacagctatcgttactcaacctgatgtggggcaaatcgctggttataccaacgcgatgaatgtgatttacggtccggcagtaccgaaagtctccgacattcaggcttcacttatcggacgttacagcacgacattttctgcattagcagaaacgctggataatcaggaagcacctgaaaaactgaccattgagcctaccgttaaaaatcagtcattacctttagcggtgtcttatgtgggtgaaacacctgaaggtgcgcagaaacagctggcgaagtatatccagcaagttgacgaccaggtaaatgaagaactggaacaagacctgaaagacaacatcgcgctgcgaatgaaaaacttgcaggactctctgaaaacccaggaagtggtcgcgcaggagcagaaagatctgcgtatccgtcagattcaggaagcgttgcagtatgcgaatcaggcgcaggtgacaaagccgcagattcagcagacacaggacgtaacccaggatactatgttccttttggggagcgaagcgctggagtcgatgattaagcacgaagcgacccgtccgttggtgttctcaccaaactactatcagactcgtcaaaacctgctggatattgaaaacttaaaggttgatgatcttgatattcatgcttatcgctatgtaatgaaaccgacgttacctattcgtcgcgatagcccgaaaaaggcaattacattgattctggcagtgctgctgggcggcatggttggcgcggggattgtgcttgggcgtaacgcgctgcgtaattacaacgcgaaataa

SEQ ID NO: 18523 - DNA, 1056 bp, Escherichia coli
ttgttaagaaaacatttgctcaacaatgccgaaatattgtttattggcagatttggtgagaaaatttttaaagatgttaatcgtgcatgtgctattctaatatttagaaaaaagacttcctctacttttgaggattacgaaattgactgttttcgtcttccagttgaagagagaaataatataataaatggaactgaagttcttagccaagttgaactaaaatatagacataaggtgttgtattctcgctttaaaaaggattcaaagcatctgtttaatttagacattgattctacattgcaaagcacatatgagtgtatttcatctcacgaccacaaaaatgaaattataaaatgtaaaaattgtggtgaaaaattagtaacaaaaagcacaaatgaaaaagtcataattcacaaaggttataactataattgtaatcctctgattgttggtgaggatattaaccgttataaaatagattataatttatggattgatacttcaaatactggtataaactataaaaacccagcaatatatgaaggggagaaaattgtagttagaaaaactggtataggcgtatctgcttcgattgattatacttctagttatacaaatcaagtggtgtatatattcaaactgagatcagatttcttaggtaaaattccactggagtttcttttagcaattctgaattcaagggctattttcttttttgtttcaatgtctaatggtgaaatagaatggaaaagccacccttacctgactcagcagcagattattaatataccaattcctaatcttttgaagatacctaataacgatcttgaaattataaataacttgtccaaaaggttaagagtctttctagagaagagtgaaaaagtaccaaacgatttagacgctgagttggagcgtatggttgctaaaatatatggcttggatcaagcacactatgatgctatttttaaagttctggacaaagcacaagaattgatagcagttaaagcgttgaaaaatataaaaatttctgacatttttgtatcaaaggcataa

SEQ ID NO: 18524 - DNA, 546 bp, Escherichia coli
atgcaaataaaaactcgtaatttattgttttttataatggtgctgtgtgctaccatttttgctatgaaaataatgccatattctaacgaccatcaagcatatttggatttatataaatttactatctatgattcatcttatgaaagaatggaagtcggattcaaaagttttatggtgttatttaaatcaatagattttagttttgaatttctttggcttttaattgcttttacttccgtactattaaaattttatgtactaaaatcgtttgattcaaaaatctcagtattattttggttatattttttatattgcatatcattattggctttacacgaaggtacgcaaatacgcgcagctattgcaatagccataggcatggtgggataccgatgtaaaaataaacgacttggagtttgcttacttctattttcagcaatgtttcattattcagccattttattcatcgtcttatatatgctaaatattgtagccaaaccgtataagtttacctggttacttgttgttattcgtgtcgaggtttga

SEQ ID NO: 18525 - DNA, 318 bp, Escherichia coli
atggctcgctgccatttgggatttgttttaagagatgacatagttgtaaatagagttgcctgcccaactaaattaattgaataccttgaatgtggtgttgttcctgttgttaaatctccagatataggtgatttcaattcgctaggctattcatttattaaagttgatgaaatttgtagtcctcttaaaatggaagaattatatgaaaaagttgaaaataattatagagtgttagctcattttcaaagtctaaccgagcattccaaactagtattgataaatatttttaaaggggctaatacggacttgggaaattaa

SEQ ID NO: 18526 - DNA, 2730 bp, Escherichia coli
atgacagacattacagctaatgttgtagtgagtatgccttcgcaactcttcactatggctcgttcttttaaagccgtagctaatggcaaaatttatatcggtaaaattgacactgacccggtaaatcctgaaaaccagattcaggtttatgtggagaacgaagacggttctcacgttcctgtttcgcaaccaatcatcattaacgctgctggatatcctgtatataacggacagattgccaaattcgttaccgtgcaaggccattctatggctgtttatgatgcgtatggtgcgcagcagttctattttcctaatgtgctgaagtatgaccctgatcaactacggcagcaattagaagacccagatggagcgaataaatacccaaaacttcagatagcaagatggagagacagttatgatgtaagaggttggggggctattggtgatggtgttcatgatgatacatcagctctatcagaattactttctgttgcaacaggtggtgaaaagatagatgggcgagggcttacttttaaagtatcaactcttccagatgtcagtcgatttaaaaatgctcgttttttatttgagagaataccgggtcagcctcttttttatgcttctgaagattttatccagggagagttatttaaaattacagatacaccgtggtacaacgcctggacgcaggataaaacgtttgtatatgacaatgtcatctatgcgccttttatggctggagaccgccatggtgtaaataacctccatgttgcatgggttcgctcaggagatgacgggaagacctggacaacgccggaatggcttacagatttacatgaaaactatcccacagttaactatcactgcatgagtatgggggttgtcagaaatcgcctttttgctgtaattgagacgcggaccgtgagcggaaataaactgcaggttgcagagttgtgggatcgcccaatgagtcgcagccttcgcgtttatggtggtataacgaaagcagcaaatcagcaagtcgcttatattcgcattactgatcacggattatttgctggtgattttgtcaacttctcaaactctggtgttacaggtgttaccgggaatatgacggtgactactgttattgataaaaatacttttacagttacgacgcaaaatacccaggatgtggatcagaataacgagggtagatactggagttttggtacatcatttcactcgtcaccatggagaaaaaccagtcttggaactattccttcttttgttgacggaagcactcctgttactgagattcacagttttgcgacgattagcgataacagttttgctgttggctaccataatggtgatattggtccacgcgagcttgggatactctatttctctgatgctttcggttctcctggtagctttgttcgcagacgcatacctgcagaatatgaggcgaatgcatctgagccatgtgtaaaatattatgatggcattctgtatctgacgaccagggggacattaagtactcaacccggtagttcattgcacagaagctctgatttaggtacatcatggaattctcttcgcttcccaaataatgttcatcactcaaaccttccttttgccaaagttggcgatgagctgattatttttggcagtgagcgcgcatttggtgagtgggaaggaggagaacctgataaccgttatgcaggaaactatccaagaacatttatgaccagagttaacgtcaatgagtggagtctggataatgtagagtgggttaatgttactgatcagatttatcagggcggaatagttaactctgcggttggtgttggttcagtttgtatcaaagacaactggctgtactacattttcggtggggaagactttctaaacccatggagcataggggataacaacagaaaatatccttatgttcacgatggtcacccggctgatttgtattgtttcagggtgaaaattaaacaggaagaatttgtttcaagggattttgtctacggagccactcctaacagaacgcttcctacttttatgtcgacgtcaggcgtgaggacggttcctgtacccgttgatttcacagatgatgttgccgtccagtcactgactgtccatgcaggtacatcaggacaagttcgcgcggaagtcaaacttgagggtaattacgccattattgcgaagaaagtaccgtctgatgatgttaccgctcagagattaatcgttagcggcggtgaaacaacgtcttcagcagatggtgcaatgataacgttgcatggttccagaagcagtactccacgtcgcgcggtatataacgcactcgaacatctttttgagaacggagatgttaaaccttatcttgataatgtaaatgctcttggtggtccgggaaacaggttctcgatagtttatcttggctccaatcctgtggttaccagtgacggaacattaaagacagagccggtctctcctgacgaaacattgctggatgcctggggtgacgtcaggtatatcgcttataaatggctgaacgctgtcgctataaagggggaagaaggggcgaggatacatcatggtgtaatcgcgcagcaacttcgtgatgttcttatttctcacggactcatggaagaagaaagcacaacatgccgctatgcctttctttgctatgacgattatcccgcagtatatgatgacgtcattactggccgccgctga

SEQ ID NO: 18527 - DNA, 612 bp, Escherichia coli
gtggatgagaatctattgaatccttttaatacttcattaaatcaaaagcaaattgatactgattggaatatatatgaaaatttaattactgagagtgtcaatccatttcataagcaaattgctggaaaatatcatatcaatacttactctttctatgggagagcgaaattgggagatattcctgaagcgcatttaacgcaggaaaatgttctttggaaaggctcattatcaatggaaaaaaaaagtgatatatctttagaaccaaaattcattgatggtcgtcttgatttaaatgaagttggtaacattagaactattaaggatgaattttctcctgaagaacaggcgtgggaaataaatactgacgacggtgatacatatgttaagataggacagcgttttacattacgagactcttgtgaaaacggggatggtacagtacctcttcgtgcaggacaaatcgtacacaagaacatcctagagcgtttggctgtacaggtttctcacgaggctgcttatcgaaatcccgttagtcaggcatttgcattacgttctattataaaaatagctcaggaggtaaaaaaggatggtaaaatgtcatactctgattaa

SEQ ID NO: 18528 - DNA, 636 bp, Escherichia coli
atgggaagtgaactgatttctggtttagttggtgctttgatagggggattgttcaccctgtggggtactctgatcgatggacgtaggcaagacagagcttcatttaatgaagcaaaggataagcaaaagagtgtcttgattggaataaaagcagaagtcgaaacgcttctggaactttataaagccagaatttacgattctcttgaaaattatgaaggtggtaaaccttttgaaagcatctttccgttgactcaaaattatttctcattctatgaaagcaactctttcgcattaacttctgttaatgaagagacaatgaaggcaattgttatttgttatggctcagcaaggagtctggttgatactttcagaatgaataatcaggttttagaggacttagctaaacttcaaaccatatttcatgaaacgcagaaagatatccatcgttttaatttagaacagacttaccatattgccactcaatatggcgaaggtttgaagcagattcatggcgaggttatgtcacgtatagccatctgtttagataaaattaatgttaatttggatgaacttgaaaagcctgagcaggtaacgcggttaaaaaccgttcttagggctttagcttttataaagtga

SEQ ID NO: 18529 - DNA, 555 bp, Escherichia coli
atgggttggtcttcgctggttaggataaccattggtatatttctattagctgggttgtcgttctctgcatacgcgaagaattgcaagaaaggtataccgtgtggtaattcgtgtattgcggcatggaaaacatgtggaggtagttcgcgctcatcttctacttatcaacattactcttatccgtcatcttctcttcatagttcaatccccaaatcctctttggattctccatcagcgaagattgccgaaaaaaacgcagcttcaattgtgaaaacttatctatgtcagtattcgatagcaacaataaagaatggcagaataggttctttacgtgtgctgggaagtgctgaagtaacgttgcatgttgatagcttcaaagctaaccgtttaaacggtacatacttgctttcgccaaagttgaaacctgatggtaagttgatgacagcagatgataaaagcaaagtgtacgcttatgattcgttgctgaataactttgcaatcagtgatcgagttgcaaggactactgagcaatgggatcattgccgtcaaaaatga

SEQ ID NO: 18530 - DNA, 321 bp, Escherichia coli
atgctgctcgatatcgtgtttagcctggattcggtgatcaccgccgtcggcctttctcagcatatatttatcatgattgccgccgtaatgattgccgtcggtgtcatgatgtttgcggcgaaaacaattggtgatttcgttaacgccacgccgtcaataaaaatactggcgttaacctttttattgtttgtcggtgtattgctggttgccgatagtctcaacattcatattgccaaagagtatctctacttcgcgatatttttctcattaagtgttgagacactcaatattatccgtgaaagaagaaagtttcgacattga

SEQ ID NO: 18531 - DNA, 189 bp, Escherichia coli
atggcgaacaaaaatagtacgaaccagtgcggcacagataaggcactgacgcagagagaaattttagaactggcggtaaaaatcggggatttcatcaaagaagaggccggacgcttagataaacaggtgtccggcaaagatatcagcgttatcgctggcgtactggactttattcaccagtgcgagtaa

SEQ ID NO: 18532 - DNA, 177 bp, Escherichia coli
atgaatgatttagaaaaaaccaagtttctttttgagcagacctgttcagtcattggcggagcacttactgaacaatcagtaatgcctgttcctgtagaaacccgagcttcacgcttatttgatgctatctatccagttcttgagaaaaaactcgaagaaaaactcgcgaaaaaatag

SEQ ID NO: 18533 - DNA, 1176 bp, Escherichia coli
atgaaaaaaaactcggtaggtgtggaggataaattaaaacataaagcagttcaatatattaatattgaagatctggagcttgatgttgaaaacccccgctttggtgaagactcttcttcatctgatacacaagttgatgtgctgaataatattgttaaaaattatggcgttactgatgtaataagttctattgcagtgaatggttatttttctgctgagccaatggtggtgaggaaaaataataataagaaattcactgtaatggaaggtaatagaaggctggctgcctgtcttatacttaaaaatgatgacagagcaagagatcaagttaatctgcatcaacagtatattgataaatacaattctcatgggtgccctaaaatagacccagttccagcaatagtttttgaagacgatgatggtgtagataaaaaatcacttatatcatatttaggtgtgaggcatatcgtatctacaaaggattgggattcatacgctaaggctgcatggatatctcgaaccatcaaggaaggagatatgagcgtatctgatatttccactatgattggtgaccgtaatagcactataaaaagacttttgtctggatataatttcattaaacaaatggagtctgctgggaagtataataaagatgatagtgtgaagaaagggagagggagcaatactagttatccattctcgtgggtttatacattgctgagttataagagtattcaggattttgtgggcttatcagataatcctacagaccctaatccaatagatgaaaagaaattggataatgcgaagcttctaatgacagctatgtttggtaataaaaataaaggacaaaactcacaagttaaagactctcgtaatcttggtgtcttggctgagatagttgcttctccagaaaaagttatactgctcaagcaaggcaaggatgttgaagacattaatgacctaactcagccaatcggcgataggttgactagtttaatgttagaaattagaagtaaattggacgaatgtcttacgagggtagggcgtgaagatttaccaatgcaggatgctattcaacttaatatatatcttgagcaaataagtaaacaatttagatcttttagagtatcaattaatgaggctattactggaagtgatagtgagggtttttaa

SEQ ID NO: 18534 - DNA, 957 bp, Escherichia coli
gtgaattatggtttacgctctaaaatgcagggattcgcaacagatgcggatcaagcagaatttaatgcattacttgatgttagcgcgacaatagactcaggaattgaggatgataaaattgctggaactatctatgatgagttagaaaatttagatggtcatttggaagaagaatggatgatggaagatcagggaaaggagcttttagttggtcagattgccgagcatatacaatggagagcaaaggttttggatgatatgtatccatttgaatataaagaaaatcatctaacattaaaggagtctccttcccttgtttatctgttttgcttatgtgtctctgtaattaataatttaacaaaaggagataatgttaagttgcctagattttttgaagttatggctgggcgattattcacaaaattttttagttcacacgcaaaacacatgcatactggttggcctcgttcaaatggaaatcctagtagttataaggaactagcttataaactgaactcttcgatctcaccaaatacaagagaatggtcttggcgcgtagagaatggcttaagagatgaggatgcattgagaattaaagattgtggtgtggattttgttacatgggttgattttttggatggtagagatggacgtttatttgctttagggcaatgcgcttgtggtaatgattggccaacaaagtttcaggatattaaaattgaaaggttaacaccatggtttcatccattaacttacattaagtgtgttaaagttttctcaacaccttatgtgttagttgatgaaatgataagagaagcaagcgcagaagctggaattatatttgatcgagtccgtttaactattgcatatgagcgttttaaggatgaatttggtgatatgcaggatgagttagatgcgttaattaccttttgtaaagaattaaaaaaggcccagtga

SEQ ID NO: 18535 - DNA, 984 bp, Escherichia coli
atgccaaaagctgtatcattgttctcgggttgtggtggttccgatgctggattaagcaaagctggtttcgacatcgttatggcaaacgatattttgccatatgcgagagaggtttatctcgcaaacctaccagaaacagattacctaatccaagatatccgagaagttgaaaaatttccgagtgcagaccttcttgttggatgctatccatgccaaggatttagccaaggtggcgcacgtcttgcggacaggagtataaattttttatataaagagtttgcacgtgcattaaccaatattcaacctaaagcatttattgtcgaaaatgtttcaggtatgagaaatagtacatttaagcatctactcgatgatcaaataaaacgcttctccaatgctggtaatataggctataaagttgtttggaatatactcaaagctcaccactacggtgtaccgcaagagcgtaagagattaataattgtaggtattcgtaacgacttcgacctagaatataaattccctgaagccacacatggtgaggaaaaatcattaccttatgtaacaatcggtgaagcactaaagggattacctgaatggccaatcggtgagttttgtgatgacccatttcactggtactatttatctaggaatagacgccgcaactgggacgaagttagtaaaactatcgtaagtaatcttcgtcatattcccttgcatcccatcagccccgaattaaaaaaagtgggtatagacaagtgggagtttataacaaactcgccagccagacgcttctcttataaagaagcggcgattctgcaagggtttagtaaagaatataccaatcatggtggttatctaacttttcctgacatggatagttttggggccgcacggatgttaaaagagagatataaggtcgtaggtaatgcagttccaccacctttgtttgaagcggttgtgagaaacatccctgatatatggtaa

SEQ ID NO: 18536 - DNA, 603 bp, Escherichia coli
atggataaagccgtattaaatagcgaacttattgccacgaaggcggggaatattaccgtctataactatgatggtgaaacacgggaatatatttccacttcaaatgaatatcttgccgttggtgtcggtatcccggcatattcctgtttagatgctcctggcacatataaggcgggttatgctatctgccgttctatggatttaaaatcatgggaatatgtgtcagaccatcgtggtgaaattgtctatagcaccgaaacaggtgaatcaaaagaaatcaaaactccgggtgattaccctgaaaatgcaaccactatcgccccgtcaacgccatacgataaatgggatggtgagaaatgggtgacggataccgaggcacagcatagcgccgcagtagatgcagcagaagcacagcgccagtcactgattgatgcagcaatggcttccattagtctgattcagctgaaattacaggccgggcggaaactgacgcaggcagaaacaacccggcttaacgctgtgctggattacattgacgctgtgacggcaacagataccagcaccgcgcctgatgttatctggcctgaactgccggaggcgtag

SEQ ID NO: 18537 - DNA, 900 bp, Escherichia coli
atgagtaaagtctttatttgcgccgccattccggacgaacaggcaataaaggaagaaggtgccgtcgctgtagccactgccattgaagccggtgatgaacgtcgcgcccgcgcaaaatttcactggcaattcctggaacattatccggctgctcaggactgcgcttataaatttcttgtttgcgaggataaacccggtataccccgccctgccctcgattcctgggatgctgaatatatgcaggaaaaccgctgggatgaggcgtctgcttcctttgttccggtcgagactgaatccgatccgatgaacgtcacttttgacaagctggcccctgaagtacagaacgctgtcatggttaagttcgacacatgtgaaaacatcaccgttgatatggttattagcgcacaggaattgttgcaggaagacatggcaacattcgacggacatatcgttgaagcgttgatgaaaatgccagaagttaacgccatgtatccggagcttaagttgcacgccattgggtgggttaagcataaatgtattcctggtgctaaatggcccgaaattcaggcagagatgcgcatctggaaaaaacgtcgcgaaggtgaacgcaaggaaaccggaaaatacacgtctgttgttgatctcgcccgcgccagagccaatcaacagtacactgaaaattcaacaggaaaaatcagcccggtcattgctgccattcatcgcgaatacaagcagacatggaaaacactggatgacgaactggcctacgctctctggcctggtgatgtggatgccggaaacattgacggcagcatccatcgctgggcaaaaaaaagaagttatcgacaacgaccgcgaagactggaagcgtatctcggcatcaatgcgcaaacagcctga

SEQ ID NO: 18538 - DNA, 300 bp, Escherichia coli
gtgaagcgatgggttataggtgcattctgttttctaattagtggtcttgcacaatcgcaagataaggatctgaaatttgctaacgacatgttagttacagctaaagttgctggtatgtgtggaacatttaaacaaatgtttgcttttcaagaagcaacccagatgccaggcggagatgaatttattgaacgttttttgaatacggaaatttctcgcctaggaatgtcacttcaagagttcatgaagttgtgcacagattctatagagtcatacaataaattaaaaaggatgtcagaatag

SEQ ID NO: 18539 - DNA, 2169 bp, Escherichia coli
atggcaaccgatgtaggtttacccgaaggatttgttctcgataatcagcctgataactcacagcttcctgatggttttgtgcttgattcccaaccagaacagcagcaatctcctttggtttcaccagaggaaaattcccgacaggaaaatgttgttaataatgctaacggtttcgaccgttttatgtatggcgttctcagtggattgatggatgttggtaaaggtgttggcctgtttcaggatatgacaccagaagagcaagccgcaattcagtctctacagcagaagttagcggcaaaaccatcaaccgcacaagatgttggtgagttcgttggacaagcagcgccatttgttagtggcggtgggattatttctcaggttcccaaaggggcggcaaggctggctgccgccgcagggcttggtgcggttgaaggtggtgttgttgctaacggaaccggtggcaatgtaactacaggggcgactataggtgctgccgctggtccaattgctgaattggcatctccagtgattagtaaagcagtcagtgcggttacgaagaggtttaggcctccatcggcagaaatgtctcaggcatctgaacttagtggaatggcgaaggttgcaacgaaagctacagatgtgaatccaataacaggaaacagatctggtttgaatgctctcgcggaagctgtttcaccagatgattctgtgctacaggccgcccgcaatcttgggatggaggatgccttaactcccggcatgtactccagcaacccttcttaccgcgcgtttgaaaatgctttagctgcaaccccaggtaataaactgttccacgcacagagagaggccattagtaggcttggagagcaggcagataaatttattaatgattttggtgggagcgttgataaggactttatcaatcaaaaggtaaaaagctcttatgaggagttaagatcaaaactgaagcgccaagaagacactctatacaatcaaattagagcaaaaattccaaccagagctaccgtagatacctcccataccactaacgccattgaggatattgcagatgatgtcggtgggctagaaaaactaaaatctctatatcctcaactgtcaaagaccttggaacaaatagacccaaacaccgccccgacttatggtcttcttgatgcagttcgacggcaggttggaagggctcttggcaaagagatggataaagggccatatagcggcatcgacgctcggcaccttggaattcttgaaagcgcactgatacaagatcaaggagccgctgctgccaaatatggtgcagaggatacatggaatttagctagagagatcgggagaaagagattcgcagtacaggcagccgccattcaaaatcttggcagagacctggataaaggaatagtgccgcaattgcagcaagctatcgtcgacatgtctcaaggaaagggcggtgacttccgtcgcctagtttcaaatcttcctgatgacatggtgcaaccagctgttgccacagcaatgaatagggctttcactacgttcgctaaatctcccgggcagtcactcggtgttcctggatttgttaagtggtatggaggtctatcaagaaacaaatcaaatatgcaggcattgagccgggcaattggctatccggctacgcgtaggttgagaaacatctatgaggtggcttctggcatgcaaagggtgggcagcgagaaggtgtattcctcctctcaaattgaccggatgatgaatcagttcgcaggagagaagggaatgcttgggcgtatatatggaataggaaaagacgtggctaaagcagaggggctaaccactgccatcggagcgccgggagccggtacggcaggagtactctttagcctactccgttctggtaaaaactcaagaatggctgccgctgatgaattaatagcatctccggcttttaaaaatctctcaaaaaggattgccgcaggtcacgccagcactccagcctctaggaaatcggtggatgcttcaatgaagaaagtgaaaccatatagggattgggtaaatacgctatcagcggacgagaagaaaaatctagcccgcgttggtattgtcgcttttctcagtagtaacgattctttgcccacagagcaacaagcagggcaacaataa

SEQ ID NO: 18540 - DNA, 885 bp, Escherichia coli
atggatttatatcactttacagcaattcctatgttgcattccatacttgcatctgaaggcctgagagaaggatatctaacgttgtatgatggaacaattttgtataataaagtatggttaacgacatctccattaccatatggtcacggattatgtaacggtactgaaaaattaagtgaatcagaaaaatcatttatgcgaagagtcggtaatatatctgagtctacgtctataaatggaacacataataaaaagttaataaggttaaaaatagatactgaatggataaaaaagcagcctggattttgctcatataaaaagctaatgcgtgaccttggacaacctaaagcttatgttaagtacgtaggtgcaatgggggttgagggggcaagggggatgaccgatgagcagataagtaaaattatgcgaaaaggtaacacaaaagaagatacctggtatatctttaatggggtcatcccaccttcaaaaatagtctctgttgaatatatggaaactaaagataaatatataccatatgattttgaattgcatggaaggggatatatagaaaactccggcatttatccgatttcgagtttattattatctgatctgaatcatacaatgcgaaatattacatttttaccaggttctgtcatagcgttttgtcataaagcaaattcagaagaaaatattttattcagacatgtattattcacatgttcaatctccttgagaaatttttcagtactgatagcaacaggtgatgagacatctttctatattcatctggatgtattaaaaagttggactcaaaaaaacagtaaagtactatgccaactttttgaaaaagcacgtgaaagttaccacagatactatggttag

SEQ ID NO: 18541 - DNA, 153 bp, Escherichia coli
atgcacctgaaggtggatgatgaggttgttttttgtatgcggtgctgtttttttgttcgccgacaggcttcaggcgtgcagatgcctccggtgcgggccggattattcagaggaggtcactttcagggggaagctgtggccagccggctgtaa

SEQ ID NO: 18542 - DNA, 159 bp, Escherichia coli
atggtgataattatgctgatggagactaaataccaagaaatccggtgcgttctgtggcaggttgagacctcacaggaaaaacgacaacaactcccgtcgacgttatgcgattcaatccggatgctctttgtaccaccaagcgccttcctcgctaactaa

SEQ ID NO: 18543 - DNA, 828 bp, Escherichia coli
gtgttcgaaagcaaccgttggctgctgtatgccgcccgaaaacgggggctggaacccggtatcttctgcgccatccacacatatggccgtcgtctcaactggcatccgcatgtacatgtgtcagtaacctgcggggggctgaataagcacggtcagtggaaaaagctgagcttcctgaaagacgcaatgcgttcgcggtggatgtggaatatacggcagttgcttctgaaagcgtggtcagaggggatggcgatgccggagtcgttgtcacatatcacgacggaatcacagtggagaagcctggtgctgaaagccggcggaaaatactggcatgtgtacatgtcgaagaagacggccggcgggcggaatacggcacgctacctgggtcgttatctgaagaagccaccaatagcggcttcccggctggcacattacaacggaggggcgagcctgagcttccgttacctggaccacaaaacgggagagacagcgacggaaacgctgacgcagcgtgagctggtcgcgaggatgaaacagcacatcccggagaagttttttaagatggtgaggtacttcgggttccttgccaaccgggggtgtggagagaagctgccgcaggtgtaccgagctctggggatggataaaccggaaccggtggcgaaagtgtgctatgcacaaatggtgaaacagttcctgagtcgtgacccgttcgaatgcgtgctgtgtggcggccggatggtataccgccgggcccttgcggggctgaatgtatcagggctgaagaaaaacgcgcgggatatcagtctgctgaggtatgtgccggcctga

SEQ ID NO: 18544 - DNA, 621 bp, Escherichia coli
atggcggttatgggacttgccggtgttctccggggtaaaaaggtccgcacgaccatcagccggaaagccgttgccgcaggcgaccgcgtaaaccgtcagttcgtggcagaacgacctgaccagctgtgggtggctgattttacttacgtcagcacatggcggggcttcgtctatgtggcgttcatcattgatgtgtttgccggatacatcgtggggtggcgggcctcatcgtccatggaaacgacattcgtgctggatgcactggagcaggcgttatgggcccgtcgaccgtccggcacggtccatcacagtgataaaggttctcagtatgtatcgctggcctacacacagcggcttaaggaagccggattactggcatcaacaggaagtacaggcgactcgtatgacaacgcgatggcggagagcatcaatggtctttacaaagcggaggtaatacaccgtaagagctggaaaaaccgtgcagaagtggaactggccacactcacgtgggtggactggtataacaatcgacgattgctgggaaggctgggccatactcctccggcagaagcagaaaaagcttattatgcttccatcggaaacaatgatctggcagcctga

SEQ ID NO: 18545 - DNA, 1149 bp, Escherichia coli
gtgggaaaggaactggatgatatctgcaccagctgtccgtatatcgatgctgtaaaacggcacaaacaacaggtcggtgccatagaggaatatacaaagtggttaaaaaaagaaccacgggcatcttatttttttctgttccagctgtatacccgcattcacaatacatttttctcccaaaagcaacaactcccgttcactcccggtggcactcactgcccggaacctgatgtcacccttcgggacttaacgctttcccctggctaccacagtgattatgcccctcaacccattccggagatggacagttctgctgttgttcccccaactaatgaaaacacctcgcctccggaagatactcccgacaacactccggccggaggcaataccggacaagcggaaaagaccagaaacgcaggactcacacccattcctgaaaaacgttcaggaatgcccccggaacatctgcggtttgccacagggtttccaccgcaaccgaagattgccggtcccaaaggaaagccgatgcgcaccgtgcatccggataaaatctatcgtgaaattatatggttctgctccggttacctgcggaaatccggaccagaggctacgaggacgatcatcaactcaatattctgtgaatgggccagcatcttcaatgattactcctcccccttttcgtgggtggacagcagggacagtgaacagtgtgactggttatggaacgccatgcaggtccggtgtgtgggaaccccgctgaatccccttaccccggagcagaaatactggttcgcctgcgccacgtttgataactgggaaggctggaatgagcaacaggtacagtttttactgaaaagtaatcccagacgaaacagagcgaagtttacgataagtcccttcccggcactcagggttaaacagcataaagctgttcttcttgatgagctgaaaagtgcccgggagcaacaaaaaaggcgtgatgagcgtgctgatggttccgtcccgctgaaactgtccggaaaaatccacaaacagcttgaaagtattgcccgaagtcgtggtgtccccccaaaaaaaatgctgaatgaaatgattgagcaggcgcacctggattttgtggcaaatgagcagcataagacccggagttaa

SEQ ID NO: 18546 - DNA, 1119 bp, Escherichia coli
gtggataggttgtacgaactgggaaagagatttgatagattattatacatgagtattgttgttgttatttttagtttcctcacctgctctttattaattacattaagcagccaaaacctatttgctttaataacctcatacaaagatataaaacaacaaattgaaacaaaaagaagaaaaatagaatttatcgaaacacaaatttcagctgttaatgaaagcgtatctgatattctagactttcgaaaaagaataaataaatcagagatggacacagtaagatataaatcggaaatagaaaatgaattcttttccattagaaaaaaaatgataaatgagggattgcgtgaaatagaccttgatgaggtgagttcaattaatgagttaaaatactttatgtacgatgtgttgaaaaaagagattgaaaaatcaagtgtgggctatattgtaagggataaaatagaatcggcccttcctgaaaaagataaaatcgcaaactatcatgatgcaatgaactggttggatggaaaaataaaagatgagagtaattcaaagatagagatagtcaacatagaatcaaccttaattatcccatttaaaataggtgacatggcatctagtgtatcattgataagtatagccaaaatagctagtcatgctatgcctgtattcatggttttttggttgggttcactgttcgtcacgcggagaatagagatgatgaatcttatgaaaacaaaggatatatcattgatatacccacatattcttaatatcttctcagtggacacaacaaaatctcaagatttcaacctttatctcttaggcgatgaaaagataagaaaacaaataaacgcctctatatttttaattaaagcaataaaaggttttttatttatatcattagcactcgcaatgtgtgggccattgtattatggcgaatttatttacctggtaaactacaacacatcctcgctgccactattcattgtttcattttcttgcatgctaataaatatattccaagcagttgggtatgtttactttgagtcaatttcatctaatgttatttacagaataaaaaatggtgtaattgataggtatgaacttaatttttaa

SEQ ID NO: 18547 - DNA, 462 bp, Escherichia coli; identical to SEQ ID NO: 13343

SEQ ID NO: 18548 - DNA, 3498 bp, Escherichia coli
atgaataagaatatacgaattttacagtttctggtcagtatactttattctgtgcagtctcatttttctggtgcgcaaacaatacaactgaatggtaatggtatacctgaaagtataaccaggagtattacaggtgttgatggaaacgcggcgcttaatatcagcgtgccgtataaaacaagttatactcaaaatatactatctgttgaaagcagtattaacatcaaaggaggaacaagcaatacatcaatcggtggtgcaggtgtctacggtgaaaactttacgctaaataataatggtagtgtttggggaggagatggatataatggtggagttgctgttagtggcaacaaaatatctataaacaattacagaaatgtatatgggggtaatggtcttggtggctcaggaagtagcggaggtgcagggttaagcggggatgatattatagttgataattacagaagtatatacggaggtgatgatctaggtgggacaggtggttccggtgtaaccgggagcaatattacagtgcataattccggaggaatatggggtggtaatggcgtaaacggtggtgatggtattaatggtagtaatcttttcattactaacgacaacatgatatctggaggatatggaataaaacaagggggagatgctatttctggaaatcaaatcactttgaataataacggtattgttcaggggggatatggccccgacggtagttgctctgtttatggagaagatatccatattaataatcatggtaatatttcaggctcatataatagccaaaaagatgcttataacacatcaataattttttctgctgggtataattcattagatatttattcagattctgtgattaatggtgatattaaactagctagtatacctgttaatggtacaaatgaattaattattaaaaacatcaataacgcaacagcaattaatggtgggctaatgattgggaatggctcgtctgtttatctgtcaggcaagaacatcatttttaacggaaatataagtattgatgaagacgcatctatgaacctgtctgcaggaaatgctaatgttcacgcaaatactattacattaaaaagtgattcatggcttaatatagacacatcaattaagaactggactcaggactattacacattattgtcgtcagacacaggtatctcgatcgctgataatagtcacattgtacaatacaatgtattactgacagaaggtgctgaaagttatgtttatacgtctttaaatgacgacgataacaaactgatatccatgctgagatggaataatacaaaagggatgggatatggaacctttaatatagaaaaagatgccactctgaacataggagtttctctttccgataatctttcacctttattatatgatggctgggacggcaaaagtctgacaaaatcaggtaatggtactcttatactttctgcaacaaacaactatacaggaaatacagaggttaaatctggcgtattaattcttgctgcacctgatgctcttggtcggactgagtatttatatttatcccgtggcgcagaactggatatgaatgggtatcctcagacaataagcaaactactgacggctgcaggctctgtgctgaacattcatggcggaagcctgatactgaataatggaggagaatctgcaggtactattgcaggggatggttctctgaacataaatgggggaatgcttgatataacgggtaataatcgtaatttttccggtgtttttaccgtgaataagggggctcagttggctgtatccacggctgataatctggggacagcctttgttgataactatggcacattaactctgaacagtacatcagcatggcagcttaccaacaatatcagtggttatggtaatgttcgcaagacgggagcaggtgcactgaacattagcgataacgcaaaatggaccgggatgacagatattattcaggggacattgattctgggtaacgcagattcaccggtgatgctcggcagtaaccaggtcattgttgaagagcagggcaaactctccgggtttgggggcgttgcaggaaatctgagcaatagtggtatagtcgatctcactacatatatgccgggtaatatactgactgtcggagggaattacactggcagaaatggacttattctcctccagacagaaacaggtggtgacaattcgaaaacagatcgtctggtgattaaaggtaatgccagtggccgtacccgtgtcgctgttactcaggccggtggtactggtgcagagacacttaatgggattgaagtgattcacgtcagtggcaatgctgataatgctgaattcattcagacggaacgtattacagccggagcttatgattacatactgaaacgtggtcaggggattaacagcactaactggtatctgattagcagaaaagacattcctgtaccacaacctgaagctgtaccggaaaaccatgataataatttgcgtcctgaggcaggtagctatgttgccagtattgctgctgcaaataatctgtttgtaacgaatctgtatgaacgacagggacaggagttgtatatcagccacatgacaggagaagaaaatgaagcaggtatctggatgtataataaaggaaaacataatcgctggcgtgacaacagtagtcagctgagaacccgggggaatagctacgttgtgttaatagggggagatatagctcagtggagcctgaatggtaccgatcgctggcatacaggtatgatggctggctatggtcataatcataacagtacgaatgccctgagcaccggataccattcggaaggaagaatgaatggatacactgcgggtctttatgcaacatggtatgccaatgatgaaacacacaatggttcttatcttgatagctggctgcaatacagctggtttgataatcatataaatggagaacggctgcctgctgagtcatggaagtcaaaagggtttacggtatctctggaagcaggatattcatggaaggctggagagtttaccgacaattacaagggaagtcatgaatggtatgttcagccgcagcttcaggttgtccggatgaatgtaaaatcagacagacatcgtgaaagtaacggaaccagtattgaaaataccggtaacggaaatattctcactcgcctgggagcgagaacatggtttgtcagtaaaaacggtaagaattcacggtatgcagttcctctcaggccatttgtagaagtaaactggctgcacaatagtcgtgttttcggcaccagtatgaatggtgtaagtatttaccaggatggggcgcataatatcggagaaataaatggtggtgttgtgggagtgataactccagaagtggtattgcgggctgatgcaggcattcaacttggagagcatggataccgcaatgcatctgctatgttcggcgtggaatatcgtttctga

SEQ ID NO: 18549 - DNA, 309 bp, Escherichia coli
atgcttaatagattatcattagtcgtggtattggcttacccaatgcttgcaatatcggcagattttaaaacacaatcacgtaattatagtatcgttttaggtgcgacaaggatcgtcttttcttcagggaagagttcatacgatttgccagtagaaaaccagcaggattatcctgttcttgttgaaacaaaaataatggatgaaaactctgaagcaaggtcctcaagctacttggcaacgcctccattatttaggcttgatggtggtgaaaaaaataccgtctctattattaagagcctatcccaatag

SEQ ID NO: 18550 - DNA, 306 bp, Escherichia coli
atggaatgtgatataacttcaaaaacatcattattattttcgaggctaaggtgcttaaaatcaaatagaacagagataaaaccaggttcaatatgtgatgagcagtttgaattattggtagaattatctcctgtgtacagtaaaaaatcgataaaagccatgagagactatcttgtgttaggaaaaaaaagaaaggaggtttgcgaacagcacaacgtgagcaatggctatctaagcataagtcttggaaagatttactatactcataatctagtacattacttaattcaattttataacaagtga

SEQ ID NO: 18551 - DNA, 1254 bp, Escherichia coli
gtgagccgtactacaactgttgatggcgctccggcaagcgacactgacaagcaaagcatttctcagccaaatcaatttattaaacgcggtacgccgcaatttatgcgcgtcaccctggcgctgttctctgccggactggcaaccttcgcacttctctattgtgtgcaacctatccttccggtgctttcacaagagtttggcttaacgcccgcgaacagtagtatttcactgtccatttccacggcgatgttggctatcggtttgctgtttactggcccgttatccgatgccattggtcgcaaaccagtgatggtcacggcgctactgttggcctccatttgtacgttactttcgacaatgatgcccagctggtacggcattttgattatgcgcgccttgattgggctttcgttaagtggcgtagcagctgttggcatgacttatcttagcgaggaaatccaccccagtttcgtggccttttcaatggggttgtatatcagcggcaactcaattggcggcatgagcggacgcttaattagcggtgtcttcacggactttttcaactggcgaattgctctggcggcaatcggttgtttcgcgctggcctcggcgttgatgttctggaaaatcctccctgaatcacgccattttcgcccgacttcgctgcgccctaagacgttatttatcaactttcgtctgcactggcgtgaccggggattaccgttattgttcgcagaaggctttttgctgatggggtcgttcgtcacgctgtttaattacatcggctatcggttgatgctttccccctggcatgtcagtcaggccgtggttggcttattatcgctggcctatttgaccggtacatggagctcacccaaagccggaaccatgaccacgcgctatgggcgcggtccggtgatgttgttttcgacgggggttatgctgtttggtttactgatgaccttatttagctcgctatggctgatctttgccggaatgttactcttctcagccggattcttcgcagcccactcagtagccagcagctggatcggcccccgcgcaaaacgcgctaaaggccaggcctcctcgctgtatctgttcagttactatctggggtcgagtattgccgggacgctgggtggtgttttctggcataactatggctggaacggcgtcggcgcatttattgctctgatgctggtcattgctctgctggtcgggacgcgtttgcatcgtcgtctgcacgcctga

SEQ ID NO: 18552 - DNA, 300 bp, Escherichia coli
atgggtaactatcatatcggggatggtgaatgtagatttagagtcgtgtgttcttcaccagatgtatgtgaagtaggaggttacaaggttccttttgacagttaccagactttagatagtgaaagacagtacagttcaacggtatgggcgcgtggatgcagagctttaaatgttggttcagtgattgctggaactcaaagtaatgccggtaaaggtgtcatatccggtacatctcaaggaacgggtgactgtgttattttaacgggaagtccgggtgatgctgccaacttactgatttag

SEQ ID NO: 18553 - DNA, 399 bp, Escherichia coli
gtggcgggcaacaagtggcagatcagtgatggactctgggagaaaatggctccactcatcccggagcataaaactcaacacccgctgggtacgcaccgcaagcgggtttataatcgcgctgcaatgaacgccattttcttcgtactcaggacgggctgccaatggaatgcgctgaatgccaccggtatatgctcgtcaagctctgctcatcgccgatttcaggagtggcgagatgccggagtatttgaacgcttctggcaaaatgggttgcttgcttgcgaacagttggactctattgactggtcgtggctgtcgatggatggttgtataaccaaatcaccgctggcaggctcaaaaaaacaggcaggaaccctacagaccgggggaaacagggcgtaa

SEQ ID NO: 18554 - DNA, 267 bp, Escherichia coli
atggacaaagggtatgaagcggaatggctggaatcgtatctgaaaagtcgtctctatgaacctcatatccagtcacgaaaggatgagtcagaggccatcaaatacacggattttaaggctcaccgctgggttgtagagagaacacacagttggatgaatcgctaccgccgtgtcctgactcgttgggagaagaaggtcgagaattatgaggcgatgctgcattttgcctgtggtgtcattgtctggaacaaaaccctattgggatag

SEQ ID NO: 18555 - DNA, 309 bp, Escherichia coli
gtgatcagccgctggcgcatcgagcagtgcagcgaactgagcgcggtgagtgcctcctttgtactgtccacgccgacggaaacggatggcgctgtttttccggggcgtatcatgctggccaacacctgcacctggacctatcgcggtgatgagtgcggttatcacggtccggcagtcgcggatgaatatgaccagccgacgtccgatatcacgaaggataaatgcagcaaatgcctgagcggctgtaagtttcgcaataacgtcggcaactttggcggcttcctttccattaacaaactttcgcagtaa

SEQ ID NO: 18556 - DNA, 315 bp, Escherichia coli
atgcagtcgctggtcctgccgccaccgacacgccaggcgctggcacaggcggcactgacttaccgttatggtgacgaacatcagcccgtcaccaccgccgacattctgacgccacgacgccgggaggattacggaaaggacctgtggagtgcttatcagaccatccaggagaatatgctgaaaggggggatttccggtcgcagtgccagaggaaaacgtatccacacccgtgccattcacagcatcgacaccgatattaagctcaaccgcgcattgtgggtaatggcagaaacgctactggagagcctgcgctga

SEQ ID NO: 18557 - DNA, 141 bp, Escherichia coli; identical to SEQ ID NO: 6191

SEQ ID NO: 18558 - DNA, 840 bp, Escherichia coli
atgaaagacaatccgctgatttcaatctatatgccgacctggaaccgccaacaactggcgattcgggcgataaaatcggtcctgcgccaggactacaacaactgggagatgattatcgtggatgattgctccacctcctgggaacaactacaacagtacgtcaccgccctcaacgatccgcgcatcacttacattcacaacgacattaacagcggagcgtgcgcggtacgtaaccaggcgattatgctggcgcaaggggaatacatcaccgggatcgatgacgacgatgaatggatacccaaccgcctgagcgtcttcctcgcccataaacagcaactggtcacacacgcctttttgtacgctaacgactacgtttgccagggcgaagtttattcccaacctgcaagcttgccgctgtatcccaaatcgccgtattcacgccgcctgttttacaaacgcaatatcattggcaatcaggtctttacctgggcgtggcgtttcaaagagtgcttgttcgataccgaactgaaagcggcacaggattacgacatcttcctgcggatggtggtggagtacggcgaaccgtggaaagtggaagaggcgacgcagatcctgcatatcaatcacggcgaaatgcagatcacctcgtcaccgaaaaaattctccggatacttccacttttaccgcaagcacaaagacaaattcgaccgcgccagcaaaaaatatcagctgtttaccctctaccagatccgcaataaacgcatgacctggcgcactttgctgacgctgctgtcggtgcgtaacggcaaacgtctggctgatggtattcgggggcgctaa

SEQ ID NO: 18559 - DNA, 426 bp, Escherichia coli
atgtcattcaacttatgctggagaaagccaaacctcccagagggggatctgcaactgctggttcaaggacatgcttctggcgtgttacgccttacacaggctggctatactgacaatggtaaagttattgatcaaacggaatatttccggtatcaggtattctctggattgctatggtatgaaattgatggaaaggaaatggctgaggcaaccttccatttacaaataaaaggtacatcggtaggtacgtttaagcttaaattaagtcataaaccttcatgggaagcaggccagaataattatacaaccggattgcactgggatgacgccaaatatttgattcagcgtcgtgatttagtagggtgtgctctcgaactatacaaggccatcgatgaaaacttcgattttttaatttcaatacattga

SEQ ID NO: 18560 - DNA, 1782 bp, Escherichia coli
gtgggcgatattgtttacctgagaataatcggtgagaagcagggcgatatttcttcaggctgtgggacgtatgcgtcggttggtaatcgctggcaggttggccatgaagatgaaatttttgcctttgcactcaccaacgccattaccagtactggtaaaggcgttaatctacaggggctacaattttgcaaactcattgataaaagctcaccgctactgtctaatgccatcaatcagaatgagcggttatttattgaaatcgatttgtatcgtataaataaaagcgggcgctgggaacggtattattatattcagctaagaaatgcttcattaactgctattcatgtaaacatttctgacaataatcttcctaccgaatgtgtaaatgttaattatgactacatattatgcaaacatctaatagccaatacggaatttgactggttggccttttctgctggctataatagcttatttattccacctaaaaacccacctgccagtaatcttaaccctgagccgctaccagttgttaaccttccactctctccaccagcggttaaaccggtctatgccaaatcctgtctgaaggagaagggatgtacagatgccggaacggcagaagaacccgctgaaaacttcggtcaagtagcgattttcgctcagccagtggttgatgactgctgtggataccaccatcccgaggctaacgttatcggggaacccgcagaagctcaaaccatgctactgtttccgggtagtgtgttggcgactcaaatatggggaaaatggtcgctcagtggcgtactcagtgcaacccgcggctcttacatcggtgcgttggcatctgctctgtatattccctctgcgggtgagggcagtgctcgtgtgcctggacgtgatgagttctggtatgaggaagaactgcgccagaaagcgcttgcaggcagtaccgccactacccgggtgcgttttttctggggaactgacattcacagcaagccccaggtatatggtgttcatacgggtgaaggtacgccgtatgaaaacgtccgcgtggcgaacatgcagtggaacgagcagacgcagcgttatgaatttacccccgctcacgatgtcgatggccccctgattacctggacgccggaaaatccggaacatgggaatgttccgggccataccggtaacgacaggccgccgctggatcagcccaccattctggtgacgccgattccggacggtacagatacctataccacgccgccattcccggttcctgatccgaaagaattcaacgattatattctggtttttccggcgggatccggtattaagcctatctatgtttacctgaaggaggatccgcgaaagctgcctggtgttgtaacagggcacggcgtcccgctttcaccaggaactcgctggctggatatgtcggtatccaataacggcaacggcgcaccaatcccggcgcatattgctgataaattgcgcggacgggagtttaaaacctttgatgagtttcgcgaggcgctgtggctggaggtgagtcaggatccggagttgatagcgcagttttcaagtggtaaccaaacacgtataaaacaaggattgaccgcaaaagcacctattgacggttggcattatggccctaaagatatagttaaaaaattccagatacatcatcgtgttgcaattgaatatggcggcagcgtatacgatattgataacttacgaattgttacccccagactacacgatgagattcactacaggagataa

SEQ ID NO: 18561 - DNA, 249 bp, Escherichia coli
atgtttaaacagaacgaaaaatctatcgctcaaattgctgagtatatcccgcgtgcgtgccggggtatgcagttgcaggaagccaaagcgcgcctggagaaaaaaattgcgctctatattgatgacggctgtgatgccgccgttcttaacgcggcgttcgcaccagctcttaactgtcatacgcgagagtcttttttttcgtgcatcgcagcgcagatccgtaaaggaggcaccagtgagcgagattga

SEQ ID NO: 18562 - DNA, 1872 bp, Escherichia coli
gtggtacagcaacgagagttgcgccagtatgacgaaagtgaagaatccttcctggtgacgcttgccacccagatggcagctattctttctcagtcgcagttgactgccttgtttgggcaatatcgccagacgcgaatccgtgcattaccggcagcacctggtgtggcgattgccgaaggctggcaggatgccacgttacctttaatggaacaggtgtatcaggcatcaacgctggatccggctctggaacgcgaacgactgaccggggcgttggaagaggcggctaacgagtttcgccgctatagcaaacgctttgctgccggtgcacaaaaagaaacggcggctattttcgatctttactcacacctgctttcggatacccggctgcgtcgcgaattgtttgccgaggttgataaaggctcggtggcagagtgggcggtaaaaacggtcattgaaaaatttgccgaacagtttgccgcgctaagcgataactatctcaaagagcgggctggcgatttacgtgcgctgggtcagcgattgctgtttcatcttgatgacgctaatcaagggccgaacgcctggccggaacgtttcattctggtggcagatgaactgtcagcgacaacgcttgctgagctgccccaggatcgcttagtcggtgttgtcgtgcgcgatggcgctgccaactcccatgctgcgatcatggtacgtgcgctggggatacctaccgtgatgggcgcggatattcagccttcggtactgcatcgtcggacgctgatcgtcgatggttatcgcggtgaattgctggtcgatccggaaccggtactgctgcaagaatatcagcggctaattagtgaagagatcgagcttagccgtctggcggaagatgacgtcaatttacccgcccagttaaaaagcggcgaacgcattaaagtcatgctcaatgccggtttaagcccggaacatgaagaaaaactgggcagccgtattgatggcataggactttatcgcactgaaatcccattcatgctgcaaagtggttttccgtcggaagaagaacaggtggcgcagtatcaggggatgctgcaaatgtttaatgataaacccgtcaccttgcgtacgctggatgtcggagcagataagcagctgccttacatgccgatcagcgaagagaatccatgcctgggttggcgtgggattcgcattacgctcgatcagccggagatcttcttgatccaggtgcgggcgatgctgcgtgctaatgccgctacgggcaacctgaatattctgttgccgatggtcacaagcctcgatgaagttgacgaagcacgccgcctgattgaacgtgccggacgtgaagtcgaggagatgatcggttacgaaattcccaaaccacgtatcggcatcatgctggaagtgccgtcaatggtatttatgctgccgcatctggcaaagcgggtcgatttcatctctgttggcaccaacgatctgacgcaatacatcctggccgttgatcgcaacaatacccgggtggcgaacatttatgacagtcttcatcctgcaatgttacgagctctggcgatgatcgcccgggaagcggaaatacatggaatcgatctccgtttgtgcggtgaaatggcgggcgatcccatgtgcgtggcaatcctcattgggcttgggtatcgccatctgtctatgaacggacgttctgtagcgcgcgtaaaatacctgctgcggcgcattgattttgctgaagcagaaaatcttgcgcagcgtagtctggaagcgcaactggcgaccgaagttcgccatcaggttgctgcctttatggagcgtcgcggcatgggcgggctgattcgcggggggttatag

SEQ ID NO: 18563 - DNA, 396 bp, Escherichia coli
ttgaggcaaagcagcgatacggtgctccccgccttgctgacgaaatgctggagttcaatatttaaaaccattgctgccagcctgcgtcgtcaggggctgcgggcgaaagccagccggaagttcagcccggtcagctaccgtgcacatggcctgcccgtattggagaatctgctggagcaggacttcagcgccagcggcccgaaccagaagtgggcgggtgacatcacgtacttgcgtaccgatgagggctggttgtatctcgcagtagtcatcgacctgtggtcacgcgccgttattggctggtcgatgtcaccgcgaatgacagcacaactggcctgtgatgcactgcaaatggcgttgtggcggagaagacgcccggaatgtcagcgccagtga

SEQ ID NO: 18564 - DNA, 927 bp, Escherichia coli; identical to SEQ ID NO: 7921

SEQ ID NO: 18565 - DNA, 1347 bp, Escherichia coli
ttgacaatttctcccctcgccagtcttgatgagccggacagtctgaaacgactgagcaaaatgatcagtgatctgctccctccggtggatttaacggagttgctgctcgaaattaacgcccataccggatttgctgatgagtttttccatgccagtgaagccagtgccagagttgatgatctgcccgtcagcatcagcgccgtgctgatggctgaagcctgcaatatcggtctggaaccactgatcagatcaaatgttcctgcactgacccgacaccggctgaactggacaaaagcgaactatctgcgggctgaaactatcaccagcgctaatgccagactggttgattttcaggcaacgctgccactggcacagatatggggtggaggagaagtggcatctgcagatggaatgcgctttgttacgccagtcagaacaatcaatgccggaccgaaccgcaaatactttggtaataacagagggatcacctggtacaactttgtgtccgatcagtattccggctttcatggcatcgttataccggggacgctgagggactctatctttgtgctggaaggccttctggaacaggagaccgggctgaatccaaccgaaattatgaccgatacggcaggtgccagcgatcttgtctttggccttttctggctgctgggataccagttttctccacgcctggctgatgccggtgcttcggttttctggcgaatggaccatgatgccgactatggcgtgctgaatgatattgccagagggcaatcagatccccgaaaaatagtccttcagtgggacgaaatgatccggaccgcaggctccctgaagctgggcaaagtacaggcctcagtgctggtccgttcattgctgaaaagtgaacgtccctccggactgactcaggcaatcattgaagtggggcgcatcaacaaaacgctgtatctgcttaattatattgatgatgaagattaccgccggcgcattctgacccagcttaatcggggagaaagccgtcatgcagttgccagagccatctgtcacggtcaaaaaggtgagataagaaaacgatataccgacggtcaggaagatcagttgggagctctggggctggtcactaacgccgtcgtgttatggaacactatttatatgcaggcagctctggatcatctccgggcgcagggtgaaacactgaatgatgaagatatcgcacgcctctccccgctttgccacggacatatcaatatgctcggccattattccttcacgctggcagaactggtgaccaaaggtcatctgagaccattaaaagaggcgtcagaggcagaaaacgttgcttaa

SEQ ID NO: 18566 - DNA, 222 bp, Escherichia coli
atgattcaaacacgtaatcaatatctgcagtttatgctggttatgctggctgcatggggcattagttggggagccagatttgtcatggagcaggccgttctgctttatggatggggtctgacgctcagtggaacgaaaactcacgttaagcaacgttttctgcctctgacgcctcttttaatggtctcagatgacctttggtcaccagttctgccagcgtga

SEQ ID NO: 18567 - DNA, 396 bp, Escherichia coli
atgaataaaaagataactggattattaataattagtctggcgtcaattttcttaattgattgcacccataaaaataaaaaagacaggtttgtatatgttatcaacaacaagtcatttcttttaacgaaagagtgtgtttcagaaattaaaatgggcactccagaaattaaagataataatttcatatttataaaactaaaagaaaaaccttattactctgaagaattcaacaaatttattgctgataacatcggaagtgatatgaaacaatacttcaatggcaagctaataggaaagagttatatggcaagtaaattgacaactgaaaatggttacagacaaatgttaccaaatcgagatattggaaaagaaattataagtgcatacactcaatag

SEQ ID NO: 18568 - DNA, 216 bp, Escherichia coli
atgacagaccgtttcttgattactccacatagcaccacacttacttacagaatcggggaaggagaggaaatcactcaggaaatccctctttatatcgtgttcgatattatttctcaggaaattgttgggatttatggttctttagaagaagcccagctaaaaaaggccgagcttgaagaaaaattaaagtctactttaagacctcgcatgagataa

SEQ ID NO: 18569 - DNA, 369 bp, Escherichia coli; identical to SEQ ID NO: 12844

SEQ ID NO: 18570 - DNA, 330 bp, Escherichia coli
atgattgatgtcttaggaccggagaaacgcagacggcgtactacacaggaaaagatcgctattgttcagcagagttttgaaccgggaatgacggtctcccttgttgcccggcaacacggtgtggcagccagccagttatttctctggcgcaagcaataccaggagggaagtcttactgctgtggccgcaggagaacaggtcgttcctgcctctgaacttgctgctgccatgaagcagattaaagaactccagcgcctgctcggcaaaaaacgatggaaaatgaactccttaaagaagccgttgaatacgggcgtgcaaaaaagtggatag

SEQ ID NO: 18571 - DNA, 618 bp, Escherichia coli
atggacacctcacttgctcatgagaatgcccgcctgcgggcactgttgcagacgcaacaggacaccatccgtcagatggcagaatacaaccgcctgctctcacagcgggtggcgacttatgcttccgaaatcaaccggctgaaggcgctggttgcgaaactacagcgtatgcagttcggtaaaagctcagaaaaacttcgtgcaaaaaccgaacggcagatacaggaagcacaggagcgaatcagtgcacttcaggaagaaatggcggaaacactgggtgagcaatatgacccggtactgccatcttccctgcgccagtcttcagcccgtaaaccgttaccagccttacttccccatgaaacccgggtcatccgaccggaagaggaatgctgcccggcctgtggtggtgacctcagtcctctggggtgtgatgtgtcagagcaactggagcttatcagcagcgcctttaaggttatcgaaacacaacgtccgaaactggcctgttgccggtgcgaccatatcgtgcaggcaccggtgccttcaaaacccattgcacgcagttatgccggagaggggcttctggcccatgttgtcaccgggaatgtcaacgacggatga

SEQ ID NO: 18572 - DNA, 2553 bp, Escherichia coli
atggaagaaagaaataataaatacgaactgtctgcgctgtatatcgctgttctttcatcattgcctttctttttttgtgcagatgttgcggccagaagctacacattcgagccatctatgttgaatgtagatgggaatgatattgatctttctatatttgaaagtggcgctcaattaccgggtacttactatgttgatattatgcttaatggtaagttggtagatacaaaggaaatggagttttctcgtgagcgtaataaagacggagagtttgttctttcttcatgtcttactcagagtatgttgaatcgttatggggttaaggtaggagactacccagaactttttgttaatagttctaatggtaaggtatgtggtgatttgtctgttattcctggtgcattctcatattttgacttttacaatcaacaactgaatttaagtataccgaatgtagcactatatccaaaatataaaggcattgcatcagaagaactttgggataatggaattaatgcatttctgatgaattaccaagctaatgcacaaataaaccaatatcgtaacaaaaaaaatcgagaagtcagttcttattgggccaggatcgagcctggtatgaatattggttcttggcgcataagaaatttgacaacttttactaaagaaaatggtaattctgaaaaaagagaaagcgtttacacatatgctgaacgtggtctcacatccataaaaagcaatctgctgataggtgagtcctatactaactctgatatatttgacagcatatctttcagggggataatgctccattcagatgagagtatggttccttatagcaagtatgcttttgcacctgtaatcagaggtattgcacagtctcaggctttgattgaggttcggcagaatggttatctcattcatactgttagtgtggctccgggggcttttgaaatctctaacctacctgtcacaggctcaggtggtgatttacaagtttccgttatagaaacaaatggtaaaaaccagtctttcaccgtcccttacactacacctgtgattgctttgcgggaaaactatctgaaatatagcttggttggcggtatgtatcgttcggcttattctggtgtggacaatactgctttgattcagatgacagcaatgtatggtatgccatggaatctgacaacatttgtaggattccaaggctctgaacattacaattctgtcgcaacaggtgtcggattgtctatgggggatatgggggccgtatcgcttgatggaatatatgctcgaggacagaaagaaaaacagaataaagaagatggatattcatggagagtaagatacagtaaggtatttgatataacaggaactaattttattgctgctagtcatcagtactcttctgatggttatcagactctttctgatgtacttgatacttatggccatagcaattactcctacggaggttatgctaatcgctctatgcggaatagtctgacaataagtcagtcaatgggggaatgggggacctttagttttgggggggttagggatgaatatagaggaaatagatcgccacagaattctataaatgcgttatatagcaatagtatggaatggggaacattgtctcttaactggagtcagaataagataactgactcttcgagaagtgtgaaagataagaaagaaaatatcttcagcttttgggtgagtattcctctatacagattacttggaaatacgtctaacaatataaatgcaacaacacagatacagaaatatgataaccaaaaaatgcagtatgaatttggtatgaatggtcgtgcattcaacaggcagttgtactgggacattagtcaacgattggcaccaggaaacgaaaattataatgatgccagcagattaaaccttgagtggtatggtacttatggtcagattcgaggcggatacggttacagcgattctctcagacagatgaacgcaggaatatcaggaaccgccatcgttcacagtaatggagttacgtttggacagaaacagggtgggactattgcccttgttgaggcgcagggggtagacggagcggaagttattggatggcctggtgttaaaacagacttcagaggttatacagcattgggccatcttacaccatatcaggaaaacactgtttcattgaaccccgcttctttccctgaatatgcagaagtattgcagacagatacaaaagttatacctacaaaaggtgcggtggtttcggcaaggtttaaaacatctattggtaaaaaggcgttgtttaagttaacaagacacgatgggaaaaaagttccttttggtgctgtggtttcatcagcaacggcagatgataataagcgcgttgtagggattgtaaatgagtcaggtgaagtgtatatgtcaggcctgtctgaaaaaggacaactggatgtgaaatggaacagtcatggaagctgtaaggcagtttataagctttctgataataaaagcattgttaatatatataatgcatccttgacttgtatataa

SEQ ID NO: 18573 - DNA, 219 bp, Escherichia coli
atgaacccattcaaaggccggcattttcagcgtgacatcattctgtgggccgtacgctggtactgcaaatacggcatcagttaccgtgagctgcaggagatgctggctgaacgcggagtgaatgtcgatcactccacgatttaccgctgggttcagcgttatgcgcctgaaatggaaaaacggctgcgctggggtgatgctgccaacttactgatttag

SEQ ID NO: 18574 - DNA, 2880 bp, Escherichia coli
ttgaccgaacccgacctgtcgttgatccgtcagcgacgcggtagtcgcaatcgcctcggtttcgcggtgcagttgtgctatttgcgctatccaggctttgctctgccgactgacgcggagccgcccgcctcattgttgagcattgtcggccgccagttgcgcatcgaaccggacatctggccacagtacgcgcagcggtcagaaacccgccgagagcacctgttagaattacaaacgtggttgaaactgacgccgtttgtagcttccgattatcggcatttcgttcaccaacttaccgaacaggcccagcagacagaccggggaatcgtacttgcaaaagcaatgatcgaacagttgagacagcagcgcatcatcctgccgactgtcgatgtcatcgagcgtgtgtgcagtgaggcgctgacacgtggcacacgcaaggtttacgaagcactcactgcgtctctcaccgattttcaccgtcgcgaactggatggcttgctgactatccgtgaaggtactaagggcagcgagctgatttggttacgtcaaccgcccggcccgccaaaacccaggcatatgctggcacacctggaacggctaaagaccatccatgacctggcgttacccgacgacctagtacactccattcacaagaaccgattgctgaagcttgcccgcgaaggtggacagatgacggcacaacacctgcgagagctggagcggaaccgtcgccatgcaactttggtcgcagtgctccttgatacccgcgctacgctgatcgatgaaatcatcgacctacacgaccgtttcatgagttcgctgttcagcaaggccaggcgcaaccatgctgagcgctttcaacaatccggcaaggctatcaatgacaaggtcaggttgctctcacgcatcggtcgcgctctgctggaagccaaacagtcgggcggtgatccgttcgccgcgattgaggcgatcatcccctgggatgcgttcagcgaaagcattaccgaagcagaaacgcttgcccgaccagcagacttcgatttcctgtccctggtcggcgacggcttcccccaactccggcgttacacaccactcctgttgagtacgctgaccatgaaggccgcaccggcagcatgcgaactgctggctggcgtcgaagtgctcaaagggatgaacgaccgtcaggcgcgtaaggtgccggatgacgcgcctacgtccttcgtgcgtaagcgctgggaaaacctggtgtgcacggaagatgggcttgaccggcgcttctatgagctgtgcgttctgtctgaactgaagaactcgctgcgctccggcgacatctgggtgcagggatcgcgccagttcaaggactttgaggactacctgttgccgccaccacgattcgcagcgcagcgtgaccagcaggaactggggttagctgtcgatactgactgtgaccgtttcctggaagctcgtcttatggtgctgcaagagcaactggcaagagtcgagcgactggccgctgccaacgaactgcccgatgcagtcatcaccagctccgggcgaatcaggattacgccgctggacaatgccgtgccggatgaggccaaagagttaatgcaacaggcgtatagcttgctgccacaccttaagatcacagaactgttgctcgaagtcgatagctggaccggattcagccgccacttcaggcatctcaagagtggcgcggtagccgaagaccagcatctgctgctgacaaccatcctggccgatgccatcaacctgggcctctccaagatggcagagtcctgtcctggtgtgacctacgccaggctgacgtggttgcaggcatggtacatccgcgacgaaacctattcggcggctcttgcggatttagtcaacgctcaattccgccaccccttcgcagcctactggggcaacggcaccacatcgtcatcggacggccagaacttcaaggccggcggtcgtggccaggctgccggccaagtgaacctaaagtacggtcaggagccgggtgtgcagttctatacccacatatccgaccagtacgctccttttcacaccaaggtcatcaatgccactgtgcgagacgctacacacgtcctggacgggctgctgtatcacgaatcagacctgcgtatcgaggagcactacaccgacacggcgggcttcaccgatcacttgtttgcactgatgcacctgttgggctttcgcttcgccccgcgaatccgcgacctggccgacaaacgcctgtatgtccacggcgatgccaaacattatccgactctcgccagtctgatcggcggcaacatcaacgtgaagcatattcgcgcccattgggatgaaatcctgcggctggccgcctcgatcaaacagggcacggtgacggcctcgctgatgctcagaaagctcggcagttacccgcgccagaacggcctggcggtggccttgcgcgaactggggcgtatcgagcgcacgctgtttgcgctcgactggatgcaaaatgtcgaactgcgccgccgtgtgcaaattggcctgaacaagggcgaagcgaagaacgcgctggcccgagccgtgtttctgaaccggctcggtgaaatccgtgaccgtagttttgaaaatcagtgctaccgcgcgagcggtctcaacttagtggtggcggcaatcattctgtggaacacagtctacctagaacgggcggtcaaagcgctgcgtgacacgggcaagaacattgacgagcgattattatcgcatctttcgccattgggctgggagcacatcaatcttaccggtgactacatctggcaccagaacaagcaggttgagcaaggcaagttccgaccattacgaatgcctggtgaggcttag

SEQ ID NO: 18575 - DNA, 552 bp, Escherichia coli
atgcgtaaatttttactcgtggcgggtcttgctgctcttgtatcgggatgcggtgaaaaaggggattttgagaaagcgatcaacgcaaaaatatcacaatcaaagctgtgctactccctgcaggacaacgacattgtatttaataaaggttttccgattaaggttaaccgtggctaccgttcagcggggtatagtgccagtgatgaaatattgaaaggtctggctaatcaggggctgcttgatgtttctcaacaagctaatggtttcagtagtgtcgatgttctggaagtaacagacaaaggccaagcggttgagttttgggatcgtaaagatggtgcctgtgttggtcatcgtgcggttgctgagataaaggaatggactgaaccgggaaacggtaatcagaaaattgttcgcgtgtcttatacatggacgttggcggatgttcctgcatgggtggacaaaaaagcgttctccagcgtcaagggtatgaatgaacctgaagagagcatgattaatcttgttaaaaccagcaatggctggaaagcgatctaa

SEQ ID NO: 18576 - DNA, 420 bp, Escherichia coli
atgacaacgaaaaactacaccgcatttgttagtcactcatgggattatgataagcaattgaaaaatttgaaaagtctcattgaaaaaaatagtacaattactatcgattactctgaagttactgtagataatcgcattaattcagagcaaagagattatatccgaggcgtcctgaagaaaagaattatttcttccgatgtttttctggttatggctggaatgtatacgtcatacagtgattggatgaagtgggaaattgaaacagctaaaaagaataacattcctgtaatcgctgtgaaacctaggggggcagaacgcatccctgtaataattcaagagaatgctgatgttattgtaggctggaactcaaattcaattgtaaataatattatctccgcaattgaaaatagttcagtttaa

SEQ ID NO: 18577 - DNA, 513 bp, Escherichia coli; identical to SEQ ID NO: 8762

SEQ ID NO: 18578 - DNA, 1725 bp, Escherichia coli
gtggcacgcaacgctgaagccgcctctcagagcgcagcggcagcaaagaaatcagaaacagcagcggcatcgtccaggaacgcggcgaaaacatcagagacgaatgcaggtaacagcgcgaaagcggcagcttcttcaaaaacagccgcacaaaacgcagcaacagcggcagaacgttcagagacaaatgcccgtgcgtcagaagaagcctccgcagacagtgaagaggcttcccgccgtaatgcagagtcagccgctgaaaatgccggagtcgccaccacaaaagcgcgggaggctgcagcagacgcaacaaaggccgggcagaaaaaggatgaggctctgtcggcagcgacacgggctgaaaaggcggcagaccgcgcagaagtcgcagcggaagtgactgcagagccctatgcgaatatagtgccgccgctgcctgatgtgtggataccgtttaacgattcactggatatgattgcgggtttttctccgggctataaaaaaatagctattggtgacgatgtggttcaggtcgccagtgataaacaggttaatttcagtcgcgcatcaacggcaacatatatcaacaaatctggcgaactgaaaacggcggaaattaatgagccgcgatttgagtgtgatggcctgcttattgagggacaaagaacgaactacatgctcaattcggaaagtccagccagctgggggaagtcatcaaacatggatgtgcccgaaaccgggacggatagttttggttttacttatggaaagtttgtctgcaacgattctctggttgggcaaacttcggctattaatatggcatcaattgctgcaacaaagtcagttgatgtctcaggcgataataagtacgtgacaacctcatgccgttttaaaacagaacgacaggtaaggttacgtatacggtttgataagtatgatggtagtgcaacaacttttcttggcgatgcgtacattgatacgcaaacgcttgaaattaatatgacaggtggtgctgccggcagaattacggcacgagtcaggaaggataagaccacaggctggatttttgcagaggcaacgattcaggcaattgatggtgagttaaaaataggctctcagatacagtattctcctgagcggggtggggcaacagtatctggtgactatatttatcttgccaccccacaagtagagaatgggccgtgtgtatcatcatttattatttcaggaggcagcgcaacgacaagagccagtgatttggttagtatccccaccagaaataatctttataagttaccatttactttttcacttgagattcataaaaactgggatattgcaccaaacgccgcaccccgcgtgtgggatatagcagcagccaataccgggcaatcagcaattgcagcaatcaacagaggtagtggtaagttatatatgagtctgtcaaacccttcaggctcgtatgttaatagcgcagcgacagatgtatttgcagagaaaaccacatttggatgtattgcaaaagctgatggtcactttcatgtggtgacaaatggtaaagcggttaatgaagtttattgtgaatataatggcgtgaccgctgataaaaatatccgatttggagggcagacgaatactggagaacgacatctgtttggccatattcgcaatttccgcatatggcataaagaattaaatgacaggcaattaaaagaggtcgtatga

SEQ ID NO: 18579 - DNA, 1629 bp, Escherichia coli
atgaaatttaaagcagatcagacagctcaaaaactacgtggtggttattatacaccacaaaacatcgctgactttacaaccaaatgggttcttaataacaaacctaaaagtattctagaaccgagttgcggtgatggtgtattctttcagtctctatacaataataaatttgacaaaaacactaaagtacaaggttatgaacttttcgatatagaagctaaaaaatctatggagttgtgcaaatccttaggtttttcagacgttgaaatcacagaaggtgattttcttgaatgggcaaaagttgcaattcagaaaaaaaatacttctttcgatgctattattggcaaccctccctttatacgttatcaattcttagaaaaggatttccaagaaaatactgaagcaattttcaaattgcttgacttaaagtttactaaacatacaaatgcatgggtgccttttattttgtctggcgtttcgctcctcaatcccggaggacgtcttggcatggtaattccatcagaaattataaatgtaatgcatgcacaatccttgaggacattcttgggtgagcattgctctaaaattgtaattattgatccaaaagaaatatggttcagtgaaaccttacaaggcgcggtcattctattagttgaaaagaaaattaatctggattgtgcatcacaaggtgtcggaattaaaggggtcagtggcttcgattttttacaaaaaaatcccgaagatatattcaacgaaacaaatacaatcaatggtgataccgtaaaaggtaagtggacaaaagccgtcctagataaaaatgaagttaaccttcttaatgagattattaaacatccaaacgtacactcttttgatactatagcaaatgttgaagtgggaatggtcacaggtgccaatgagtttttcctcgtaaataaagatgtagttgacgcatttgatttaagtgagttcacccatccaatgtttggaagaagtcaacattgccaaggtgttatatacgatgaggttcaacatttagctaatatagagaataagcttccagtttattttttatattttgataaagaatttcatgaactacctaaaaaaacgcaagaatacattttcaatggtgaattacagggctttcacaagcgatataagtgcagaattcgaaaaccttggtataaggttccctctgtatttagcacaaaattagctatgcttaaacgatctcatgatgctccaagattaatttataatcaatatcaagcttatacaaccgatacagcctatagaattaaacctaaatctaatattaatgaggaaaaattgtcctattgtttcctcaatcctttaactgctatattcgcagaactagagggtcgttcttatggtggtggcgtaatggagcttgtcccttctgagataaggaagctgtttatccctctaccggaaaaaattgagttcgatttatctgagttaaataactctatgatgaacagatccatggagcaaattcttgcagagcaagggaagaaaatattctctcacatgggatatgatgacgaagtagttgaaaagttaatacatgtttggaataagttaaaaaatagaaggcagcgaagttag

SEQ ID NO: 18580 - DNA, 183 bp, Escherichia coli
atgaatttaagagatatatatatggctatcggaagatctggaaggatcgtgttacaagtagaccctgagttaaaaaagaagctttactctatcttagctatggagtctataacccttaaagattggtttactttaaaagcgaaagagcaaattgaaaataagaataaagagaatgcgaaatga

SEQ ID NO: 18581 - DNA, 423 bp, Escherichia coli
atgagtagaaataacgaaacaagcggcgttgaactggttgtcgtgggcgtatttgctttctgtctggcagttgttgcctggctaatgaaaactttcgatgttgaatggcaaacagcactagaaactgcgcctggcctgatagtctggttgcttgttgtcggtgcggggatctttttcgggatcaaaatggaaactggtcttgttcgctggggtgctccacttgcgatcgcccttctgattccggtattcaaaccaattcttaaggaagcagccggagttcgtgaaatgggcgggttagttttcgatgatatggtttcgtggtacggaactggctggggaatgtcgctgatgttcttcgggattcttatcgtcggatacggcctactttattggtggcacagaagaaagccatattactggtaa

SEQ ID NO: 18582 - DNA, 405 bp, Escherichia coli
atgagtgaagcattaaaggtactgaacaatattcgtatacttcgcgcacaggctcgtgaaactgatctggaaacgctggaagagatgctggaaaaactctctgttatcgtggatgagcgccgtgaggaagaacatgcagtacttaaggaacaagaacaacgtcaggctaagcttgaagccttccgccggaaactgttagaagatggtatcgatcctgcggagctactttcagcggtaggttccactaagcctaaaaccaaatcgacacgcactccacgccctgctaaatataaatatacagatgataacggtaatgagcagacttggactggtcagggccgtactccgaaagcaatagtggctgctattgaggcaggtaaaacactggaagatttccagatttaa

SEQ ID NO: 18583 - DNA, 486 bp, Escherichia coli
atgaaaaagaaacttattgcagctgcagttctgtttatgacggctaacatggcgaatgctgcaactctggataatacatcttccgtaaaagctgactttgaggttgtcggtggttgcactgtctctggaacatggactggtgagcaagtccctgctgctgtatatcagggctcagctaagcgtgtaggtgtacttggtatttcgttgtctggttgcactagccaagtttatttcgaagggaacgataaaaactcagacggactgcctcaagccactgatcctaagggtaataaaatagttatgattccatcattcgatgcattaaataatcttgtgtctaaagacgctacacttaatgtgttctatagcaaaaattccctgaatgatggtgacactctttctgttgaattcgttaaccgtgatcagtggaatgctaaagctggtaaacatactatgactcttaatgtaggtacttactctatctaa

SEQ ID NO: 18584 - DNA, 330 bp, Escherichia coli
atgagtaaacagggagatgttcttgaaggtaatgataaaagcagaaagccaagatcagaaaaaaccattaagcaaaaaatagcatcagcgcagatgcgtttgaatcgtctcaagactaaagagaaatctttgtccaagagtgctgagacacgcctgaagatcattcttggggcggaggtggctaaagctgttggctgtaaagtagaagatgttgataaggagtttgtattaggcgtattaattcattttaaaaaccttggtgctgatgataaggcaaggctcaaattgcgaggaaaaaggtttcttgatgaattgattggcaggcaataa

SEQ ID NO: 18585 - DNA, 390 bp, Escherichia coli
atgacacataaatacattaacttcatggggttggatttcaataaggtagcggagatgaaaaaatcgtttactgggtttgagaaacgaatacaaatcaacaatgataactttgacgatgaactattttatttttgctgttttatggattactttcttgagcgccatgacaacgtatctttccctgcttattataaattttgcgtttctctggatgcttacctgtattcactcatgtatctcgaagaaaacatctcaatgacgaacttaatcggtttcttccccggcaaactgttctggcatactgttgataatggaaatgatgatgttttttatatacttctttcattttatatgaatgaatggaaaaaggagaagagttctgatgagtaa

SEQ ID NO: 18586 - DNA, 705 bp, Escherichia coli; identical to SEQ ID NO: 8686

SEQ ID NO: 18587 - DNA, 180 bp, Escherichia coli; identical to SEQ ID NO: 10167

SEQ ID NO: 18588 - DNA, 201 bp, Escherichia coli; identical to SEQ ID NO: 5005

SEQ ID NO: 18589 - DNA, 357 bp, Escherichia coli; identical to SEQ ID NO: 5210

SEQ ID NO: 18590 - DNA, 177 bp, Escherichia coli; identical to SEQ ID NO: 2571

SEQ ID NO: 18591 - DNA, 426 bp, Escherichia coli
atgaatcaaatttacgacagttttccgtttccttcccctgagggttttaccgcaggtatgacaatggcgggatattttattcacgccactgtcataaatgatgaggagttaaaacccacgggctctcattataaccctgaggccaaacccaaatatgccattgttattgcctatccgtatgaggaccggaaattaaaagtccgccgtgaggagcatgagcgcttttcctgtactgaggaggattttaaattttttaattcatgtcctgatttgcagggcaaacctgtttatctcacggtggatgttaactcatggtcgacaggctctgaacgtcatggtgtctggtatcgttttatttccggctccatgaaacgttttgacggtcagccgctgggtgcactgcccgctggtaaagataagaattaa

SEQ ID NO: 18592 - DNA, 2004 bp, Escherichia coli
atgaaaacggaatcagccatccttacagcgtataacgccatcgacgcggcatccgttgcccttggtcgtccctgcctgacgcagcccgaacgtgagcattttcggactgagcgcgatgttgccacccgcaaccttgccacgctttcccgccagtatcgtgatgaggtcggggccttatctgcacagctcgcattgccgcgtaacacgcaggttgaccgtgtgatttacggaattaactgcacggatttatctctcgctgacaggggcagggctgccggactggtatcacagtttggctcgttttcgttcaccgtggcgcatgctttctgccgtctggtttaccagctcggtgtgaaaaatgcgctgatggcgcttgagtccgcgcaccgttttgctttcttcaatcaggacggagacccttatgaattctcgcttttctgcactgatgagcagattgctgaggtggctgattcggttgttcgtgactgccttgtttctcgggccatttatagtgatgtaccagagcatcaccttctcaatgtgatggcctattttcaggccatctccggctttgatttcgcccccgtttatgccacttatcatgagcgttacggcgatgagggattgcttaagcgtctgactgatttggcttttgtcacccgtttcctgcgggttatccgtgaccagcgggtcaatgaggtctgtcgcatgctcggcatactgaaccgcaacgcgccttatatttctgactggcatcgtgacctgtttgctgtccgcagtaaacgcgtgaaaaagtatctccggtcctccggtgtctttgatgcgtttaatgagctggtctgtacgctggaagatgcgcataacgcctctgtttcgaatccgaaaaaccggattgctgaactctgcgttcgtggaaaggccgtctgtgaactgtccgaagatatggggctgtccggctacttcatcgtgctcaccacgccgtcacgttttcacccgacgaccagttttaaggttgccggaaaatggcattctcgtccgaataaaaaatggtgggaagcaggttgcccgaccgttaaggattcgcacgcctggctgaataccgtctggcgtcgggtctgccgcagactggataaagccggtattcagatacccggcctgcgcacggtcgagcctcatgctgacggtacaacgcactggaatttcctgatttactgcaatccccatgagagcgcaacggtgctggccattttccgtgaagaggccatgcgcgatgagccggatgaaaagggggcgaaagagcaccgtattcgtattgaggctattgaccctgaaaagggtgatggtttccgttacatcgtgaagtacatcaccaaaatggcgggtgatgtcagtgcggatggtattaccgccctgaatgaccgttattctgcccgttcattctgtgatgccgtcagccgtgccgcctgctggcagaaagcaacgcgccttcgcctgttccagttctttggcgttccctccgttacggcttaccgccagatgcgcagcttccgcgcaccgcttgaggcgcatcatatcaatatgcagcagttcacgccgcagcaggtcgccgaactggaagccatccgcatggcctgtgatgcaggcgatttccggacctatatcctgctgaacggcggtttcttctgttctgaacgtctgcttcgtccgttttacgttcagccgcaggaagatggtaaaccccgttttaaccgttacggtgaaccctgcgcaccggtgatttccggtttcatgtttggccccgttccggtcataacccgttttatgggctgtgttgtccgccgtatgacccccgcagaaaaaatccgcgcagaggaagtcagaagcggcagcagctatgaatctgtgtttatttcgtcggcttcacgacaccgcacgacgcgctcccgcgcggcgggtgggggcggcgaagccgacccttggacttgtgacaataactgtccctga

SEQ ID NO: 18593 - DNA, 966 bp, Escherichia coli
atgtcagacagtgtaacagttggtatcgatgtatcaaaactcactcttgatgttcatgtgtctcctgcacagcttcatcagactgtatcaaacaacgagtcaggctttgctgagctgaaaacgttgctttccatgcagcaggtttctcttgttctgctcgaatccacgggcggttatgaagatgctgttgtctgtttcctgcagtctcttggctatgacgtttctgtcattaatccgcgtcaggctcgtgattttgcccgttccatggggcgtctggctaaaaccgacagaattgatgctgagctgcttgcgcagcttgcttctgttattcatgcccgacctgaccgtgagcgttttgtcaaaaaaattactgatgacagacgtcgcaaactggcctgtatggtggcccgtcgccgccaggttgtgaatatgatttccactgagcagcagcgtaaatctgccgccagtaactattccactgacagtattaataaagttttatctttcctgcgttctgagttgaaaagtattgatgcagatatttcactgcatgttcgctcacattttgcagatatatccggtcttcttgcctcatttaaggggattggtcccgccacaattggcgtgctgctgggtgaagttcctgaactgggcagactgaaccgccgtcagattagtgccctgattggtttggctccgtttaaccgggactccggatttatgcgcggtcgccgtactgtatggggcggtcgtgcaatggtcaggaatgcgctttatatgccgacactttctgccgtgcgttttaacccggctatccgggtgttttatatgcgactgatttctcagggtaagcccagaaaactggctcaggttgctgccatgcgtaaattactctgcatcattaatgccatgctttcatcaggggcaatgtttaaccctgccctgcatcccggtccgggggcttaa

SEQ ID NO: 18594 - DNA, 1941 bp, Escherichia coli
atgaaacccactttatatactgctactggtgagtgcgttacgccaggccgtgaactgggcaaaggcggtgaaggtgcggtttatgatatcgaggagtttgtcgatagcgtcgccaagatttatcacacgccgccacccgccttaaaacaggacaaacttgcctttatggctgcgacagctgacgcgcaattgttgaattatgtcgcctggccgcaggcaacgcttcacggtggacgaggcggaaaagttatcggttttatgatgccaaaagtttctggtaaagaaccgattcatatgatctatagcccggcacatcgtcgtcaacgttaccctcattgtgcgtgggattttctactctatgttgcgcgcaatattgcttcatcttttgctacggttcacgagcacgggcacgtcgtgggtgacgtaaaccagaacagttttatggtaggtcgcgacagcaaagtggtattgattgatagcgactcctttcagattaacgctaatggcacgttgcatttatgcgaagtcggtgtgtcgcattttacgccgccagagctacaaaccttgtcgtcatttgtcggctttgaacgcaccgcgaatcacgataattttggccttgccttgctgatatttcacgtcttgtttggtggtcggcatccttattctggtgtgccgcttatctctgatgcgggtaatgcgctggagacggatattacccatttccgttatgcctacgcgtcagataatcagcgacgtggtttaaaaccgccgccacgatcgattccgctatcgatgttaccgagtgatgttgaagccatgtttcagcaggcattcacggaaagtggcgtggcaaccgggcgtccgacggctaaagcgtgggtagcggcacttgattctctgcgccaacagttaaagaaatgtcccgtttcggcaatgcatgtttatcccgctcatttgaccgactgcccgtggtgtgcgctggataatcaaggcgttatctattttattgatctcggcgaagaggtcattaccaccggcggggattttgtgctggcaaaagtctgggcgatggtgatggcgtcagtagcaccgccagcattgcaactgccattacccgatcatttccaaccgactggcaggccgcttcctttaggcctgttacggcgcgaatacatcattctgcttgagatcgcactgtcagcattatcgctgctgctttgcggccttcaggcagaaccgcgttatattattttggttcctgtgctggcggctatctggattattggcagtctgacaagcaaagcgtacaaagcagaagttcagcaacgccgtgaggcatttaatcgtgcgaaaatggactatgaccatttagtccgccagatccagcaggtaggcggcctggaaggttttatcgccaaacggacgatgctcgaaaaaatgaaggacgaaattctcgggttaccggaagaagagaaacgcgctctggcagcacttcatgacactgcaagggaacggcagaagcagaagtttctggagggattttttattgatgttgcctctattcccggcgttggccctgcgcgtaaagcggcgttacggtcttttggtattgaaacagccgcagatgttacccgtcgtggcgttaagcaagtgaaagggtttggcgaccatctgacccaggcggttatcgactggaaagcgagctgtgaacgccgttttgtgttcaggccgaatgaagcgataacgccagcagacagacaagcggtaatggcgaaaatgaccgccaaacgacatcggctggaatcgacgttgactgtcggcgcgacagagttgcagcgattccgccttcatgctccagcacggaccatgccgttgatggaaccgttacgtcaggcggcagaaaaactggctcaggcgcaggcagatttaagccgctgctga

SEQ ID NO: 18595 - DNA, 336 bp, Escherichia coli
atgaaaaatgagactttaaagatagtttttgttcaatttggtaaaattgaagattcagatactgaatgggcgaatgctcaggcgttgtctactacttattcatcttctcaggcagcagggcgtgcatctgccggatttgctccaggaaaaattgatgttagtcctgataataatcattccgttggattgcgccttcgtgatgatttgaattttgcccgtgaacatggtggtttttatattgagattttgccagcttatggtatgaagtccaaaaaaggagcaatggttagcgttctttctgactatcaattaatttatcctaagcgggataaatag

SEQ ID NO: 18596 - DNA, 1197 bp, Escherichia coli
atgaagccggttcaggaaaccatacgtcacgtcttcatagaccatcttgctttcacttttccaataagtgagcttaagaatcttgagactttcgacggtgctattcagttctggcgtaagtatggttccatgccgcgtctgcgtgattttctgcccggtcgtgatgccttctttcgtgatgtggttgatcctgaaactcgatgctgggttcctgatgatgcggaatcagataaaatttgtagcggtatttctggcgatagagcgttaattgaacatcaaattgaacaatataatcaggctgttcaggctgcgtatttgcatcgccttaaaatctggttatccagtgctttcggtttgagtatgggacctgaacgggaccgtggtggctttaattatcgttgttctgcgccattattttctgatgatggcggtaataatctacatggctttgcattctggggtggaaacaataacacggtatatatacagatttccggtctgggatgtgctcatgtatttagtggtactgagcctcaggatgtattcaaatggttgaaacatctgaatattactacgctcaagcgtattgatttggctgttgatgatttcgatggtgtttttacatgcgatgcagctgttcgcgatcatcgttctggcgcgttttatagtggtaaggggccgcgtccgggtttttcgaattcctgtaagtgggatggtcgcgcattattaaagcaggagatgtacacgtttggttcccggcaatcgcgtgtttactggcgtatctataataaagcgcttgaacaaaaagtcagtggtacgtggaatcgttctgaggtcgagcttaaaggggttcctgttgatgtactgcttgatattgccggttattttacgggattgtgtgattatgctgcacaaatcaatccagctaaaccacgcaagtttaatccttatcgtcctgacttagcggacgaaaaaaaggcaattaatgcactggaacataatgttcactggttacgtaagcagtgctctaaatctgttgcaaagttatttcatcttctcggtaatgattatgaggcggtatttactgccattgtcagacatgaggatatacaggatgagaagattagattttcaataccggatgtttatcggcaggtgatcgcaggtaaattctataatcgttcagttccattttaa

SEQ ID NO: 18597 - DNA, 198 bp, Escherichia coli
atgtctcacgagattgtttactacgattacattcctgattatggcgttaatgcctgcattgatggtgaatgggatttcttcagctcatttaatgagctgttcattgcatgcgttgaaacaatcggggatgacttcgttctggtatctgttgcactgccttctggttcatgggtcggttatcaggagactgtttgctaa

SEQ ID NO: 18598 - DNA, 213 bp, Escherichia coli
atgaaaaaagaaacaaagcgcggagacacaaccgtaaggattaacgaaaacagaaaactggagctaaaacgaagagtgctggaaatcggtaataaaacaggtgagctactaaaaccatcagagatagtaaaccacttaatagacaactacttagatgatgcggtgaaagatctaataagcaaagaagaacttaagaaaaaaaaggcaatgtga

SEQ ID NO: 18599 - DNA, 1026 bp, Escherichia coli
atgaatatattggtaacaggtggggcaggctatattggctctcatacgactttatgtctattaaataaagggcataatgttgtaataattgatgattttagtaattcatccaaagagtccattgtaagagttgaagctatcactaaaaaaaaagttatatcgtatgagttaaatataaatgatgaagacagtatttctgaaataataaaaaaacataagattgaatgcataatgcattttgccggagcgaagtctgttgcagaatcattaaaaaaaccagatttttattatgctaataatgtatctgggacattacatctaattaatcttgccatcaataataacgttgctaactttatttttagttcttctgcaacagtttacggtaatgttaatataatacctattactgaaaattgtgctataggtggtactttaaatccttacgggacatcgaaatatatatcagagctaatgattatggatattgcaaaaacatatcgcaatataaatttcatttgcctgaggtattttaatccaataggtgctcatgaatcaggaatgataggagaaagcccatctgatataccgagtaatttagttccttatataacacaagttgcaattggtaagctagaaaagcttatgatttttgggggagactatcctacaaaagatggtacaggtgtacgagattatatacatgtaatggatttagcagagggacatgaagccgctctatcatatattactaaaaaccatcaaactaattaccatgcattcaatttagggacgggtaaagggtattctgttttagaactaatttcttgctttgaaaaggtatcaggcataactattccttatgaaatcacggaaaggagagagggggatattgccgagtcttggtcatctccgttgaaagccaataaatatttaaaatggcaagctaaacgaagtttagatcaaatgttagctgatgcatggcaatggcaattgaaaaaccccaatggttataatgatagataa

SEQ ID NO: 18600 - DNA, 525 bp, Escherichia coli
atgatgtcttttgaaatcaaagaatggtttaatgcgaaagagctggaagggatgcctggtgtaccaaagttggcgactaacattaccaggaaagctgtggcggaagattgggtaaaacgtcagcgtcacggtgggaaaggtgtcgcttatgagtatcacatcaacagtctgccagaagaaacacgcagggccattaaaggagcctcactttctgataaaccagtgcatacatcaatcgcccatacagttgatgagaggctaatttatgcaatgagcttcttaacaccagatgagcaggccgcagctgtggagatcattcgtgtagcagggattaaaggacttatgcctacaattgtcagtaaagataaggcattagaggcattagggattactgtggagcaacagaaaaccctgcaaactcttcaggcattaccaccggaaaaagtgagagagattttgtctcagtatgaaggcaaagaacataatttccctgtaagagaaaacgatgtaaagaaggctgtataa

SEQ ID NO: 18601 - DNA, 222 bp, Escherichia coli
atgcatatgaataaaagaactaacagccaagattggcacagagctgacatcgttgcagcgctacgaaaacgcaatatgtcactagctgaattgggaagatctaatcatctttcgtcttcaacattaaaaaatgctttggataagagatatccgaaagcggagaaaatcattgcagatgcactgggaatgacaccgcaagatatttggccgtctcgatactag

SEQ ID NO: 18602 - DNA, 444 bp, Escherichia coli
atgcagataaccgtcgccgttgatccactgcatggcgtccaggtgttccacagttcgctgctgtgctggtatcagatgcatcagtgcatgttcaccttcacgacaggcaacaaccattgcctcgtccagttgctgaatccggcgaaaggccgtggcacgggagggaatactccagccatgctcgcgggctgccagttccagacgctcataacatttgcggaaggcgggcttttccggtcgcagataatctgcaatcagaaactgccaggcatcctcgtcaaattcacttttgtgaacattgcgacgggatgctccacgtccatcaacaagtgcagccgcccagtcaggtttcgcaaacttctgtacctggtaatacttgtcccgcaaagtggatgcgctgacctggtaatgccctgcaacggtcgcaaaagccgttttcgttga

SEQ ID NO: 18603 - DNA, 1152 bp, Escherichia coli
atggcactctctacacgacaagtatcagccagtgaaatcgccaggcgtattggtgtcagtcgcgcggtattgtataaatggaaagatgaaattatcggcaacagtgcttaccagactatgcgtaaacataacgaaccttccctggaggcagaacgcgatgcgttgcgggaggaagtcgcccgactgaatcaggaaatacgccgccggcagatggagctggatattctgaaaaaggcggaggaaatcataaaaaaagacccgggcatcagtatcagtcacctgaacaacagagaaaaaacaaagatcgctgatgccctgagacaaacatatcccctgacagaattactgcatgttctgagccttgcccgtagcagttatttttatcaccgggctgcactgaaagccggtgataaatacgccacaatacgtacgatgctgacagatatctttaacagtaattaccagtgttatggctatcgtcgcctgcatgcgatgctcaggcatgagggggttcggctatcagaaaaggttgtacgcagacttatggtggaggaacagcttgtcgtcagccgtaaccgtcgtcgtcgctacagctcatattgcggagaaatcggaccggctccggataaccttatcgccagagattttaaggcggagcaacctaatcagaaatggctgacagatatcacggagttccagctccctgcaggtaaagtctggctgtcaccggtggtggactgcttcgatggaaaagttgtgagctggtctctcagtacacgccccgatgctgaactggtcaacactatgctggatagcgctgtcgaaacgttaaatgctggcgaacgaccggtgatacacagtgacagaggtgggcattatcgctggccaggctggctggaaagagtgaatgcagcaggtcttattcgctcaatgttccgtaaaggatgttcacctgataatgccgcatgcgaaggctttttcggcagactgaaaacggaaatgtattatgggcgtaaatggtcgggcatcacgccagaaaagttcatgcagcaagtggatgcttacatcagatggtataacgagcggcgtataaaattatcgccaggtgccgtcagccccaaaatgtaccgccaacaatgcgggctggaatga

SEQ ID NO: 18604 - DNA, 618 bp, Escherichia coli
atggtggcaggtagcctggtattcctgttcattgttctgctgacatttttctggaaaaaagcagagctggtgaatgacagccagatcagagttaatttcgtacttggctatatagaaaacattctcaatcagaacaacagcatcagcccggaagcagaacatttgcttctgaataactgtaacgcagatactcagcatgaattaagcaatctgctgctgaaacgcccacaacttcgtgcactgagcctggcaagacaagaggctgtattttgtagcacccaccccggtttgcctgtcggtccagttgctgaaaaggaacagtggcggcacgatatgctgattcgttttcctgaagatacaggtactctgccctggatcctgttaagaacaccttacaaaaacggcacggtcattaccgccacagattattattttattcaggacatcatctctgtggttcatgcggttcctgcaatacgattccgtttgggaaacacggtcctgtcagccagcggaaaaaatgtcactctgctcccggacgacagcggtatacaaaaagaaagtcattcaaaaaaatatccgttctccctgatttatatcatcccggtgaaaatgtaa

SEQ ID NO: 18605 - DNA, 1737 bp, Escherichia coli
atgccgcgtggcctggaattactgattgcacaaaccattttgcaaggtttcgacgctcagtatggtcgattcctcgaagtgacttccggggcgcagcagcgtttcgaacaagccgactggcacgccgtccagcaggcgatgaaaaaccgtatccatctttacgatcatcacgtgggtctggtggtggagcaactgcgctgcattaccaacggccaaagcacggacgcggcatttttactgcgcgtcaaagagcattacacccggctgttgccggattacccgcgcttcgagattgcggagagtttttttaactccgtgtactgtcggttatttgaccaccgctcgcttactcccgagcggctttttatctttagctcccagccagagcgccgctttcgtaccattccacgcccgctggcgaaagactttcaccccgatcacggctgggaatctctgctgatgcgcgttatcagcgacctgccgttgcgtctgcgctggcagaataaaagccgtgacattcattacatcgttcgtcatctgacggaaacgctggggacagacaacctcgcggaaagtcatttacaggtggcgaacgaactgttttaccgcaataaagccgcctggctggtgggcaaactgatcacgccttccggcacattgccatttttgctgccgatccaccagacggacgacggcgaactgtttattgatacctgtctgacgacgaccgccgaagcgagcattgtctttggctttgcgcgttcttattttatggtttatgcaccgctgcccgcagcgctggtcgagtggctacgggaaattctgccaggtaaaaccaccgctgaattgtatatggctatcggctgccagaagcacgccaaaaccgaaagctaccgcgaatatctcgtttatctacagggctgtaatgagcagttcattgaagcgccgggtattcgtggcatggtgatgctggtgtttacgctgccgggctttgatcgggtattcaaagtcatcaaagacaagttcgcgccgcagaaagagatgtctgccgctcacgttcgtgcctgctatcaattggtgaaagagcacgatcgcgtgggccgaatggcggacacccaggagtttgaaaactttgtgctggagaagcggcatatttccccggcattaatggaattactgctccaggaagcagcggaaaaaatcaccgatctcggcgaacaaattgtgattcgccatctttatattgagcggcggatggtgccgctcaatatctggctggaacaagtggaaggtcagcagttgcgcgatgccattgaagaatacggtaacgctattcgccagcttgccgctgctaacattttccctggcgacatgctgtttaaaaacttcggtgtcacccgtcacgggcgtgtggtgttttatgattacgacgaaatttgctacatgacggaagtgaacttccgcgacatcccgccgccgcgctacccggaggacgaacttgccagcgaaccgtggtacagcgtctcgccgggcgatgttttcccggaagagtttcgccactggctatgcgccgccccccgcattgggccactctttgaagagatgcacgccgacctgttccgcgctgattactggcgcgcactacaaaaccgtattcgtgaaggacatgtggaagatgtttatgcgtatcggcgcaggcaaagatttagcgtacggtatggggagatgcttttttga

SEQ ID NO: 18606 - DNA, 1305 bp, Escherichia coli
atgaaaacccgtacacaacaaattgaagaattacagaaagagtggactcaaccgcgttgggaaggcattactcgcccatacagcgcggaagatgtggtgaaattacgcggttcagtcaatcctgaatgcacgctggcgcaactgggcgcggcgaaaatgtggcgtctgctgcacggcgagtcgaaaaaaggctacatcaacagcctcggtgcactgactggcggtcaggcgctgcaacaggcgaaagcgggtattgaagcagtctatctgtcgggatggcaggtagcggcggacgctaacctggcggccagcatgtatccggatcagtcgctctatccggcaaactcggtgccagctgtggtggagcggatcaacaatactttccgccgtgcggatcagatccaatggtccgcgggcattgagccgggcgatccgcgctatgtcgattacttcctgccgatcgttgctgatgcggaagccggttttggcggtgtcctgaatgcctttgaactgatgaaagcgatgattgaagccggtgcagcggcagttcacttcgaagatcagctggcatcagtgaagaaatgcggtcacatgggcggcaaagttttagtgccaactcaggaagctattcagaaactggtcgcggcgcgtctggcagctgacgtgacaggcgttccaaccctgctggttgctcgtaccgatgccgatgcggcggatctgattacctccgattgcgacccatatgacagcgaatttattaccggcgagcgtaccagcgaaggtttcttccgtactcatgcgggcattgagcaagcgatcagccgtggcctggcgtatgcgccatatgctgacctggtatggtgtgaaacttccacgccggatctggaactggcgcgtcgctttgcacaagccatccacgcgaaatatccgggcaaactgctggcttataactgctcgccgtcgttcaactggcagaaaaacctcgacgacaaaactattgccagcttccagcagcagctgtcggatatgggctacaagttccagttcatcaccctggcaggcatccacagcatgtggtttaacatgttcgacctggcaaatgcctatgcccagggcgaaggcatgaagcattacgttgagaaagtgcagcagccggaatttgccgctgcgaaagatggctataccttcgtatctcaccagcaggaagtgggtacaggttatttcgataaagtgacgaccattattcagggcggcacgtcttcagtcaccgcgctgaccggctccaccgaagaatcgcagttctaa

SEQ ID NO: 18607 - DNA, 1602 bp, Escherichia coli
atgactgaacaggcaacaacaaccgatgaactggctttcataaggccgtatggcgagcaggagaagcaaattcttactgccgaagcggtagaatttctgactgagctggtgacgcattttacgccacaacgcaataaacttctggcagcgcgcattcagcagcagcaggatatcgataacggaacgttgcctgattttatttcggaaacagcttccattcgtgatgctgactggaaaattcgtggtattcccgcggacttacaagatcgtcgggtagagattaccggcccggttgagcgcaagatggtgatcaacgcgctcaacgccaatgtgaaagtctttatggccgatttcgaagattcactggcaccagactggaacaaagtgatcgacgggcaaattaacctgcgtgatgcagttaacggcaccatcagctataccaatgaagcaggcaaaatttatcagctcaagcccaatccagcggtgttgatttgtcgggtacgcggtctgcacttgccggaaaaacatgtcacctggcgtggtgaggcaatccccggtagcctgtttgattttgcgctctatttcttccacaactatcaggcactgttggcaaagggcagcggtccctatttctatctgccgaaaacccagtcctggcaggaagcggcctggtggagcgaagtcttcagctatgcagaagatcgctttaatctgccgcgcggcaccatcaaggcgacgttgctgattgaaacgctgcccgccgtgttccagatggacgaaatccttcacgcgctgcgtgaccatattgttggtctgaactgcggtcgttgggattacatcttcagttatatcaaaacgttgaaaaactatcccgatcgcgtcctgccagacagacaggcagtgacgatggataaaccattcctgaatgcttattcacgcctgttgattaaaacctgccataaacgcggtgcttttgcgatgggcggtatggcggcatttattccgagcaaagatgaagagcgcaataaccaggtgctcaacaaagtaaaagcggataaatcgctggaagctaataacggtcacgatggcacatggattgcccacccaggccttgcggatacggcaatggcggtattcaacgacattctcggctcccgtaaaaatcagcttgaagtgatgcgcgaacaagacgcgccgattactgccgatcagctgctggcaccttgtgatggtgaacgcaccgaagaaggtatgtgcgccaacattcgcgtggctgtgcagtacatcgaagcatggatctctggcaacggctgtgtgccgatttatggcctgatggaagatgcggcgacggctgaaatttcccgtacctcgatctggcagtggatccatcatcaaaaaacgttgagcaatggcaaaccggtgaccaaagccttgttccgccagatgctgggcgaagagatgaaagtcattgccagcgaactgggcgaagaacgtttctcccaggggcgttttgacgatgccgcacgcttgatggaacagatcaccacttccgatgagttaatagatttcctgaccctgccaggctaccgcctgttagcgtaa

SEQ ID NO: 18608 - DNA, 930 bp, Escherichia coli
atgccgattcgtgtgccggacgagctacccgccgtcaatttcttgcgtgaagaaaacgtttttgtgatgacaacttctcgtgcgtctggtcaggaaattcgtccacttaaggttctgatcctaaacctgatgccgaagaagattgaaactgaaaatcagtttctgcgcctgctttcaaactcacctttgcaggtcgatattcagctgttgcgcatcgattcccgtgaatcgcgcaacacgcccgcagagcatctgaataacttctactgtaactttgaagatattcaggaacaaaactttgacggtctgatagttaccggcgcgccgctgggcctggtggagtttaatgatgtcgcttactggccgcagatcaaacaggtgctggagtggtcgaaagatcacgtcacctcgacgctgtttgtctgttgggcggtccaggccgcgctcaatatcctctacggcattcctaagcaaacccgcaccgacaaactctctggcgtttacgagcatcatattctccatcctcatgcgcttctgacgcgtggctttgatgattcattcctggcaccacattcgcgctatgctgactttccggcagcgttgattcgtgattataccgatctggaaattctggcagagacggaagaaggggatgcatatctgtttgccagcaaagataagcgcattgcctttgtgacgggccatcccgaatatgatgcgcaaacgctggcgcaggaatttttccgcgatgtggaagccggactggacccggatgtaccgtataactattttccgcataatgatccgcaaaatacaccgcgagcgagctggcgtagtcacggtaatttgctgtttaccaactggctcaactattacgtctaccagatcacgccatacgatctacggcacatgaatccaacgctggattaa

SEQ ID NO: 18609 - DNA, 444 bp, Escherichia coli
atggttattagtattcgccgttcgcggcatgaggaaggggaggaactcgttgcgatttggtgtcgatctgtcgatgccacccacgattttttatcagcagagtatcgggtcgagctggaagagttggttcgttcctttctgccggaagcaccgttgtgggtcgcggttaatgagcgggatcggccggttgggtttatgttgttaagtgggcagcatatggatgcgctgtttatcgatcctgatgtgcgcggctgcggcgtgggtcggatgctggtggaacatgcgctctcgatggcaccggaactgacaaccaatgttaatgagcaaaataagcaggctgttgggttctataagaagatgggttttaaggttacgggacgctctgaggtggacgatttggggaaaccgtatccgttgctgaatctggcgtatgtgggggaataa

SEQ ID NO: 18610 - DNA, 294 bp, Escherichia coli
atgacgagaatgagcgaaaccgaactactaaaaataatccgccgcgttaccggaatcagccaggaagcaggcaaacaggaggccacgcagccggacagcgtgatagccaaaaattacgcgcgtgtggtggctgaggtgatgcgccgtgacggtatcgagcttaacggcgtggatatacgcaatatacgcaccagagttctggagttgttgtcatatcgtcgccgcgtggagatgtaccaggagaaagaaaaaattacttaccactggaagaagccggagcggttgcggcggtaa

SEQ ID NO: 18611 - DNA, 1662 bp, Escherichia coli
ttgaccgcctggcatgagtacgcagaaggcgtaaaaaacagcaaaattacggcctgtaaacgactgaaacaggccgttaaacggtatttttctgaccttgaaaaccccctttacacgttcgatccggaggtcgtggagcggtttattgccttttccagggtgtgtccgcacgtaaaaggcgcaatgcgcggtagccccattgagctggagccgtggcagcagttcgcctttgcgtgcatcctgggctttaaggttaaggccaccggacggcgcaaatacaccagcgcattcattgaagtgccgcgaaaaaatgccaaatccacggtcgccgctatcctggctaactggtttctggttatggaaaacgggcagcaggatatttacaccgccgccgtgagtcgtgatcaggcgcggatcgtgtttgatgatgcgcgtcagatgtgccttttatcccgaccgttacgaaagcgggtaaatattcaggcacacaaggtgatacacccgaaaaccaacagcctgttaaagccactggcagcaaaagcggcaaccattgaaggtacaaacccgagtcttgccattgtggatgaatatcacctgcaccctgacaacggggtttattccgcgcttgaactgggaatgggggcgcgtccggaggggctgttatttgccatcaccacatcggggagcaacgttgtttcagcctgtaaacaacactatgactattgctgccagatactggatggtgaagaggtgaacgaatccatgttcgtgctgatttacgagctggatgatgaaagcgaggttgacgatccggcgatgtggataaaggcgaatcccaatatcgatgtttccgtcgatcgtgaaaaactggcctcaaccatccagaaagcgcggggtattccgtcgcagtgggtggaaatgctcaccaagcgattcaatatctggtgtcagggggctacgccgtggatgggtaacggtgcatgggcggagtgcgccggaacgttcgcggaggcggatttatacggtcaggagtgctacgcggggctggacttatcatcaaccagcgatatttccagcgtgtgctatgcctttccggtcggtaaaaagattatgctggtttcccgtcactatctgccggaatttcagctacagaaccccgccaataaaaaccgcgccatctatcgccagtgggtaaaggcgggctggatacgcacaacaccgggtgactgcattgattatgaccgtatccgtgatgacatcatggcggatgcagagaatttcaatatcaggctggtgggcttcgatacatggaacgccacgcacctgaggacgcagctacagggggcaggatttgaggtggagccgttcccgcaaacataccttcgtttcagtccggcggcgaaatcgttcgaagtttttgttaaccggaaggtgattgtgcatcgtggcgatccggtgctggcctggtcaatgagtaatgttgtgatgcagagtgacgcgaacgccaatatcaagccgaacaagaaaaaatcatccaacaagatagacccgagcgttgcggcgctgatggcgtttggcacattccaggcagagcatgaggaatttgcatttgatatgagcgacagccacaaagagcggcttgcggcgtttgatggggtatga

SEQ ID NO: 18612 - DNA, 498 bp, Escherichia coli
atgttttcgcaatcgctggtgaggccgtcagagggggtgggggtggttttcaggacgaaaccgtccctgccggacaccgaccgcctcctcaaatttttgtgcacgggaatttttttgaaaataattgggcgaaaaaagaacatggcaagaccaccaaaagcccccgcttacctggatgaaatcgcggtcaggcagtggaaggaaaaatcgcgccagctttccggacgggaagaccttacccccgccgactggagcaatctggagctgtattgcgttaactactccatataccgcaaagccgtcgaagaccttgccacgcgcgggttcagcattgttaacagtcagggcagcgagagcagaaaccccgccctgagcgcaaaggctgacgctgaaagaataatgatcaaaatggcttctttgctgggttttgacccggtaagtcgccgcagaaatccaccggaaacagaggaagaggacgagcttgaccgcctggcatga

SEQ ID NO: 18613 - DNA, 1146 bp, Escherichia coli
atgaagaaattaatcgaactccgccagcaaaaaaccgccctgaaaaaccagatgcgatccctgctggaaaaagccgacagtgaaaaccgcagtctaaccgatgacgaaggcaaacagtttgatgaactgcgtgcaaaagccgattccctcgacacagaaatttcccgcctcgagtctgtggctgatgaagaacgtaaccagcctggtgttcccgtcgaagataaaatcaccaaaaatgagctacgctcttacattctgaccggggaaacccgcaacctgtccggcagtgttccggctgatggtggttatacggttatcccggaactgaacagagaaattatgcgtcagctttctgatgagtcggtgatgcgtaaaatctgtactgttaaaaccattcacagtaatgaatttaagcaactggtttctgccgggggtgcggtcgtgggacacggcgaagaaggtgcggcacgtaaccagacggcaaccccaaaactgaatgaagtcagtatccgcctgtatccgatctacgcttacccgaaaaccactcaggaaattatcgatttttccgaagtcgatattatgggctggttatcttctgaaattggcgacactttcgttgataccgaagaaacggatctggtttccggtgatggcgagaaaaaagccaaaggtttcctgactttcccgcgcactacggataatgacaaaacccgtcctttcggtacgctccagacgaaaaaagtgactggcagtctcagcgccgatatgctgattgacctgaaatttacgctgcgcaataagtaccgcaaaaaagctgtatgggtgatgaactcaaatacagccgcctccgcacaaaaactgaaaaatgccactggtgattacatctggcgcgatcgtttacaggctggtgatcctgattctctgctggggcttccggttgaatatctggaatttatgccggacggtgtgattgcagtcggtgactttaagcgcggttatttcatcgttgaccataaaaccggtacgcgtacccgtccggatttcagcgagcctggattcattaacatctatacccagaaatatctgggcggtggtgtggtggattcgaacgccatcaagattctggaaattcaggctggcaagtaa

SEQ ID NO: 18614 - DNA, 426 bp, Escherichia coli
atgacagcacagatagcggcttacgggcggctggtggctgacccgcagctaaagaccaccagcaaagggacacaaatggcgatggcgagtatggcggttcccctgccatgcagccaggcagatgacggaacggcgacgatgtggttatctgtcctggcgtttggcagacaggccgacgcactggcaaaacaccacaaaggcgaactggtgagcgtggcgggtaacatgcaggtgagccagtggacaggccagaacggggaaacgcggcagggctggcaggttattgcagacagcgtaatcagtgcgcgaacggcgcgaccgggcggcaaaaaaggtcaacagggccaggccactgacgcactgaacagggcaaaacaacagacaagccagcacgatgacccgtacggggataacataccgttttaa

SEQ ID NO: 18615 - DNA, 1407 bp, Escherichia coli
atgaaactggcaccgaacgtaaaactgttaccgaaagataaacacactgaggcggttatttttgcgggtgataatgctcactcctttgcagaacattacatgattgcacaggccaaaaaagcaggcgatcccatccctccggtttacctgggccgttatcagttaagcgaactggacaacctgcagattgttgatgaggggcgatacagggtaacggtgatacgcgccggaaatattgacgaagcgcagctgttaaccatagcgacaaaactggcgatcgccggagtccaggaagcgcggctgctttctgaaaacttcgaattactggagaaatggaccgaccagcttccacggctacgggagacatgggagagaggggaaagcctgatcatgaacggaggaaaacaaaaaatcacgctaccgatttcatggggttctgagggattcgacgcgcagcaaagctacgtaattaaggggcttattccggctgaatcattatgcagcacctacggggccagcggttcttataaatcgttcctggctatttcctggtcgtgccatgttgccacaggtatggcatggggaggccgcagggtaagtaagggcgcggttatctatatcgctggcgaaggcagtatgggcgtaaaacgccgcgttaaggcgtgggagataacccacgacaaggtggttacggatttgtgcatcgttaacgcgcctgtcttccctgcatcgcctgactatgtggagcaggttatcaggactgccggacttgttaagagcagaacgggcgaaaatgtgcggctgattgtgatcgacacgctggcccgttgctttggtgggaatgatgaaaatgattcccgtgatatgggcgcatttatccaggggtgtgacgcgataaagcaggccacaggggccacggtactggtggttcaccattccggcaaggatgaaacaaagggggcgcgaggttccagcgcattccgcgctgcactggatgcagagtaccgaatcagccgggaaaattcagacgttacagcactggtggcggcgtgtacgaagatgaaagacgcagaggagccaaaagagagcgcatacgaccttaaaagcgtggaggtgtttaccgataccgatggcgaagagattgtgtccatggtggtgattgacgttccccgcgcccctgctgaactggagcgcatagaggaggccgggaacaagacggaaaatcacacggctttatggggttgtatccggtcacgtatacagcatggtgataaatgcacgatcccgctgctacgtgatgacatgaaaaagctgggatatgacacaaaacaccttaaacgatggttagccaaactggaaaaagacggcgtgatttgcgtcgatggggatgatgttcacccactgtaa

SEQ ID NO: 18616 - DNA, 438 bp, Escherichia coli
atgacgtttgttaacgcccatgccgaagacagccaaatctttttatataagcgtcgctatgttccggtagaaggtcatgcgccgtggctggtttctggcaatgcctgcgaactcgaacgcattcattatgaaggcatggacgatgttattctgctggattttctgcccaaagagttaggttttgatatgaacatgcatatcctctcttttgcgccaggtgccagccacggttatatcgaaactcacgtccaggaacacggtgcctatattctttccggtcagggggtttataacctcgacaataactggatcccggtgaaaaaaggcgattacatctttatgggcgcttattccttacaggccggttatggcgtaggacgtggtgaagcgtttagttatatttactcaaaagattgcaaccgcgacgtagagatttaa

SEQ ID NO: 18617 - DNA, 1098 bp, Escherichia coli
atgtcacttactgatactaaagtaaaaaatgccagaccagcggaaaaagccgtcaagctcactgatggatttggtctctaccttcttgtgcatcccaatggttcaaaatactggcagttaggctatcgcttcgatggtaaacagaaagtgttttccattggtgtttaccctgcggtttctcttgctgatgccagacaacgacgtgatgaagcaaaaaagctgcttgctcagggaatcgatcccaacgctaaaaaacaggctgatgaaaaagctctgcaggaaaagcgggataaaacccgttcgttccgggtcgttgccagaagctggtttgccaccaaaacaaaatggtcagaagattacgccgatacggtatggaagcgccttgagacctatgtattcccggatattggcgacagcaacgtttcagatctggatacaggtgatctgcttgttccggttaaaaaagcagaaacgcttggctatcttgaaattgccatgcggatcaagcaatacatcactgccatcctgcgtcacgccgttcagcaaaagcttatgcgccataatcctgcctacgatatggaaggtgctgtgcagaaaccagagactgagcaccgtcctgcactggagctggaagagatccccctgctacttgaacgtattgatgcctacaaaggccgtggacttaccacactggcgattaaactcaatctgttgattttcattcgttccagtgaactccgctatgcacgatggtcagaaatcgacttcaacagtaagttatgggtgataccagaaaagcgagaagcgattgagcgcgtcaaatattccacgcgtggcgcaaaaatgaaacgccagcacttcgttcccctctgcaggcaggctcttaagatactgaaagagatccgccagcttacctatgaagaaggtaacgaagccggattaattttcactggctgttatgactcgttcaaacccatgagtgaaaacaccatcaacaaggcgctacataagatgggctatgacaccacgcaggacatctgcggtcatggtttccgcacactggctgatcctacccacgtaatatggacacaggcctaa

SEQ ID NO: 18618 - DNA, 195 bp, Escherichia coli
atgtggaatattgtggtgctgatgaatatttatatcccggattggtggagaaaaagctttttccatgcactttttttgcaaaaatttctatatgggaggcgtgtttgttgcgggttaattcataaagaaatgtatttggagtgttggctggatgagtcgctggtagatgttattgtgccagcaggggcagggtaa

SEQ ID NO: 18619 - DNA, 192 bp, Escherichia coli
atgcctgagactactaagctgtttaattgtggcgataataagataaaagaaattcaatacttcccaaatcatctggagaaagcacgtatggagtgtgatattgaggttgtctctgcgatatatagcaataaagaattactttttaaagaatgtaattcttttgaagagacatttttatatcatggactttga

SEQ ID NO: 18620 - DNA, 690 bp, Escherichia coli
atgaagaacgtcaaaaacacggaaaatcgaatagccgcgatgctgaaagcaaaaggatggactcaggctcaactggcccgcaagttaggtgtgagtgcgcaatcagtgcagtactggacaacaggaaaaacatttccacggagtgataagctcgcgcatttatcagagattagcggttatccacaatcctggttcttaggtgaagactcctcaccaaccttttcctcgcaagagaaacaccagacaagaacagatagcgtcgtgtttaatgtccttgatgttgagtttagttgcggtgatggaactcatgtccgtggtgacttgatagatgtagtgcgctcaatagaacttgatcctgaatatgcccgacgtcttgttggaaatcgggcattcaaaaatatagaaataggtaacgccagaggagacagtatggctcccacaatctcacctggcgaccttctttttcttgataagacagtaacttattttgatggcgatggtatttatgcattttgttttgatggagaatgctacgtgaaaaggcttcaaaaaattggaagcaaaatcatggtgttatctgataaccccaattatcaaccatggagcatcgaaaaagaggggttagctctgctttatatccagtctaaagtgatctcatcagtaccattcaacataaacagatttggttag

SEQ ID NO: 18621 - DNA, 879 bp, Escherichia coli
atgatgacgattgaccaacgtgagaaacaaacaagactacaggcgcgaatggatgagttacgggcagagattgcatttgctcagaatggcgaaaagccatggccttaccgtgcctgtcgggaatctgaaggggttggatgctgcgaaaaacacggtaaatatcgtacgcatatactggtgtgggatgatcggcaggggggcgctgtctcaaaaatttcccgctgtccggagtgtctggtggatgaaatggatgtgacacatcggactctggttgcaatgaaagctgatgtgctgattgagaatgctggtgttgcctgtaggtttcgcgactgtgagtttgaaaactatcaggagattaactctgatgcagccagaaatcttgctgcctgccgccgctatgcggagagctgggaggatgttctggctaacggtaccagtcttgttctgacaggcagttgtggtactggaaaaaatcatctggctgtggctatggcaaaacacatcatccgtaaccatctggctagtgtggagattactgatgtgatgcgccttacccgtgctgtgaaaaactgctggcgaaatgacagcgaaaaaacagcggatgaagttattgagcattatgcgtcaatggatttgctgatcatcgacgaagtcggcgttcagtttggcagcgcggctgaaatggctattttgcaggaaattatcaatgcccggtacgaaagcatcctgcccaccatcctgatcagcaacctttcaccggaagagttgtgggcattcatcagcccccgcattgccgacaggatcacagacgggggacgcaactggttgtcgtttaactggcccagctatcgttctcgtatcagaggtgtggctgcatga

SEQ ID NO: 18622 - DNA, 360 bp, Escherichia coli
atgcgtatagagtttgttttgccttacccgccaacggtgaacacctactggcgacgtcgtgacaacacatattttgtatcaaaagccggtgagcgttatcgccgtgatgtggcgcttattgttcgccagcagcgactgaaattaaacctgtccggacggctggcgataaagattattgcagagccaccggataaacgtcgtcgtgacctggacaatatcctgaaagcaccactggatgcactgacacatgcagggctgctcatagacgacgagcagtttgatgaaattaatattgtgcgcggtcagctcgttccaggggggcggctgggcgtgaagatttacaaaattgagagtgagtga

SEQ ID NO: 18623 - DNA, 546 bp, Escherichia coli
atgatatacccggaaattacaggcaaaagcggcgagcatttacgtctaaaaacgctggaagccgtctggatccaggggaaattacggatgtgggggcgttggtcgtacataggtggtggcaaaccaggaaatatgttcaatcagttgctggcatccaaaacacttacaaaaactgcgatcaatgaagctctgcgcagaataaaaaaatcagggattgataaaactgagctggaagcgtttttgcgtgagatgatcaacagcaagcaaaagagcgggctggcttattgtactgatgccgaggcgttatgtatcgatcgggtaattagtgaagtgttggcagagcatccgggattgatttgtatcctccgacaaagatatgaagggctgggaatgagcaagctgaaaatggcagaacagttaaaaaagaatcaccctgactggagcctgaaaacttgtagaaatcgcattgatgtttggttggcgatggctgaaaccatgcttttccttccaatgtgcgtggcacttcggtgcttttctgataactga

SEQ ID NO: 18624 - DNA, 1191 bp, Escherichia coli
atgatatttacacgattgagatttatcaatttgtacgcttttgaggatgcagagcttaacctgtcctatccaaggaaacctgtaaacatgcctcttgatggggagtttttggctggacggcctaaattttactataaaaaagtctgtatcataacggggggaaatgcttcaggtaagacgtcactagggcgaattctttgtggaattcaggtgtttctaagaaccaaagagttgcggagtaatctgcgagtgaataataaaaataatgatgcttcgtttgaagtagactttgctacggaggaacattttcatcatcgtttgtatgtacgctttgctaccagtgaaggcggagcgcacataatcaaagaaattaaatatggttttgttcaaatagcattaaatgattcttgctataaaaccacagaaaaactgaatcaactcttttctggaagggccccaggagatacagaatatttttttcaggaactagctactgatagcgaaccagttgtattggagtttttcaagcaacttaagttttttggtggatggtactatttgttgtctgaaactaaagaaagtaccactgcaatttcaggaatgaataaaaatattcttgaaaggataattcgcactttcgattcaagtattataggagttaccgagatgctggagtctgaaagtgacggggatgaaaataaatcatctgcggtttatctgattaaatttaaaaactctgattctcttgtcgttaccagtaaaggtgaaataattaactcagaccgtctttctcgaggaacatacgaggcagtgacggtagcgcattttataagcgctattatctctgattgtgaaagactaggtaagcaatctctaataccatcaatgacttattttcttgacgagaaattggcttatacacattcagagttagagcgtatgattgtggcgctgattatatctaatttgaaagaaaatactcagtttttctatacaacgcataacatggatatttttgagttggatctgcctgttcactcgttcatttttattaaaaaaacgaaagactattcggagtttgttgaagcaaattcagttgttaaaaaaaatgaccgtagcatgcgaaacgctgttgagagagatgtctttggtgtcttacctgacacatcattagtatcggagctactctga

SEQ ID NO: 18625 - DNA, 534 bp, Escherichia coli
atggcggggttgtctaaaataagaataatttttgtcgaaggtgaaacagaaaactctctttttcagaagatgaaacaacagagagttattgatgccaaatcaattgtaaaaagaaacttttggcaagagagcataagaaattatgcgattactattccgaagggaagtgatatactaattgtctttgatagtgatgaagtggagcaatctgcaagattcattgaaaatgtaaagttccttaaaaacagagggcataaagtttatcttttgcagcagaaaagaaattttgaggaggagttggcctggtgttgcggaattcctgtaaaaaaactaattgctgggttctgtgcaaaaaaaacatcgggtataaatgatttcaagagagattttattgcttgtaacaatcaactttcaaagttactgaaaatgggcatgcaggaaactaagtggtttacaagagatttacatactgtattggagcctgttgcaagttttaagtcatctttttctaaacatttcaggttaacaagatga

SEQ ID NO: 18626 - DNA, 198 bp, Escherichia coli
atgctaaaacagcaggatatgaccgaaaccgccagagtggtgtttaatgaattaagcgtcaccgaaccggcgaccgtcggggaaattgcgcagaatacttacctttcacgcgaacgctgccagttaatactgactcagcttgttatggcgggtctggcagattatcagttcggttgttacagacgccttccgcagtga

SEQ ID NO: 18627 - DNA, 1050 bp, Escherichia coli
atgaccaatactgtaaaaatatccagttgtgagttaatcaacgctgattgcctggaatttatccagaccttaccggaaaattctgtcgatctgatagtcacagacccgccatactttaaagtgaagcccgagggctgggataaccagtggaagggcgacgatgattacctgaaatggctggaccagtgtctggcgcagttctggcgggtactgaagcctgccggaagtctttacctgttctgtggtcatcgcctggcatctgacaccgaaatcatgatgcgtgagcgctttaatgtgctgaaccacattatctgggcgaagccgtccggacgctggaacgggtgcaataaggaaagtctgcgggcgtattttccggcaacagagcgcattctgtttgcagaacattatcagggaccgtatcgcccgaaagatgatggctatgtggcacaggggcgcgagctaaaacagcacgtcatggccccgctgatttcttactttcgtgatgcgcgtaaatcactgggaataacgtcaaaacagatagcggaagccaccggaaagaaaaacatggcttcgcactggtttggtaccagtcagtggcagttaccgaacgagggtgattacaacaaattgcaggcgttgtttgcgcgtgttgcggcagaaaaacatcagcgcggggaactggaaaagccacaccaccagctggtcagcacatacagtgagctgaaccggcagtatacggaactgctgagtgaatataaaaatttgcggcggtatttcggtgtgacggcgcaggttccgtacaccgatgtctggacgcataaaccggtgcagtactatccaggaaaacatccgtgcgaaaaaccggcagaaatgctgcagcagataatcaacgcgagcagtcgtccgggagacctggttgcagatttttttatgggttcaggttcaacggtaaaagcggcgatggcactggggcgtcgtgcgattggtgctgagctggagaccggacgttttgagcagacagtcagggaagttcaggatttaatcgtttga

SEQ ID NO: 18628 - DNA, 426 bp, Escherichia coli
atgtttggtattttcaaaaagaaaacccgcaaggccattaccgaagtgaagaagatggagaaccgtgacgcagtggaggcgaccgtctggggcgcgtactccattgcatacgctgacggcacctgtgacgcgaaagaaatcgcggtactggaaaaaaccattgcagcacttcctgcctttgcgccgttctccggtgagattgcacaaatgagtgcaaatatccgcgcccgttatgaagcgtcgccgcgttctgccaatgccgaagctcttcgtcagctggctgatgttgccggtactgatgatgcagttaatgtgctgtgcctgtgtctggatatcgctgaccaggacggtatcggtcaggaagaagaagcgcaactgaagaaaattgcgcaggcgctgcagttgccgctggagcagtacctgtga

SEQ ID NO: 18629 - DNA, 153 bp, Escherichia coli
gtgaaaagtgcgcgccttgtgctggctgtcatcctgttgtttctggtagtggtggttgatttcaccggacgactgatgtcggtgctggcagatggtgtgctggtggcgatggcgctggtcgtgctccggcctttactgcgtaaatctgaataa

SEQ ID NO: 18630 - DNA, 393 bp, Escherichia coli
atgtctgaacccttatccggttccggcacggctgcggcgctgggtggcgcgacggtattcgggctgtttaccgggatggatttcgggattgtgtttggcgcgttcgccggggcgttatttgtggcaacgatgccgcagtcactttcagtctggcgcgtggtggcacattttctggtgtcgtttattgtcggcgtgctgggagcgcgtgtgctgtcagcctggattgcatcaaaaacagggtatgacggtacatcagcagatgcgctttgcgcggtgctggtctcggtggtgtcggtgaagattctctcgttcatccaccagcaggatattgcatcgctggtgtccggtgtgttctcccgcctgcggggtggaggaggcggcaatgttaagtaa

SEQ ID NO: 18631 - DNA, 276 bp, Escherichia coli
atgttaagtaaccttcccggattgctgaatgtggcgttatgcgcggttatcgtgctggcgctctttttttatcgtcgccgtgattccagacataaaccgctggtgtcatggctggcctggctgctgatgctgctgtatgcctttgcgcccctcagctatctgtgtggtcgcccgttagcaacgggctggctggaagtgttttttaatctgctgttctgcgtgctggtgatacgcgcacgcgggaacgtcacaaaaatctttccattgttgaggtga

SEQ ID NO: 18632 - DNA, 378 bp, Escherichia coli
atgccgggtaaattcagattcagccgtcgcagtgaaaaaaatctggagggtgtcaaaccacagctggttgctgtagttcgccgtgcgctggagctgacggaggttgatttcggtattacggaaggcctgcgcagtaagtatcgccagaaacagctggttgcggaagggaaaagccagaccatgaacagccgccacctgaccggtgatgcggtggatgttgtggcctacattggcagtcaggtgtcatgggagtggcctctgtacgagaaaatcgcacaggcatttaagcaggctgccgcagagctggggatcgctatcgaatggggcggggactggaaaacgctgaaagacggacctcactttcagctgaagcgataa

SEQ ID NO: 18633 - DNA, 156 bp, Escherichia coli
atgccgcgaacggcggtgaaacgggcactggtagcgatactggtgccttttttattggtggggtgcgtcagcctggataaggcgcgccagcttttcgataccgcgtctcaggtctgtgaaattgtcgacggtgttcggcagtgtctgcagaactga

SEQ ID NO: 18634 - DNA, 351 bp, Escherichia coli
atgccatcacgaataccccgcgcctgtcgtaagcgtggatgtgcaggcacaacaacagacagttcgggttactgcgataagcatcgcggtgaaggctgggtacagcaccagcgcggactgagccgccaccagcgtggctatggctcaaaatggacggtgattcgtgcccgtattctgaagcgcgataaaggtctgtgtcagttgtgtctgcgtgccggtgtggtgagcgaggcgaaaaccgtcgaccacatcatcccgaaagcgcatggcggaacagacgcagacagcaacctgcagagtctgtgctggccctgccataaagcgaaaacagcgagcgaacgaatcaggtga

SEQ ID NO: 18635 - DNA, 183 bp, Escherichia coli
atgtttctgataattctcacgcctctggtgggcgtgctgggtgtgcttttgctggcgtatggcgcctggctgatttatcccccggcgggttttgttgttgccggggcgctgtgtctgtgctggtcgtggctggttgcgcgttatctcgatcgcggtcaccgggtcgcctccggaggtgagtaa

SEQ ID NO: 18636 - DNA, 324 bp, Escherichia coli
atgctcctgaaagaagaggaaattaaatctcacctccggctcgatgatggtttgtacagtgacggcgattttctgaaattgctggcacaggcggtacagaaaagaacagagacatacctgaacaggaagttgtatgcaccggaagagacgattccggaagacgatcctgacgggatgcatctgactgatgacgttcgtctggcaatgctgatgctggtcagtcatttttatgaaaatcgctcaacgatcaccgatgtggagaaactggaaacgccaatgagtttcagatggcttgctggcccttacaggattgtcccgctatga

SEQ ID NO: 18637 - DNA, 417 bp, Escherichia coli
atgaaaatcaggcaaagtcagaccagtgccacttaccttttaccggatcccggagagctgaatcgccgaataaagatccgccttcgggtggatgaacccaccgctgattttggtacggagccaacgtatccggagtcgtttgatgtctgggcaaaggtggctcagccaggcgctgccgcttatcagggctcagtgcagacagaaaatgtcgttacgcattattttacaatccgtttccgtcacgacatcacggcagatcatgaggtggtttattacggtcaggagtaccggatccggcgaatacgcgacctgaacggtcagcgacgttttttattactggaatgtgaggaactgcgtacagcgcgacgatggggtgaatgtcatgaatcagacagcatttttacacgtcgactttaa

SEQ ID NO: 18638 - DNA, 525 bp, Escherichia coli
atgaatcagacagcatttttacacgtcgactttaaacaaccaaaggagctggagtttaatcgtgcccgtctgcggcgggcatttgtgcagatcgggcgcgtctatatgcgcgacgccagacgtctggtgattaaacgcgggcgttccggtccgggagagaatccgggatatcagaccgggcgtctggcccgctccatcggttattacgttcccaaaaaaacgacgcgtcgccccggactgatggtgaaaatttctcctaaccagaaaaacgggcaggggaatcgccgtttccatgaaggcgcatcctattatccggcatttctgtattacggcgttcgccattcagcgtatggaatggataaaaaggataagcgacagaagaagcaccattcttcgacttttcggctggccccgcgtaataactttatggctgacgttattgagcggcggcgtcactggacgcaggaactgttgtcccgtgagctgcagcgttcgttacgtccggtaaaaaggaagcataaatga

SEQ ID NO: 18639 - DNA, 564 bp, Escherichia coli
atgaaactgacaacgataattgcggcgttgcgtgagcgatgcccgcgttttgaggatcgtgttggtggcgcggcgcagtttaaggcgatccctgatgccggaaaactgcgactgcctgctgcctatgttgtcccctctgacgatgcgccgggggaacaaaaatcacagaccgattactggcaggatttgacagaaggcttctccgttattgttgtgctcagcaatgagcgtgatgaaaaagggcagtgggcagcctatgacgccgttcatgatgtccggagagaactctggaaagccctgcttggatggatgccggatccgcaggggggcgagattgattatgccggtggcaccctgctggatctgaaccgttacgaactgtattaccagtttgattttacggcgaagtatgaaatcacggaagaagacacgcgacaggcagaggacgtgaatgccctgccggatttatccctgctgagtattgatgtggattacatcgatcctggtactggcccggatggtgacattgagcaccatctggaaatgcgtttccctcagaaataa

SEQ ID NO: 18640 - DNA, 162 bp, Escherichia coli
atgtttgtgaaaccccggaaagggcggtcagttcctgaccctgcccgtggagaccttttgccttctgacgggcgaaatgtggaagaaaacagctactggttccgccgtatagcggcgggtgatgtggtacgtgttaaacaggataaggctaaagaatcatga

SEQ ID NO: 18641 - DNA, 1497 bp, Escherichia coli
atgacaataagttttagtgctgttccgtcgaatacgctggtgccgttgttctacgccgagatggacaattctgcggcaaatacagcggtgaccagcgcgcctgcattactgattgggcatgcaggcaacgatgctgccattgaggttaacagcctggtgctgatgccgtcggcagattatgcccgtcagatttgtggagcggggagccagctggcgcgtatggtcgaagtataccgtcagacagatcctttcggtgaactgtatgttattgcggtaccggaagccaaaggggcggcggcaacggtcagggtgacggttaccggagaagcagaggaaagcggcaccctgagtctgtatgtcggacgctcccgtgtacaggtgcctgtggtgaatggcgataatgccactgcggttgccaccgcgattaaggaagcggtaaatggggttatcaccctgccgtttacggcgtcatctgatgcaggtgtggtgacactgactgcccgtcataaggggctgtatggtaacgagctacctgtctgcctgaattattatggttctggtggtggtgaaattctgcctgcgggacttcaggtcgtgacggaagccggaactgcaggtagtggagcgcctgatcttaccgccgctgttgccgctatgggcgatgaggtattcgattttatcggtctgccgttcaacgatgccgcctccattaatatgatgatgaccgaaatgaatgacagcagcggtcgctggagttatgcgcgccagttatacgggcatgtctataccgcaaaactgggaacgctgtcagagctggttggtgccggagatatgcataatcagcaacatatcacgcttgccggttacgaaaaagaaacccagtcgcctgtcgatgaactggttgccagtcgccttgcccgtgaagcggtatttatccggaatgatcctgcccgtccgacacagacgggggagctggtggggatgcttccggcaccgaaaggtaagcgattcatcatgacagagcagcagacccttttatctcacggcgtggcgacggcttatgtggaaggcggcacgttgcggatccagcgttctgtaaccacctacaaaaagaatgcgtatggcgtggcagacaacagctatctggacagtgaaactctgcataccagtgcatatgttcttcgcaaactgaaatcggtcatcacaagcaagtacggacgtcacaagctggcaaatgatggtacccgttttggtccggggcaggcgattgtcactcctgccgttatcaaaggggaacttctggcgacatatcgtcagatggagcgtgccggtattgtggaaaattacgatctgtttaaacagtatctgatagttgagcgtgatgcggataacccgaaccgactgaatacgctgttcccgccggattatgttaatcagttacgtgtctttgcggtggttaaccagttccgtcttcagtattcagaggagtcagcataa

SEQ ID NO: 18642 - DNA, 357 bp, Escherichia coli
atggcaaagatcgccggaacctgtttttttaaagtggatggtcagcagttatcgctgacaggtggcattgaagtgccgatgaacaccaatgtccgggatgatgttgtcggcatggcaggggatgtggattacaaggagacctggcggtcaccttacgttaaaggcacgtttaaagtgcccaaaaactttccggtcgacaaaattaccacatcagaccagatgacgattaccgctgaactggcaaacggcatggtgtatgtgctttcggctgcatggctgcacggggaggctaaccataatgccgaagaaggtacggcagatcttgaattccacggcgaagagggaggatatcagtaa

SEQ ID NO: 18643 - DNA, 330 bp, Escherichia coli
atgaacgttacagaaattgttttaaaaaaaccggtgacagcgcataacgaaatgctgcatgtgctggagttgcgcgagcccacgtatgacgaaatcgaggcgctgggttttcctttcattatttccggtgaaggcagtattaaactggacagccaggtggcactgaaatatatcccgttgctggcggggatcccgcgttcatcggcggcgcagatggcaaaactggatatttttaagaccagcatgcagatcctgcgtttttttacccagtcggagacgggaagcacctccggaaacgactctacaatgttgcctggttctggaaactga

SEQ ID NO: 18644 - DNA, 1950 bp, Escherichia coli
atggctgacagttttcagctgaaggcgatcatcactgccgtggataaggtgtcggcaccgctgaaagggatgcagcgccagctgaaaggctttaaaaaggagtttgccagcctgtctctgggcgcagcgggtgccggaaccgcagtactgggggcgctggcgctcccggtcaaatctgccattgcccttgaatcaaaaatggcggatgtccggaaagtggtggatggtctggatacgccggaagcgtttaaggcaatgacggagcaggtgcgcgacctgtcaacagaactgcccatgtcggcggaaggtatcgccgaaattgtggcggcgggtggtcaggctggtatcgcccgtgacgagctgatgcagtttactgacgatgccgtgaagatgggcgtggcttttgacaccacggcagaagaatccggtcagatgatggcacagtggcgcactgcctttaaactgacacagggagaggtggcaggacttgcggacaagattaactatcttggtaataccggtcctgcaagtgcgaaaaagatttctgatattgtgacccgtattggccctttaggcagtgttgcgggtgtggcctccggagagattgccgcaatgggggcaaccattgccggaatgggggtggaatcagaaattgcggcgacggggataaagaattttatgttgtcgctgacagcgggggattctgccaccaaatcgcagaaaaaagtgctccgctcgttgcgcattagcccgaaaaaactggcggcggatatgcagaaagacgcccgtggggccatgctgcacgtactggattctctggcgaaagtgccgaaagaaaaacaggccgccgcgcttaatgagctgttcggcaaggaatcttctggatccatcgcgcctctactcacgaatctggatttgttgcgaaccaactttaatcgtgtggcggatgcgcagcagtatggcggctcaatgcagaaagaatatgccgcccgtgccgcgacgacggaaaatcagttgttgctgctgcagaaccagatcaatgcgatttcttccacgctgggggaaaccttcctgccttcaatcaatgaaggcataaaagagatgaagccttttctggaggaagtgcgcacgtttgtcagagaaaatcctgaggtcgtaaaaaccatcgcgaaaacggggctggcgctgctgacatttggtgttgccattggctcgctgtcgcggatgggaaaaatccttagtggcgtgatgaatatgacgccggcaaagggattaattgcgcttctcgtcggtggcgcatatctcataattgataactgggaaacggtcggtccggttgtgaaaaaagtctggcaggaggttgatctggttgtcagagcaatggggggatgggaacaggcagtaaaaataatagcaacggtttctgccctgtatattggtgtgaaggcggtggcaagtattcgtgcggcaacagtcgcccagaatcaatggacagcggcggcaggaaaaacagcgctgaaattaaagggcctcggaaagatcagtctgattggtggattgcttgaactgggcatgatggcgcaggagtttgaaaaagaacatccctggcttgttaaaaattttgtggctgatgcactgaacagtggatttggtctgaatgataagttcgacgagtggggcaaacagctccatgattttgtctatgacatgaccggatggcagataccacgtggtgatgggtatttatctcccgataaacgctacaccccgaatgtatcactggaaaggaatcagctgttaagccttgcatcttcaccggcaacccgcagcgaacttaaggtgacgtttgacaacgcgccgcctggaatgcgcgttatcgatttgccgaaaacaggcgatccctttatgaaaatcacccatgacgttgggtattcacctttcaggcgttaa

SEQ ID NO: 18645 - DNA, 1392 bp, Escherichia coli
atggattttccctccttaccttctttgtcctctttgttttcttcatcttccggaacgacctggcgcgataatctttatgacgcttcatttcgtggcgttccgttttcggtggagagcgacgagggggtgttcggacgtcgcgttcaggtccatgaatatccaaaccgtgataaaccgtacacggaggatctcgggcgtgccacgcgacggctgacgattaatgcgtatctcgttggtgatgattacgcagagcagcgcgacaggctgattacagcgattgaaaccgccgggccggggacgctgatccatccgcagttcggtgaaatgcagggctgtattgacgggcaggtaaccgtttctcactccggcactgaaggccgtatgtgccgggtttcatttcagtttgttgagagcggggaactgtcatttccggtcgccggagctgcaaccgccagaaaactggaggagtcgtccgtattcctggacgagttgattgaagacatgttcggcgattttgatctcgcgggaatgccggactttattcagaacgatgttattgcccggacgaccgatatgctgggaaccgttcagacagctttcaaaatggttaattcggctgtttctgccggagcgagactgctgcagggcgatttatccgtcattctgatgccgccgtcggttgccagtgattttgtgcatatgttgcaggatacctggcgggccggaaccagactggtggataacacacaggatctggtgcagtccataacaacaatgtccggtattacgctggatccaggactggcaccgcgtgcggtgtggcccacagattccgcatcggttgtgaggcaaaaacagcagacaaatctggtggcagccgtcatccggacgacggcaatcagcgaggctgtaagggcggtatcttcactgccgcaacccggaagtctggtgaaaaatcagcaggcggttgtggctgttggtggttccactgaacgtcagtccgatattattcatgtttctcatccggcgcttggcagcgtggcagccagcacagaacaggatgaaacagcgcaaccacccacgcgggaaaaacttaccatcatacgcgaatcgctgaatgcggcgattgaacaggagctcagacgcacgatggacgacgggctgttttttcagctgacgtcattacgtacagagctgaaccgggatattcaggcgcgtctggttcagacggaggaaaccgcagagcgaacgccagcggaggtgctgcctgcacttgttctggctgcgtcatggtacgacgatgcgtcccgtgaaacagatatcctggatcgaaatgccatctcccatccgggctttgttccggtcaggacattaagggtacccgtcagatga

SEQ ID NO: 18646 - DNA, 1056 bp, Escherichia coli
atgaataataccgttttacttcgggtttccggtcgcgaatggggcggctggacatccgtccgtatcagtgcgggcattaaccgtattgcccgggattttaatgttgccattaccacccgctggcccggcagccgggattatcagccccggataaaaaatggtgagctggttgaagtgcttatcggggatgagcccgtgctcaccggatatgtggaggcactaccgcttcgttatgacgcgagcagcgtcagtatgggggttgtcgggcgaagcaaaacagccgatctggttgattgctctgctttgccactccagcagagcggaaaaaacctgctcagaatagtcactgaactggctgcgccatttggcatcactgttgttgatgctggcgtgcctcagacagcggtgattgatgcacagccagaacacggcgaaactgttgccgattgtcttaaccggttgctggggcaggttcagacgctggcttatgacgatgaatgcgggcgactggttcttgggaaacccggaacaggcaaagcggcgacggcactggtgctgggagagaatattctttcctgtgacacggaaagaagcatcagagagcggttttctgaatatcaggtcagtgggcagcgcccgggcaacgacgatgattttggtgaggccaccattgccgcaatacgtcagaccattcaggacaatggcgtgacccgttatcgccctttgttgattcagcagtcaggcacagcaacgacagcaacctgtaaggcccgttgtgaatttgaagcgcgccaacgggctgcgcttacccgtgagacaacatatacggttcagggctggcggcagggcagtggcgcgttatggcgtccggggttatctgtcatcgttttcgacccgctgaataattttgataatgatgaactggtgatcgcagaagttacctataaccaggacgaccggggcacgacgactgaattacgggttggcccggcagatgcttatctccccgagcctgttaccgccaggaagaaaaaaaatgttgaggaggatttctga

SEQ ID NO: 18647 - DNA, 534 bp, Escherichia coli
atgaacgggttttctcttcgcaatctgatttcccgggctgtcatcacggcggtggattccgccagaaagtgtcagtctgtagggttgaaaatgatagccggagatcagaaacaacacgttgagcaccttgaaccttatggttttacatctgccgcacagaacggtgctgagggcgttgctttatttccggcgggcgatcgttctcatggtgtggttgtggtcgtggctgacagacgttaccggctgaaaggactgaaacgtggggaagtggcgctttatgacgatctgggacagtccgttgtcctgacccgttccggtattgtggtgaacggggccgggaagcccattatttttcaaaacgcgcctaaagcgcgctttgaaatgccggtcgaatccaccgccgatattactgacaattgcgacagtggcggactcagcatgcagcaaatgcggcagacctacaatgcccacaaacacaccgaaaatggtgatggtggcgggatcactgacacgccggatcaaccgatgggctga

SEQ ID NO: 18648 - DNA, 414 bp, Escherichia coli
atgatgattaatgttaacgggcgacccgtgtcgaccggggctttgctcgaccttctgacgcgtgctgtgattatttcgctttttacctggcggcgtgccgggcgggatgatgatgcaccgcagatatttggatggtggggggatacctggcctgctgttcagaatgatcgcacggggtcgcgtctgtatctgctgcgacgcagcaagctgacaaataaaaccccgcagcttgccagagattatgcccgtgaggcgctggcgtggatggtggaggatggtgttgcttcccgtcttgatattaacgctgtccggaccgggacagactcgctggcacttgccattaccatttaccagcgtgacggcaatattcacaacattatttttgatgatatctggagtgaactgaatggctga

SEQ ID NO: 18649 - DNA, 1083 bp, Escherichia coli
atggctgacagtcagttttatcgccccggccttccgcaacttatttctatgatccggagcgatttattaacccgctttgagcaggatacgctgcttcgtcgtatggatgcggaagtgtatgcccgtgtacaggctgcagccgtacacacgttgtacgggtatatcgattatcttgccagaaatctgttgccggacatgtgtgatgaagactggttgtaccggcacgccagaatcaaacgctgcctgcgaaaagatgcggtgacagcccggggatttgtgcgctgggatggcgtagagggaacacctgtattgccagcgggaacgcagatccagcgtgatgatcaggtgaccttcaccacgacggcgacggtgaccgcagccgatggtcttctccgggtgcctgttgtggcagatgaaccgggggcggcggggaatacggatgatggtattgccatgcaactgggaacacccgtcagtggtctgccgtccacagggtacgcggacaccattacagacggtgaagatattgaaaatctggaaatatggcgtgcccgcgttatggaacgttattactacattccacaggggggcgcagaccctgattatgttatctgggcgaaagaagttcagggtattaaccgtgcatggactttcagacactggaaaggcattggaacggttggcgtgatggtggcgacaaacgatccggaacatccggctccggatgaaagcgtcattaatgcagtcagagaacacattcttcctctgacaccggttgccggaagtggattgtatgtattcggtgccacagaaaaagtcatcccgatgacgattgcattatcgaaagacacaccgcagatcaggactgcaataaaagcagagctgaatgcactgatgttacgggatggtgtgccagaggggcgtatgtatctgtccagaatcagtgaggccatcagtttgtctgctggtgaagtggctcaccggttaatcgtcccttcatcggatattgacctgggggagaccgagcttccggtgctcggcgagatcacctggcaggcttatgacccggcaaggagtaaataa

SEQ ID NO: 18650 - DNA, 960 bp, Escherichia coli
atggattcgttacaggatgattatacaaagctgctgtacggactgatgccgccggggcctgcatggagcgataccgacggcgtgcttgatggtctggcaccatcgcttgtacgtgttcatcagcggactgatgaactgatggctgaaatcgatcctggtcagtcaacagagctgattgaacgttatgaagaattgtatggtttacctgacacctgctctcctgttggagcccagacattacgccagcgtcagcaacggctggaagcaaaagccaatgtggctggtggcataaatgagcagttcttcctggagcagcttgaggcgctgggatataccggcgtgacgatcgaacagttccagcacctggatgcaagccccgatccggaatggggtgatcgctggcgttatttctggcgtgtgacgttgccggtggatgccggtgctcagtggcagacatgttcggacacctgtaacacaccgatccggacgtggggtgatacggttgcggagtgcgtgattaataaattatgtccgtcgcatactgttgtcctttttgcatatccggatgagtctggtgaagggcaacaagccgccctgactataaacagcctctcctttcaggccggacacaagacgactgagccattagcgattaatcatacaggtgttcattttgcggttgttccggcactgacaggtaagccgctgacaattaaccggattaacttttatgccgcccgtccgatggcagaaccactggtactcagcagggcgcaattgcactcaggtctgccgacaacggaccccatgaccatgaacagcgcacagttgcagacgggatacaggacccgctcccccgtaccggttaacagtatgcagttgcagacagccagcagaacccgtgaaccgttattgattaatcacccgggactgcattttgctgtggtcacgtccgaatga

SEQ ID NO: 18651 - DNA, 159 bp, Escherichia coli
atgttgaccaccgggaacattttaatgccacagatgcgtaatccggttgccagcagcaataaaccgcctacggcgctgaagtctgccatcatcgacggtgtggtcagcggtaatatcagcgcggcagcccacgccagcgtatcagtaatgggatactaa

SEQ ID NO: 18652 - DNA, 612 bp, Escherichia coli
atgaaacgtgagactcaaaaagaacacaatggttcttttgctcctgattcaaaagaacctgttatcaatagaatttttaaactagtagatcgctatcgttcgagaaatgaagctgcgaaagcgtggggaatcaacatcaatacgttacagaactattacaaacgtaaagacctctctccagtaccaagaaaaactctgttagaaaagatagcgcagtgtgaaggggtcagccttgaatggcttcaaaccggagagggaaaagaaccagaaatgaacataaaaagaactcaagacggtttagtgccgcctcattcagatttagatgataaaatcctatcgctgatccgctttttgtctgatagcgagaaagaagcgttattccaggtgcttgctcgcaaagggatagaaacactactttttctccttgacgaagataatattcgcttactacaaatggatcgcgtagtgaaagagaaaatcctgggaatccagcccagaacgcccgaggagcaggcttttgcagataacgaggcgagagagtgtgataccactcatcctttacgccatgaacagtccaagagcctgacaactaaaaagcagcaggcccgctga

SEQ ID NO: 18653 - DNA, 249 bp, Escherichia coli
atgactcgaaaagaagatccgcgtgccgattggcaccctgaaatcattaaggcagagattcacaaacggggactgtcatttcgcgcactgtccattcaggcgggttacagcaaagactccctcaagagtgttttacgcacaccgtgcaaaccttatcagcagattgttgctgatgcgctgggggttgcaccggaaactatctggcccagccgctatcagacagaaagctacattcagaaggtatcctga

SEQ ID NO: 18654 - DNA, 906 bp, Escherichia coli
atggcaagaatgaaccaacaaacgttaaataccttaaattcatgtgttaaaagcatctttaataaggcgctaaaagaatcatctccactatatccacaaattacaacaaaggcggcttcgtctggctctgttaatgtctacgccacattgggggcgttcccaagtttgcgagaatgggttggcgacagggtggttaaatctttaagtgtttcaagtttcactattgaaaacaggaaatttgaatctaccgtgtcaatttcacgagaacaaatcgaagatgaccagatagaattatttggttcggttattcgtgatatgtcagagtctgctgcaattcatcctgatgagctgctctttgagttaatcaaaaaaggtttcgttcaaaaatgttatgatggagttccatttttttctgagaatcaccccgtaacagtagggacagaaacgaaaactgtatcaaacattcttctacctaaaggaaaagaagaatctcctttatggttgttaatcgataactcaagggctgttaatccttttatctggcaggagcgtatcccgtactcaattgatattattgatgacggtaataatcgcgatgtattcatgcgtgacgaatatttttatggcattcgtggtcgtggaaatatggggtatggcttatggcaattagcctttgccagcaaggcaccattaactcatgataactttaaaacgctgtatgataatatgtcattacaaaaaaatgatgcaggtcgcccgttacgtgtaacacctaagttattgattgttggacaatcaaatcgtgaagcagcattcaagatagccaaagcatcaattcttgatactttggcaccaaacccaaattgtgggttggttgatgtcattgttacaccattccttgactga

SEQ ID NO: 18655 - DNA, 471 bp, Escherichia coli
atgaatactctgattaaaaaacattttagtgatgttgagcagtatttacctgaatcagcaaaagaaataatttgtgttatcggtcacgaaagggctattgaattattttctgtttttggtggtgttggcattaccttctcagctaatagcatctcacctggtacagcggaagctaattcaatgataaaacttttgattggtgagcaggcacatcaggctctgtgcaagcattttgggtattatcggatatatataccacgttgtacgcatgcactaattgccatcaaaagaaaaaaaatcattaatgattttttctcaagactgaaaagtggtgcaaccgttttagcagcaaaaatcgacgtatgcaaattatatggcgtgtctgaaagagaagttcataagctaattaaaaaatactatgaaacagctcgcttacacgcgaccgtaacaagcatcataaatgacctttag

SEQ ID NO: 18656 - DNA, 294 bp, Escherichia coli
atgaatcataaccatgagattgatgccgggttagttgcctgtactaattacctgatagcttgcaagaataaagcgataaaccctttatttcacacactgccaatagaggattctgtaagatatcaaatggttagcattgtaaacagtgttagatttattggggaattactatgtgaaaacattgataaagaacaaaaaatatacggggaattcttaattagcactaccgatataatggaaggattcatttctttgattagtgaactacagaattgccagaaaaaacgcttttaa

SEQ ID NO: 18657 - DNA, 210 bp, Escherichia coli
atgataaataataccacaccaaacaggggaaaaactccctcagatccaatgaattttacgtggcgttttctggctttaagcgcagcaaagccgcgcattatcactattgaagcccatagcgaacaggaagcgcgcctgctggcccctgaaggttttgtgatggtatttgttgcacgtatccgcaatcaattgaaatgggatgtgaaatga

SEQ ID NO: 18658 - DNA, 186 bp, Escherichia coli
atgccaacgggtacaaccaacaacaaatctcaacaaaaaacagctagaatccctctagaagttttaagcgaaatgaatttggtcaaagaggaaaacgaaacagacgcgcagtttatcgttacagccatgcgtggcgagatcaaacgccgccagcgtcgtagaaagcaagaaatgcaagagggttaa

SEQ ID NO: 18659 - DNA, 1110 bp, Escherichia coli
atgcacagaattgacactccgacagcagttaaagataaatttggcccgggcaagaacggatttactgacgggaatattcgtacagggcgtcatgccacctggctgaacagtgccatgtgggatgcccttcaggaggaaatctgtggtgtcattgagaaggccgggatagaactgaataaagaggaacacgaccagttatataaagccatattattactggttggcggtgcgattaacgaagaggcattgctgataaaaaataatctttcggatgtcgaagacagtgatgaggctgttgaaaacctcggattaaaacccacggtggacaaggcaaaaaatgccgttcagcgtgatggagacaccatgaccggggagctgaaaatccgtggtgttaatgcactgaggattttcaacgaagcctttggtctgatttttcgtcgttcggaagagtgtctgtacctcattcctacccgggaaaaccagggcgagagtggtgatattgggccactacgcccctttacgcttaatctcaggaccggtcgcataactatgggacatggtctggatgttacagaagatgtatttgcaggccgttttgcgattaacagcagtaacggaacgtggattcagatgcgtgacaacaacgttattttcgggaaaaacaggataaatactgatgctgctcaggcgcttctgcgtcaggatcatgcagacagaaagtatttcctggctggtcttgggaataagcagtttggcatttacatgataaataatagccgtacggataatggtacggacggtcaggcgtatatggatgatgcgggaaactggcgatgcgggcgtcaggttataccgtcagactacggaaactttgatgcccgctaccagaccaaaacaggtggcgtacagaattttcagtataccagtgaggtgttttacaacccgggcgggaacgagcacagctggacgtttcgagcaccttctggttgtgttttgtcaggcattaatgttcaggatactggccgtaactctgcagacaatatcggtggcgtgtattacaaacaggctcagatttatattaatggtgcatggcgatctgtatcaggttaa

SEQ ID NO: 18660 - DNA, 531 bp, Escherichia coli
atggaactctcaaacattgcgcgttactaccctgaagacatgccttatggtgacggtattcagtatttccgtagtgaagacgggcaggatttttatgaatcactggataaattcacgaagaaatacaagctgtgcacgcatcctgaaaccggcgttatttattccgtggcggaagatgtatcccgtctttatcccgttggttttaccattgtggaagtggatgaactaccggatggcttttgtatagaggcgcgctggtattataaagacggtgaagtactaccggtccctgttgactacaggcagcaggcagagtcggagcgtgcacgtcttactgcgattgccgaacgggaaatatccgataagaagacggatttacttttgggaatcatcggtgatgaagaaaaagaaaagctgacagtctggcgcatttacgcgaaatcgctgcaggcgatggatttcagcaccatcactgataaaacctcatataacgtcattgaatggcccgtctctccggaagcctcttcctga

SEQ ID NO: 18661 - DNA, 2016 bp, Escherichia coli
atgcaacatcgtattattctccccggagccactacgctgacccggttgatttcagaggtaagggaaaaggcgacgttgcgcctgtggaacaaactggcactgataccgtcagccgaacagcgttcacagctggagatgctgctggggccaactgattgcagccgcctgtctttactggaatcactgaaaaagggccctgtgaccatcagtggtccggcgtttaatgaagcaattgaacgctggaaaactctgaacgattttggcctgcatgctgaaaacctgagtacactcccggctgtgcgcctgaaaaatctcgcacgttatgctggtatgacttcggtgttcaatattgccaggatgtcaccgcagaaaaggatggcggttctggttgcctttgtccttgcatgggaaacgctggcgctggatgatgcattggacgttctggacgccatgctggccgttatcatccgtgacgccagaaagattgggcagaaaaaacggctccgctcgctgaaggatctggataaatctgcattggcgctcgccagcgcatgttcgtacctgctgaaagaagaaacaccggacgaatcgattcgtgctgaggtgttcagctacatcccaaggcaaaagctggctgaaatcatcacgcttgtccgtgaaattgcccggccctcagacgataattttcatgaagaaatggtggagcagtacgggcgcgttcgtcgtttcctgccccatctgctgaataccgttaaattttcatccgcacctgccggggttaccactctgaatgcctgtgactacctcagccgggagttcagctcacggcggcagttttttgacgacgcaccaacggaaattatcagtcggtcatggaaacggctggtgattaacaaggaaaaacatatcacccgcaggggatacacgctctgctttctcagtaaactgcaggatagtctgaggcggagggatgtctacgttaccggcagtaaccggtggggagatcctcgtgcaagattactacagggtgctgactggcaggcaaaccggattaaggtttatcgttctttggggcacccgacagacccgcaggaagcaataaaatctctgggtcatcagcttgatagtcgttacagacaggttgctgcacgtctttgcgaaaatgaggctgtcgaactcgatgtttctggcccgaagccccggttgacaatttctcccctcgccagtcttgatgagccggacagtctgaaacgactgagcaaaatgatcagtgatctactccctccggtggatttaacggagttgctgctcgaaattaacgcccataccggatttgctgatgagtttttccatgctagtgaagccagtgccagagttgatgatctgcccgtcagcatcagcgccgtgctgatggctgaagcctgcaatatcggtctggaaccactgatcagatcaaatgttcctgcactgacccgacaccggctgaactggacaaaagcgaactatctgcgggctgaaactatcaccagcgctaatgccagactggttgattttcaggcaacgctgccactggcacagatatggggtggaggagaagtggcatctgcagatggaatgcgctttgttacgccagtcagaacaatcaatgccggaccgaaccgcaaatactttggtaataacagagggatcacctggtacaactttgtgtccgatcagtattccggctttcatggcatcgttataccggggacgctgagggactctatctttgtgctggaaggtcttctggaacaggagaccgggctgaatccaaccgaaattatgaccgatacagcaggtgccagcgaacttgtctttggccttttctggctgctgggataccagttttctccacgcctggctgatgccggtgcttcggttttctggcgaatggaccatgatgccgactatggcgtgctgaatgatattgccagagggcaatcagatccccgaaaaatagggcactgttgcaaatag

SEQ ID NO: 18662 - DNA, 678 bp, Escherichia coli
atgaaaaactctttaaaaagaaatggttacgcagataaaaccgcaagcaagcaaaccgagaaagaacggattattgaggctatggatataatccgcttcggtgagcgccttaaatcagctatggaagacagcggattaaattacatggcactgtcaaaactgagtgggttgtctgaagccacaatacgaaaatacgtgcatggaaagatctatccaggtatagacagcgcagctttggtggctcacgcatgcaatgttcctgtggagtggttgatatcaggaaaatccgtcactgaaaacaataatccgcaacaaagtccgaccgaaagaacagaattaaacctcctgttacagcgcatgaatactcaagatttagatgctttgcttgatgttttttacaacatcggtatcaaaggagtcctaaaacgcctacaacaacccaccaggcaagctaagcaggcctgcaacgacctagacgaacaggagaatgccatcagaagcctgaacatcagggaatcgcttaaagacgctatgtgtatggctctggatggaaatgaagaaactgacaaagagattttgcgacgcatcgaatctcgtgcacggactgggtcgccaggtggtgagaccattgccacgccggagcaagaaacgaaacctgtaagcaaaaaaccagcatga

SEQ ID NO: 18663 - DNA, 273 bp, Escherichia coli
atgcagttatcgagacaagatctaactgacttgtttgttcgtcgcggacaagactggtctagcaaagcaattgcagccgcccttgataataaaggggttgatatcactacgatggagcgtgtacgcggcttaaaacctggagcaatgcgtaacgtgttttatcgccgcgtacctgcatatgaatcagcaattgcagaagcgattggtgtggaaccggaagttatctggccatcacgttatcggaataaaaatccgcatagcaacgctgcatag

SEQ ID NO: 18664 - DNA, 2043 bp, Escherichia coli
atgtggattacagcaaaagagtgtgctggcattggagggctaccaacacgtgaacacaatgtcagggcgcgtctagatcgtgtaattgaaaataaacctgaattaaggcgcaagcgtgaaggtaccaaagcattcgagtatcacatcgactgcctacccgctgaagcgcagaaagttttacgtaagcgcctgactcatcaggtcctggaagatgcacaactgcccgccgtggttgagcagaaggcagttaaaaacgtcgccgttcgcgatgaactggaagtgatggtcaaatgcccggagctggcattacgcgaagttcaggcactgaccgacaagcaaaaggccatcgctgatgcgcggatattgctggctaccgaagtgcataaactgcgtgaatacgccggaatgtccaggacggcagcagtaaaacacatcgttgatggtattcgtcagatggcattgcccgagcgtattatcgaggccgcaggtactgccaacgccagacagggtaagcgaactggcgtcagctggggatgtttacaggaatggtattccacctggctgatggcgcgcggtgatgccaatcagttactggcgttactggctcccggtcatcataagggaacaccgtgggagcaggtctggtggttgagcgatttctttatgttctatcgctcatggaagcgcccgaccattgaatatgcgtatcgcgagttttcagcctggtggcatgaaaaacacgcgaacgatgcgggaatgctggcggcactgccttcagttcacgcagtaagacgggtgttaagcagcgtcccggtgattgttaaagagcgtttccgctccaccggttcagcctggcgttcgctcaatccctttgtgcggcgcgactggagcacattaccggttaatgcggtatgggtcggggatggtcactgtatgaaactgatggcattcagccctgccaccgggaatacattccggccagaagtgacactggttatggatgcagggcaacgctttattgtgggctggtcgctgtccctgtcggagaacgtagtggccgttgctgatgcattgcgtcatggcatgtcacaacacgggataccgctgatttattactccgataacgggggtggtgaaaaaaaccaggtacttgatgccgatattaccgggattctgccccgactgggtgtggagcatcacacggggatacctggtaacccgcaggggcgcggggtaatagaacgagcaaacaaaggaatacccaaagatgtggctctgagtttccagacgtactgctcaaaaaatgcagacaaggaaacggtgatgatgcagcaacgcatcacacagtcagcaattaaggccacccacaaagggaaagagctgacaaagcggcaggttcaggctatgggagaagttcccacctttgagcaactgatggccgcaatagagctggaggtgaaacggtataacaaccggccacacagcagccttccccgcaaagaggatggtgaacattacagcccggcagcgtatcgccggaaactgataaaggagcagaaagctgaaatcgacatgctgtcgccggaagaactgcatgaaatgttccgaccggaaagcatctgcacggtgcgacgcggtgaagtggtgttattcagaaacatctatttctcaacagaactggcagcagagcacggaaatgaagtcagggtttgttacgacattcacgacgcaaacagcgtgattgtcaggcggatggacggttcttatatctgcgatgccatctggaacggtaataaggttgatgcgttcccgaaagctgttatcgaacagcagcaggagaaacgcgccagaggccgcattgcacgggccacgcagaaaatcgaagaggcgaaacgcgagcttaccccggctattacgcagaaatctgagtttaattttggatttggtctggagcgcccggagaaaaaggaaaaagaagaactttatttattcgcatctgaacgtgagcgcaatttaaagaaaaacggcacaaacaaccgttaa

SEQ ID NO: 18665 - DNA, 894 bp, Escherichia coli
atgagtttaattacgcaattaaatgacgtaatggcccgtcgcggctatacgcagacccacgtcgcccgtgcaattggccgtagcagcgccgttatcaaccagtatttgcagggtaaatatcagggcgatatggctgatattgaagaacgcatttctgcctttgtgacccgtgagcgggaaaaggaaaacagccgccgtattaaagcaaagtttgtgaccaccggtatggctgccaaaggactggaggtgctggcctacgctcacctggaatgtgaaatctgtgtgctgtatggcgcagctggccttggcaaaacaatgattctgcgtgaatacgccgccagaaaccgggatgcggtcctgattgaggctgacccgggctatacagccaggacactgcttgaggagttgtgccgccagctgggggtaaaggttcgcggcaacattcacgaactgattgatgcctgtgtgcgcgaactgcgtgattccggtcgtctgctgatggtggacgaagctgaactgctcccctatcgcgcactggaggttctgcgccgtctgcatgataaagcgggtatcggggttgtcctggcgggtatgcctcgtcttctgattaatctcaaggggcgtcgtggtgaatttgcgcagttatacagccgcgtggcgctggcgcttaacctgggcgacacgctggcgcaggaagattttaaccagatagccaccgggctgatgccggaagcagcagaaccggaaatcagcgaggcgctttacgcgcgctcgctgggtaatgcccgccgcctgttcaaactggcgcgcggtgtgtaccggatttgcgatatcagcgatgcgccggtcagtgtgcaggccatagataaattcgcagaaatgttaattcactga

SEQ ID NO: 18666 - DNA, 333 bp, Escherichia coli
atggaacagattgccgtaaaaaaagaaattaaagcactacggaatatcggtcgtaatggttgtatttattttaatggaacccccggtgaaattattccgtttgttgattgcttcgtgccgggtgaactgcgtattgatttatattcccgtgaacgggaaatcaatggaaccggaaataccagcgacgactgggatgttgatgaatgctgtgcgcgattaatgattattccttttgagcagactttgcaggggtttcgtcgggcttaccgccttgcacgcatgtgtgcccacctgccccggtatcagccccgactggcgtttacgctcagataa

SEQ ID NO: 18667 - DNA, 228 bp, Escherichia coli
atgatggaaaagcaggccattaatgccgtccgttcccgtgcccgtgtggctatccataccactggcggtcgcgtaacggggcagcatcaccgtttacctgtggtttatgcctgcccgcctgtgggtggtcctgtatggccggtaacggaaatcgttcagacattcagcggcctgcgccgcgtggttaaaacgtcctgtatcgacggctgtaccgtcgtatggcaatga

SEQ ID NO: 18668 - DNA, 216 bp, Escherichia coli
atggcggttaaattagaagtaattatctataccaatgaaaaaggcgcgactcttacccggattacagggagttattcgaaggatggcacttccaaaagggagcttcaggtggcaacaggattacatgatgttatcaaggaaacgcttagaaatgactataacggcgtgaatcttttttctgaaaacgttgcgcctcgcgcacataacacacattaa

SEQ ID NO: 18669 - DNA, 645 bp, Escherichia coli
atgacgactgaaaataaagttaagcaatacacgaaaactcaagcgcctgaaggttactgggtggatgcccgtggcgtaatgacacctgaaagccttatcaaagatattgaccgcgaccgcgagcagctggtcggtgagcttgtggagatggtgattgctgcctccgcctcgctgcgggaactgaaactgcgtgcgtttggtgatatccaggcatttattgacctgtcggcggagaaatacggcgctgtgaaaggcggcaaaaaaggcaatatcacgctttacagctttgacgggcgatacaagattcagcgcgccatgcaggaccgtatcgcgtttgatgaacgcattcagaccgcgaagtcgctgattgatgattgcctggctgactggacggaaggtgcgcgccctgaaattaaagccatcattagcgaggcattcagcacggacaaggaaggcaacattaacacagggcgcgttctggccctgcgtcgcctcgaaattgaggacgaacgctggaataacgccatgatgctgattggtgaagccgtccaggtgattggcagcaagagctatattcgtgtgtatgagcgcgttggtgattctgatgaataccgcgcaatcccgcttgatattgcaggggtttaa

SEQ ID NO: 18670 - DNA, 234 bp, Escherichia coli
atgcatcaggatatcaaagagtacagagccggaaatcgttgcgcggcgtattcgctgggtgcatccagagcagaacaacgcggcgattatgatgaggcagaaaaactgtggcgcaaggcagcgcaaagcccgtgtagcaccctgcgccgcatctgggctgaacatcgtgcggagttctgcgctaacgctcacctgaagggctggaggccacgccatgaatgcgaagaactttaa

SEQ ID NO: 18671 - DNA, 192 bp, Escherichia coli
atgaatgcgaagaactttaataagcagtatccggtagggactcgcttcatgcacactgcacatccggcgttgcgtggtggccgtgtggtgaaaaccgtttcacctgccagagattttaaatgtggttgtgtggttgaaattaatgtcgagccttatttcgttaaaatcgaaacactgaaagcaccgcattaa

SEQ ID NO: 18672 - DNA, 711 bp, Escherichia coli
atgaaaaataaatacatcgccaaaattaaaaagctgttacgccttgcaagagggacatcaagcccggaagaagccgctaacgctattgcaaaagcccaggcttatatgcgccagcatggtatcagcgaaaacgacgcggaattgttcgacattcaggacgctgccagcgcgggtgcgccgagtgatgccagtacaccgccgcgttatatgcacatcctgtgtgacctggtctgtaaagccttcggtgtcgagtgttacatctccggcgaataccgggcttctggttcactcaaacgttacgttcgtttttatggtcctgacagccgcccggaaatcgcggcctacgcgtttgatgtgctttcccgtcagatgatggcagagcgcaagaaatatcaggataaacactgcaaacgttgcggcccgtccacgcgggtggcccgtggcgaccagttctgcgaaggctgggtctttggtgcccgtgatgtcattgcggtgtatgacgtctccccggaagaaaaaagccgccttgagctttacagaaagaacctgcacagcaccaagggactgcgcgacggggatatgcgcaccgctaaagcgtgccggggtgcagagtctgccgctacagccggttttatcgccgggaaaaacgccagactgcatcagggggttaatggtcagagcaacaaaacgctggcactggggagggtgtaa

SEQ ID NO: 18673 - DNA, 228 bp, Escherichia coli
atggcttttaaacttctcagtgttaccgaagcaatataccagccgcccggagaacgccacgaatacaggatggatgacggtagcgcagcggttgagttccccggatatccgggggcttcccggtggcggttctatgacagtgcgggacgccggattattaaaagaaccgtgcacaacgccatgaaagccgccgtagaacgccataaaaggaggtttaactgcaaatga

SEQ ID NO: 18674 - DNA, 225 bp, Escherichia coli
atgaatattgaattttatgaacacaatggtaccgcagttatcactatttcctgctggttctgggagttccgtcactattgccgggttgtggatgcggcgctgtttgtggcccctgaagtgcaccataagagtgatggaggccttttaatgagaaccgtcatctacggtaagagggtcccgatgttacgggcgtttaaagtggcaaaacaggaggcggcgcagtga

SEQ ID NO: 18675 - DNA, 189 bp, Escherichia coli
gtgaaccagcaaaccagaataagcgataagagcctggccagactgattgccgatgcggacaaggtgctggatcggaacacccccgttgccgatgaggtatggtggcaggatttccgggccgcaatgctggaacttcaggcgcgccgcagggctgatagtgcagagtcagtggtaaatacaggagaatga

SEQ ID NO: 18676 - DNA, 180 bp, Escherichia coli
atgaaaaaccgtaaagcaagactgctgatagcaaaacccggacagcttatccgtatctcaaatcggcttgttgttcgctatagatatcttggttttagggagtggtcctctattcgtttttacggtgtctggcgaaacagaagcgcagcccaaaaccgctggaaaaatcacggtatgtaa

SEQ ID NO: 18677 - DNA, 411 bp, Escherichia coli
gtgaagaaaatggtttttgtggcggcattgctgacaattacccaacaagtgcatgcttcagcagctattgtagcctctaccgccgcgactacggctgctgtagctgctgcgaactctgcgaatatcgcaaaccaacaggcacagcgtgctgctaatgcatcagccagcgttcacccaatcaccattaagagcagtaagcaaaatctgggatttataacgtgcggcacgcgttctaatgaagctgtaggctcactgggatgtacggtatatggcgatagtgagcgcagagaaattccatggaaaacgtggcccggatacgttcttggctcgaagctcccggccagttatgaggtaaacgccgtgtcgtttgatcactataacggcgtggcaactgtctatttcacatactga

SEQ ID NO: 18678 - DNA, 279 bp, Escherichia coli
atgaaaattgaacaaatcggaatggcagccttccggcagcaggctgaaagcggtggcgtggatgagttcgtcgtgcagcggttcgatggtgtgtatcacctcttcgctgtgaatcgccgcgccggggtgtcctattttctacaggaacgccgtggcgattacaagacgtggctgtctcttgaccgtgccgccgcgttcctgtcggggattggtgtttcacgttttaccgtgcgttttgaggataacaaacatgctgaaaaagatgatcggagccattaa

SEQ ID NO: 18679 - DNA, 414 bp, Escherichia coli
atgctgaaaaagatgatcggagccattaaagccggtcaggcgtatctggggtgggatgatgccctttatcgtcagacgctggcccgcctgaccggtaaaaccagcaccacacgctgcaatctcgatgaactgcgcatcatccgggaatacatgcacgaacagggatttccgcgcaaagcgcccgccggtaaaggtcgccgcccccgtgttgcaatgagcagaaaatcggtattatccaaaattgaggcgttgctggctgatgccggtcgttcctgggcgtatgcggaaggactggcatctcacatgtataagcaacatgtgatcgaatggctgacagatgatcagctgttcggggtgatggtggcgctgacaaaagacgccagaaaacgagccagagcagcacgtaaacaataa

SEQ ID NO: 18680 - DNA, 468 bp, Escherichia coli
atgcagaccttcagtgaaacagatcttcgcgatgcgcaggcactgctgcccgattccgtacagcaactgattagcgtgattggcttccccgccctgacccggttaatccgttcttttggtggcgtgacgttaagcggtaaaaccggcgcacacgccggacgcaccggcggtgtccatgccctgttacatgatgtgctgaccgaagacgaaatcaacaaactgatccgctttcttggcggtgcaccgttttacattccccgttgtgatcatgcgttacgtgccctgcgtaacacccgttttatggctgatttacagcagcatgtaaaagacggatgctcacaccggcaggcgctggcactgctctgtccccgctacgggatttcagaccggtacgcatggcagctgatacaccgacgacaaaaacagacttcgctgaaaagccccacccaggtggggctttttgattaa

SEQ ID NO: 18681 - DNA, 288 bp, Escherichia coli
atgatgcgttctgacaccgatatcgactatgcagtactcggtgaatataccgcattttcagacaaggcccgggatgcagcccgtcgccgacatgctgaaatgtgcaatttatccagttacctggcgaaacaggcccaaagcccggaatcagtaacgaatcatgatgaagtgctgtcagccgtaaacagaatgattgacgcagaacgggaaatgcgtaatgccgtggaaagagctaacctgctggcgcgggcatgttataagccaccattaaaactcgcttccctttaa

SEQ ID NO: 18682 - DNA, 393 bp, Escherichia coli
atgtctgaacccttatcaggcggcggagctgtggcagtcaccatcggtggtgccagtgtgtttggtcttctcaccaataccgatttcggggtcgtggtgggcgcgtttgccggggcgctttttgttgtcacgcagcagaaagaaatcccggtctggcgaatggccatccacctgctcgtcgcatttgtggttggcgttctgggggctggcgtggctgcgtcactgatgcagtggctgacccactacaacgacaagccgctcgatgcattgtgtgcggtcggtgtctcggcgttatccatcaagatactgacctttctttatcaacaggaaatttcatcgctgttcggcctgttttccagactgcgcggcggagggggtggaaatggaaagtag

SEQ ID NO: 18683 - DNA, 279 bp, Escherichia coli
atggaaagtagccttgccggtatcgtgaacgtctggctgtgtctcaccattgttctggggttgtttgtgtatcgccgccacggtgcggcgcacaaaccgatgattacctggctggcgtactggctgatgctcggctacgtcatcatcccgttccgctggctgtccggtacatacacgcaatccagctggctggttgtggcgctgaatctggttttctgtgcgcttatcgtgtgggcgcacgggaatttgtcaaaaatcctttcgttattgcggaggtga

SEQ ID NO: 18684 - DNA, 378 bp, Escherichia coli
atgtcgggaaaattccgtttcagtcaacgtagcgagaaaaatctggctgacgtaaagccacaactggtggcagttgtacgccgtgcgctggcgttgtcggacgtcgattttggtattaccgaaggtttacgcacgaaagaacgtcagaaacaacttgtcgctgaaggcaagagccagaccatgaacagccgtcaccttactggcgatgccgttgatgtcgtggcttacgttggtagcactatttcatgggactggccgttatacgaaaaaatcgcccgtgcctttaaacaggctgccgcagagctgggtgtcgccatcgaatggggcggagactggaaaacgctgaaagacgggcctcatttccagttaaaacgctga

SEQ ID NO: 18685 - DNA, 153 bp, Escherichia coli
atggtgctcgctgaacgaatcacccatttttaccgtcagtacggtacacatgatggcacggtcattgaactggataccgggaaaaacgtatttgttcttgaaaatcccgacgaagttcagcgcaggattgaacaggctcagaaggacacttaa

SEQ ID NO: 18686 - DNA, 501 bp, Escherichia coli
atggcgtggtcacaggatatcagggacaaagtccgtaacgggtacatctttgaccagcttccgctggatatcgtcgccatgaagtacgccgtgccgcacgacaccgcgcggcgctggaaaacgcaggcgatgaagaacggcgacgactgggacaagctgcgggccgcgcacgcgctcgccggtgacgggctggaaagtgtcgcccgcaccgtgcttatcagtctggtggtgaagtgtcagacgacgcttgaacggctgaaccagaacccggacatcccgccgcaggagtccgtcgaactgctggcgagtctgtccgacagtctcagtaaggcggtggccagcagtaaaaaaatcctgccggaaaccgaccggctcgccacggcactggaagtggtgcagcggctcggcgcgttcatcaaggagcgtcacccgacgcagtatgccccgtttcttgaggtgctcgaaggcttcgctaaagagcttgaggataatttcagttaa

SEQ ID NO: 18687 - DNA, 741 bp, Escherichia coli
atgcaaaaacagattattggtaacgcaacgttgtattgcggtgatgttcttgatgtgctgccggcgttatccgaacgttttgatgccgtcattaccgacccgccttacagcagtggtggtacacacaaatcagaccgcagcatggccccttcggacaagtatatcggtcacacccagtatgccgagttcaccggcgataaccgcgaccagcgcagctgggcgttctggtgttccatgtggatatctcatgcattgcacaggctgaattccggcggttatttcatggtgttcagtgactggcgacaactaccggcgcttacagatgcatttcaggccggtggtgtgctgtggcgtggtctggttgtctgggataaaacgcaggcttcccgtgcgccacacactggctattttcggcatcaggccgagtatgtggtctggggcagcaacggaaaactcgacaaatgcccgcacggtggcccgttcccgggtgtgattacgcagcgtgtcgtcccgtccgaaaaactgcacatgaccgcaaagccggttcagctgatggctgagctggttaaaccgctgacaccggatgcgcacgtccttgatccgtttatgggaagcggcactaccgccatccctgtacttgcccgtggcggacggtttaccggcattgaaatgactaaccagtattttgatatcgcctgcgcacgtatcgaaaaagcccagacagaagcagtgcaggtgtga

SEQ ID NO: 18688 - DNA, 1641 bp, Escherichia coli
gtggcaaaacgtaaactttccattaaagagtttcagagaagcctgcaggagtacatcgccaacctccgccagaccatcgaggctgaatgtctggggttcgatgttaacccgcaggccacacaggcccgccgggcggcagtctgcgacccggtgacgggctacgattattttgtcgaaaattatttcccgcactacgtccgcaacccggcaaaaagtgagctgcataaatacctgttcagccgtctgccacaggttgtggcaagcccggacccggagaacgacgccatcgccgcgccccgtggtgaagcaaaatccacgctggtgactcagctgtttaccctgtggaccattatccgggccattaagcattacccggtcatcattatggacagtatcgaccaggcttatccgatgctggaagccatcaaggctgaactggagtttaacccccgtttaaaaaacgatttcccggaagtgtgcgggcagggtcgcgtctggcgtatggggaccatcgtcacggccaacaatatcaaggtgaccgttgccggtagtggtaaaaaactgcgtggtctgcgccacggcccgtaccgtcctgacctggttatcctcgacgatatcgagaacgacgagatggtgcgtaacccggagcagcgcgacaagctgcatgactggctcaccaaaaccgtgatgccgctgggcgaggctggcggtaaaaccgatattatttatatcggaaccatcctgcattacgactccgtactgtcgcgcacgctgaataatccgatgtggaaaacggcccgctttaaggccgttattcagtggcctgccaacatgaagctgtgggacgagtgggaagaactcatccgcaacaaacagccggaagcagcggaggcactttaccggcagaacgaagccgacatgctcgccgggtcggtggtgtcatgggcggcgcgtcccctgctggcgctgatgaaaatccgtgtccgtgacggtcacgacacctttgattctgaataccagaacgacccggtcagcggtgaagatgcgctgtttgcgggctgcattaagttctgggttaaccgtcttgatgaatgggtgttctacggcgctgttgaccccagtctcgggaagaagaataaaaaccgcgacccgtcggccattctcgtggggggctttaaccgttttaccggcatactggatgtggttgaagccgatatccgccggcgtctgccagataaacttatcgaagacgtgattaagtatcagcgggaatatcactgcctgtgctggtcgtttgagtccgttcagtttcaggagtttctgcgtaccgtgctggttgagcgttcggcggcgctgggtgtgccggttccggcgctgccggtcatcccgctggaggataaagcgctgcgtatcgaatcccttcagccgcatatggccaacggcctgattcgtatcagccacacacatcagacgctgattgaccagctgcgccactaccccaaagccgaccacgatgatggcccggactgtctgcacatgctgtggacgctggcggtatcgcgcagcgcaaaatttcagatacacaccccacgcagcaccgggcgtgaccgtggcgggcgttttggttcaggaggatggtaa

SEQ ID NO: 18689 - DNA, 1596 bp, Escherichia coli
atggcacagcttgttgatatttacggacgcccgctgaaacgtgaggcactcaaaaccacgcagtcggtccgggtggcggaacggctgcgcatttatcccgaccacccgtcgcgtggtctgaacatcagaaaactgccgcgcattctggaagcagccgaacgcggttatcttccggcgcaggcgatgctgtttgcggatatggaagaacgtgacggccatctgttcgccgagatggaaaagcgcaaaaaagcgttgctgacgctggactggtcggtggagccaccccgcaatgcctcgaaggctgaaaaggagctggccgccgccgtggatgagtggctgcacggtatcccggatatggaggacatcatcctcaacgggatgagcagtgtcggttacggtttcagctgtcaggaaatcagctgggcgttcgtggacaaaacgtggctaccggatgcggtaacgctgcgaccgcataactggtttattaccctgccggaacacaatgacgaactccggctggatgacggcaactgtggggaagatggtaaagacggttccgcgctgtggccgttcggctggctggttcatcgttacaacgcccggtcggggttcctgggttcatccggcctgttccgcgtactggtctggccgtatctgtttaaaaactttgcgctgcgtgatatggcggaatttctggagatttacggtcttccggcgcgcattgcctactatgcacagggcaccagtgatgctgaccgggacaacattctcgaagccctggtcaatctgggccatgaagcggtggcagcactccctcagggtaacgagattgaattcaaggaggccgcctccggcgggccggaggcgttcatgtcgatggtggaatgggcggagcgtaccacctcaaaagtgatcctgggcagtacactgaccagtcaggccgacggcaaatcctccaccaacgcgctgggtaatgtgcataacgaggtccggcacgacattctgaccgccgatgctcgccagctgtccggcatgttcagtagtctgatacagatgatggccagtctcaacggctggcaggatatcccaccgcgtcgcctgccacgtctggtgtttgatgtgcagcaggaagccgacattaagagtgtggcagaagccgtcagcgtgctggttaacaatgtggggatgaaggatatcccggtgtcgtgggtacgccaaaaaaccggtattcccaccccgaaagacggcgaagaggtactggtgccggtagctcagcgtctccctgtgcagactggtctcagccagctgcgtgaacggctgaatattgccgtgctcagtcagcaggacaacggggaggacgacccggcacagcgcgccattgaccgggcagaacttccggcagaggccattgcgcaggggatgaacgaactggtggcacctctggtgcaggccatacaggaaggtcgtgatgcagatgaggccatgaacgtactggcggaagcctggccggaactgccggatgacacgctgcggcagttgctgacacaggcgttctttgtggcggatatctgggggagactgaatgccgacagctga

SEQ ID NO: 18690 - DNA, 1167 bp, Escherichia coli
atgccgacagctgacgatgttgacctgggttatgcgtacaccctgaaaccggaagaagcgattaggtatttcgaaagcaagggatacgttatcggcttccgctggcacgatgtgagggacatcgccagtgcccgggcgttcacggtggcaggcgtgctgaaactggatgttctgaaggatatccgtgatggcctgacgacggcactggctgatggcgggacgttccgggagtttgcagcacaactggaaccactgctggaatcaaaaggctggctgggtaaaaagctgattgtggacgaggacaccggcgaactgcacggcagacagctgacgccgcgccggttgcgcacgatatttgataccaacattcagtcgtcctacaacgccggacgttatcagcagcagatggcgaacgtggctgaccggccttattttgagcgcgtggcggtgatggaccttcacacccgcccgaaacacgccgccctgaacggttttaccgcccgggcggatgatccggtctgggagtatctctacgcgccggacgggtacggatgccgctgccgtatccgggcgcgttcggcgtcggatgtggagaaatatggcctgacggtgcagagcagcgaggggcggctggttgaggttgagcaggaatatggccagccgggccagaccatcagaacgatggggctgaaaatgccggacggatccgtgtataccgccgacccgggctttggatttaatcccggtcgggtggcatggcagccggaactggaaaaatatgattaccgcagcgcccgccagtatgtcaccggcacgctgaccgggccggattttgcccggggactggcgaacgtcagcgaactggatgcgcgccagcgatatccgctggccatccgttcaccggaacaggtcgccgccacgggcgctgcacggcagacggtaaaccttacggctgacgtcatgcagcgcctcagcgcagcagacacgcccccgaccgccgccgactatgcgctgatgcagcagaccatcgaacgggcggagcatgtcacgcaggacggtaacgcgtggcggtatgcgttacagtcaggcgaccgctggtcggtggtgacggttgaggatggcacgctgacagactgggtgatgcaggacaccccggaggcatcatga

SEQ ID NO: 18691 - DNA, 552 bp, Escherichia coli
atgagcaccggtaaactggatattaagattgatttaagcgcgtataacaccacgctggggaaactgattcgttccgtgaaggaccggcgcgacctgatgacggcacttgcaggctccatgctggatgcggttgaaactaactttgaacaacagggtcgcccgaaatggatgggctggagtccggcctatgcgaaacggcgcggccccgggcaaatccttcagaagtccgggcgactggctgccagtatccgctctgcggttaacaataacgaggccacggtcgggacaaacgtccgttatgcccgtatccacaacgaaggcggcgaaatacgccatcaggcacggacgcagaacctgtattttaagcagtacaggaacggcagcgtcagcacccgctttgtgaagaagcgcaacagtaattttgtacagagcgcaacggtcggagcgtatacggtcaacatgcccgcgcgccccttccttcagcttgtacaggacgacatcgacgagctggagaacaccgcaaaccgctattttgcgcgtgtgattgactga

SEQ ID NO: 18692 - DNA, 1125 bp, Escherichia coli
atgccgcgcatgaagatgaacattgcggcgttaagcctcgaaattactaaagcaacccacagcgaaatccagctgtttccggcaggcgagttcagcgcggtggatggtcgcccgtataccgatgaagtcgaaagcggtaaatgggtgctgactgccggactggccgcgcagcttgtcgcacaggtggcagcccgtaccacgccttttgtcattgattacgaacatcagacgctgcgcgccgtaaacaacggcaagcctgccccggcggcgggctggttcagccaggtggaatggcgtgaaggttcgggcctgtatgccatcggtgtggagtggacggagaacgcggcggccatgattgccgccggagagtacaaatttatttccccggtatttggatacaaccggcgcggcgaagtcatcgaactgttacacgccgcactgaccaataccccggcgctggacggtatggacgcggtcatgctggctgcggccagccgtctggcgagtctgtcaactgaaacggagaccacaacagtggatgaagaactgttaaacgatttgctgtccagtctgcgctggatgcttaacctcccggttacctcaacggcggaagatatcaaaaacgagctgcaaaaggtcgttgacatgatttcgaacggtcagggaacggcggcggcatccgtcagcctgctggccctgctgaatcagaaagatgagcaaatcgccagcctgtcagccagtgcctatgacccgtcaaaacacatttcccttgctgccttcgaagaacttcaggggcgttatgccgcactggcgcaacagtccggtgaggccgaagccggggcactgattcaggcggcgctgtctgacgggcgactgcttccggcacaggaagactgggcgaaagattacgccagccgcgatatcaacggctttaagtcctggctggataacgcaccgaaacttgttgcgctcagtcagacccagacgggcggcaaaccaccccaaacgccgtcaccggccccggcgcagattaaaaccggcgatgacgtcgatatcgatatcgccatttgttcaatgatgggcgttgatccagaagatatcgcccgttacgcaggagaaaagtaa

SEQ ID NO: 18693 - DNA, 396 bp, Escherichia coli
atggatcgtaataccccctatcgtgacggcgaactgaacccggtgccggttgccgctgcgaccgaaatttttggcggtcatatggtggccgttaacgcatccggttatgccgttccggccagtgccacggcctcacagattacgctgggcgtgtctgatggctgggtggataacagcaagggcagcgatggcgacgccaccgttctggtgcgttgcggcaaagcctttctgatggcgaacagcacctcagatccggtcacgcaatcgcaggtcggcaagctgtgctacgtggaagacagcgtgaccgtggcaaaaaccgacaacagcagcgcccgccctgtcgccgggaaagtgatcggcatcggtgacgatggcgtctgggttcatttcagttaa

SEQ ID NO: 18694 - DNA, 909 bp, Escherichia coli
gtgttagttaacgctaaaaacctcaaccagatttttatcaatcttaagaccacctatcagaaagccttcgaccagacccccactgactggcaaaaagtggcaatggaagtgccatcaggcagcaaggagaacgactacagctggttgagtcgtttcccgaaaatgcgcgagtgggtcggtgataaaaacgttaaatctctggaagccttcaactacaccatccgcaacaaggactgggaagccacggttgaagtcgatcgtaacgacatcgaggacgaccagattatgggctatgcccttcaggccagagacgcgggccagtcagcggcagaactcccggcagatattgtggcgtcccttatcaataacggttttaccagtccctgttacgacggccagatgttctttgataccgaccacctggtcgccggtaaatcggtgtccaacaaaggcaccaaaaaactcaaagtggggtcgcttgctgaagcaaaagcctcctacggtgctgcccgtacggccatgcgcagtctgaaagatgacgaaggcgcgtctctcagaatccgtccgaatctgctggttgtgccacctgcgctggaagatgacgcgaactacctgatgaccgccgagaagttcccggacggtacgccgaacccgtaccgcaacaccgctgaagtgctggtgatgccggagctgacgtcggattctgcgtggttcctgttcgacacctcccgctcggtcaagccgctgatcttccagcagcgtaagaaaccggtttttgtggagcagacggactacaacagcgacaacgtattcatgcgtaagaagtttcggtttggtgccgaagcgcgctgtaacggcggttacggcttctggcagatggcatttggttctgatggtacgacggagtaa

SEQ ID NO: 18695 - DNA, 342 bp, Escherichia coli
atggaaaaggtgattgaaattaccgcccgccgtgagggttttcgccgctgcggtgtggcacacagcgcaaccacgaaggcatggcctgcggatgcgttcaccccggaacagctggcggtgctgaaggctgaccccatgctgattgtggtggagcgcgataaagcatccggccagaacgacgcggcccggggggatgaactggccgcacagctggatgccgagcgtcagaaagtcagcgaactgacagcgcagctggaagaagaacgccagaaagtcagtgaactgaccgcacagttgaacgccgcacagaaaacacaaaaagcggacaaaaaggagaagtaa

SEQ ID NO: 18696 - DNA, 432 bp, Escherichia coli
atgtcttacgccacaccggaacagttcatcagggcattcagtgaacgcgaggcacgcacactgacggatgaagacatgacgggattcatcgacgaagaaaaactggcctccgcgcttgcacgcgccagtgcccagattgatggctatctggtggggcgttaccggaccccgtggcctgacagcccggggagtctggtgggttactgctgcgatatcgcccgttatcacctggcgaccgattaccgtatctgctcagaagaaattcagatgcgctaccgggatgccatccgctttctggagaaagttgcggcaggacaaatcaacctcggacgggatacgtccggcagcgtgatccagtcatcgtcacaggtgcgtatccgctccggctcccgtcagttcgggcgtgagtccacacggggaggtgcattctga

SEQ ID NO: 18697 - DNA, 597 bp, Escherichia coli
atggtgcaggaggtccgcacctatgccggtgaactggatgaagacccgggccggattgttcgcagccttccggcagcctgggtgacgttcggcggcatcgtgaaaaccgaacgctattccacgtcacgccggaaatacattgccaccggacgctttgtggttgtggtgggtgattacaacacccgcagcgaacagagcgccagacagggaggcaccgtccgggatgaagtcggggcaaaccagctggttgaatccgtccgccgcctgctgaccggtcaggatttggggctggagattgattatttcgaacccgggcgggtcagaacgctgtttaacaccggcgtggcagagcgggcaatgtccgtatttgcctgtgagttcgatacccgctgggtggagcacgcgctggcgaacggcaaatggccggagcgcggcgcagaagcggatcgcctcttcaaccgctaccacggcaggctgtcagaccctgacccggaactgctgaaccttggcatccggtaccaggtgcaggacagcgacgctgaaatatcagggctgactgaattaagagagcaacagcatgaacaaaatgaaggttaa

SEQ ID NO: 18698 - DNA, 243 bp, Escherichia coli
atgaacaaaatgaaggttaaggcggctcccgggatgaagttcccgatggaggataacgcccggaaatacatcactacggaagcggtgaccgttgagaacaccgcttattaccggcgcgccgttcaggacggtgacctgattctggtgaaggatgagtctgaagccaccgtgacggctgaacaggacgccgtgcaggtaaaagcgaaggtgaagaaagagaaacaggtgggttccgatgagtga

SEQ ID NO: 18699 - DNA, 1422 bp, Escherichia coli
atgagtgaaattcagtttgacaccatttcgggcggcatccgtaagcccggtgtgcattttgaattcaatacccggctggccgttaacacgctgccgggtaatgaacagcgtgttctggtgattggtccaatgctgtcaggcggcaccgccacgcccctgaatgccgtttccgtgtattccgaagacgaagcggatttgtatttcggggccggttcgctggccgctgcaatggcgcgcgcggccattaatgccaacagctatctgcaactggatgttatcggtattgcagacactggcgcaggaaaggcagcaaccggcgcggttaccatcaacggtacagcaatcagcagcggcacactgtcggtatgggttgccggtgagcaggtcacggtggatgtggaaaccggtgatgaaccgtcgaaaatcattccggcactggtggaagcaatggcgcagacgccctcgcttctggtgacgggggaatacaaatcagaaacctctcagctgacggtgaccacccggaccaaaggtgcctgggggaatgacatcaccctgtcagcgtccaccacggcaggtggtctgaccgtgagcgccacaccgatggcgaacggcgaaatggacccggatattcagcccgcactggatgcggtctttgccgccggtcacaacattctgatttgtccgttcagtaccacgccagccctcgccgccctgaagcagcatctggagaaaaccgggaacgcgatggaacagcgcggcgcgattggctgtgcgggctggacgggcagtctcggaaacgggatcaccctggcagccggtgtgaacagcgggcgcatgtccgtcccctggtatcgcggctccgtgaagctgccagcagtactggctgccatctacggcgctgtgatggcgggcgaggaagacccggcacgtccgctgaactcgctggcgctgtccgggctggatgtggtcgccatgtcacagcgtgaaagccgtaacgagcaggaaaacgctctgcataacggcctgacgccggttgaggttggcccgggtaacacggtgcagattgtgcgtgcggtcagtacatacacggttaacgcacagggtgtgactgacgtctcgttactggatatcacgtccatcagaacgctggactacacccgcaaggcgtgccgcgaacgcatcagccttcgcttcccgcgcgaaaaactcagcacacgcactatcgcaaaagtggaaagcgaactgtatgacgtgctgatcaagctggaggaagcggagattctggagaacgtggaagcgaataaggcaaagctgcgcgttcagcgaaacgggaaagatgcaaaccgtctcgactgcgtggttccggcggatgtggttaacggcctgcatgtgtttgccggtcgcatcgacatgattttgtaa

SEQ ID NO: 18700 - DNA, 375 bp, Escherichia coli
atgtctctgcatgaatacattggctcgattgtgctggaggtggacagccaggaaatcgagatcaccgaccttgatgttcagatcaacaccgggcgaaaactggtcaagaccatgaacaaaaccggcagagccaaaggctttgcccggggcattggcacctacgaattgtccgtttcggcggtaatccctgataccaacgagccggactgggaaaaccttgaaggtgtgaaaatctcgttgtacccgctcagtaaaagcggcaagcgcacctcctatctggactgcttcacaaccgaagtgggtgagaaatacaccgtcgataatgaagcgaaaattgatatcaaactggctgcactcaggaaggtgacaggatga

SEQ ID NO: 18701 - DNA, 384 bp, Escherichia coli
atgactttgattaatacacagaccggtgaactgtctgatggcgtggtgtttaacggcaccgttcataaaaactttgagctgcgtctgccggtcatgcgtgataacgggcaggcactggaagaaactgaagaacgctttcagacagtggacggcttcgcggcggattattactaccgctgtgcagtgatggcggcaacgctggtccgtctgggggatatcccgcaggaagaactgacggcggatttgttgcacgacaacatgacgccggacgattttaatattctgctggcatcacgtaacgtcctgaaggtaaagcggaacggcgggaatcccggctcgccggactccggctcgcagtccttatcctcgggcgctacggaataa

SEQ ID NO: 18702 - DNA, 2274 bp, Escherichia coli
atggccggtaatttcaaagttggcatgaccctgactgcgaaggatgaagcctcgcaggttctggaaaagggacaaaaacaggttatcaaagccaccgaagatgtaacaaaggcaacacggaaggcaggcgcagagcagaggcgtaccggacaggaaagcgttaacagcacgaaaaaggccgcaaaagagatacagcgtgccgcccgtgcccgggaaacgctcggtattcgtgcagagcgtgagatccggcgtgaaatttatctgacggttgccagttataaccgtctggctcgtgccggttttgaatctgcgcaggagcaggaacgcgccatgcaggccacccgggaaaaagcccgggcactcaagcgtgaactggatggcgtcactcaggcacagatgaagatggcgaaaacgcctgttatccccgaaccggggcgttttgcccgtgcggctgcatttggcgggaatgccgtgacaacaggcgctggtatcgcagcaggtgctgccattatggcgcagccggtcaaaaagcagatgagctacgaacgccagctggcaatgatggccaataccgccttcagtgatagcgggctggaggggcgcagggctggtcttgagcagatgaaaaacagcatccgtaacgcggtgacctggggtggcggcacgaaagaagacgccgccgaaacgctggatgccctgctgaaagatggcggtatttcatttgaaacagccagtaagtggctgcctgaactgatgaaatacgccacggcttccggtgcatcagcgacagacctggctaatgtgatgcttaagggtaaaaagacctttggattcagggatgaagatatttccaccgttctgaatatggcaattgcagcgggcaaagaaggtagctttgaactgagcgacatggcccgctggttatcttcgcaactggggtcagcgtcagctgcggggatgagaggcaaggatgattttgtcaagattctggcgctgaatgaagctgccgccatcacggcgggaagcagtgatgaggccggaaataacgtgtttaacctgctggctaaactgaccagccacgatattgaaacagcggcaaagagcattgattacaacggtaaaggaattgatttttccggcacgctggttcaggcgcgcgaacatgggcttgatccgatagatgcgctgtccagtctgatagacaaaatcgttgccagcgataaacgctttcaggagttgcaaaagaaactggcctccgcccgggataaaggcgagcagacagctgtttatgattcgatggcaaaactccttgaaggctttggtgtcgggaaactggttgcagaccaacaggcgttaaaagcgttgctggcttaccgtaacaaccctgaataccggaaaaaggttgaagacgcgattaatcagcagcgcaccctgccggaaggtcagcgcgcgggtgatgtggattttaaattcatatccggcctcaatgactttaaaaccgaacaggccaaaaacacgcttgaattttcacaaatggacagcatgaaaaagctggctgatgcgtccggtactgtggccgatgccataagctgggcgggtgaaaagtttccgggactgaccacggcagtggtgggtgccacgaccgccattgaagcgatgaccgcagcggctctgacatgggccgggatcaaaatcctgaccgggggtaaaaccggtggcaaggctggcgaggttgtcggtgatgtaattgaaaacacggtcaaaaaaggcaaaggatttaaattccccggcattgccggtagcctgctttctttcggtggcaccgttacggcactggccaccgcaaccagcccggaagaagacgccgccgtcgaaggaagcgaggaacgctggaagcgcatccgcgcccgatatccccaggaaatcatcgatgctgcccgcaaaaaataccagccgtggtggcagtttggggaaggctactccaccgaaaacgaagagtggttgaggcgctgggaggaagacaggaaaaaagccgcagctgatgccctgccatcaccggcgcaggtcaacaaagccgccggaaacacaacgcctgaatcagtatcaacgcaacccggacgcatcacccagccgggatacctcacgcactggggtccacctgccagccccattaatttcaccacacaactggtgctcgatggtcagattgtggcggaagcagtgaacaaatacaaccttcaggacggtaacagaggcacgggaggaacttactga

SEQ ID NO: 18703 - DNA, 1350 bp, Escherichia coli
atgggctgggctgaaaacctgcaaaacgcctcctttcgtggcgtgcagtttgatgtactgaacacggatgaacaaatcagccgcgaccatgcggtctatgaatacccgtttgttgacggggcagatttgcacgacctcggacgcaaggcgcgaccgttccgcatgacggcgttcctgtggggggagtattacgaatataaacttgaaaagctgatcgctgccctggacgaaggcggcgatggtgagctgattcacccggtttacggctccgtaccgtcggtgattgtgaccggctacagcattcgccatgacgcagaaagcccggacagctgcaccatcgacatgagctttctggagagccgcaccggcagtgcgttgttctgcaccccgttaccagagctgtttgcacagcagttatttgaagaactggataagttactggcacagttaagcgaattttttgacgctgttacgccccctttaaagaccattaacagcgtgattaaaaaaatccaggcagtgcgtgccacgctggtaaataccctgctgacgttcaaaagtgattcattctccacagtcgaaaatgttgtgtcactgaccagcgaacccggaaagtttatcggcgggctggcagaggtgctggaaatccacacgtcagatgtcgggcacgcggtgccggttctggcgcgtagtgattccgccaccacgaccggactgaccggggaagacaacgtcgccagttctgcgacagtgatgacctgctggaatgaggtgatggcagatatggatgagctggtcgcgctgccggtcgcactggtcagcggtgataaaacgccgtctgtggcacttccgccggatgcgtccgtggaagacgtgcacgacgtgaaagcggcttatgcggttctggcagcctcagagctggccagcgtggcgacggcgatactgtcagatgaggcccagtcagagcagcttataccggcggatatcgggcgactggtcggggatgtgcgcacccgcttacaggcagccatcacgctgttccgtgaacgctatgaaggcgaacgcgaacggataaccgaaaccgcatcaccgctggggctgatgtacccggaaatcattcagagcatgaagaacgtggcggcatccgtgcaggatgtcggcctgctgactctgtcacgccgcccaccgctgacgcagaaacaggtgcaggcggacggttgcctgctgttgctggcgtggcagtggtacggtgattacagccgtgcggcagagctgcaacgtctgaacccgcagctgcgtgacccgaacaacataaccgccgggatggtgattaatgcctatgcaaaataa

SEQ ID NO: 18704 - DNA, 1212 bp, Escherichia coli
atgcctatgcaaaataacgacgacaaaatcagcctggtcattgccggaagatcgcattctgactggagcagttatcgtattgacagcgatttcctgaaagcagccgacgggtggcagcttcagctgggactgcctgaaaaggtgttcccggcggatatcgtccggggtgtgccagtccgtttgcaggtgggagatgagacggtccttagtggtcgcgtggacagcgtgcgccgcagtgtatcccgtcagagctgcgcgctgaccctgtccgggcgtgatgatgccgccattctggtggactgtgccgcgccggtgttcagcgccaatcagctgacactggacgaggtcatcgacaggatagtcagaccactggggatacagcgcatccgtattcaggcgtctggtgtgtcacgtaatgacaaggtcgttatagagccggggatgcgtgcgtgggatgcactggctaaagctgccgccggtcgcggcttatggccgtggtttgagcctgacggtacgctggttgtgggtggccctgactacaccaccacgccggtggacacgctgattctgaagctggacggtaccgggaacaacgtgatggagctggacgataccaggtccattaacggctgtttctccgaactgacagtactggctcagagccacgcccgccgcgcagacagcaagaaacaggtagtcgtggtgccactggacatctggaacgaggacggcagcgtgcgcacattatccgggcagggcagcggtaatgcaggtggtggtcagacaggcattcataacatgaaagccgtggccaccgaccccaccgtggattattaccgcccgcagataatcacccagggcgacaccagtaacatggagcaggtgaactggcgcgcaaaaaaaatgatgagtgatgcccgtctgtcggggctggatatcgttgcactggttgcaggccatcgcacggcggacggtgtcctgtggcagcccggccagcgtgtgcggattgtcagcgaactccacggcattgatgccatctttttcctgatggggcgtgagttcagcggaggccggaacgggcagacaacccggcttcgctttaaggaggacggcgtgtggatacctgacgccttcccgcgtgagaagaaacgccatcaccgcaggggcaaacagaaaaaagaggtcgccattgttaaggtctgggagaaatga

SEQ ID NO: 18705 - DNA, 651 bp, Escherichia coli
atgtgggacaaggttaatcagcgcatacagcaggcactggccaccgttcgccaggcattcagggtggtgaccggtacggtggacagttcgaccaaagtacagcttctccagctgaacgggctggcaggcgagcagctggacggtgcggagtattttcagcattacggcctcaccacatccccgccgcccggctctatgggtattgccgttccgctgaacggtaatacctcccataccgtcatcgtggccacagagcacggcgcatatcgcctgacggaactgaaacccggcgaggtggccctgtataccgatgaaggcgcgaaaatcgtactgaagcgcgggcggattgttgaaaccgaatgtgacgtttaccgggtgaaatgcaaacgctatgaggttgaggcagaggagaacgccgcattcacgacaccgttactgacggccagcgataagctgacagtggaaggtaaaatcaccggcagtggtggcatggccatcagtgggggcaagaaatatgccgccacctttgaaggcaacatcaaccatgtgggtggtgtgattacctccgttgacgtcaccattaatggcattaaaatcggaacgcacaaacacccgaccccacacggcatgtctgacacgccggttaattaa

SEQ ID NO: 18706 - DNA, 351 bp, Escherichia coli
atggaccagacgatttcacctgcaaccggcgactacgaacgccgccggatttatacacttcataacgcggtttatctgcgactggcgacgccgcttggcagttactgggcggatgcgtcgctggggtcacgcctgcacgaactgaagcgggaaaaagacgtttcccgtgttcacaggctggcggcgcagtatgccagtcaggcgcttcagcccctgcttgatgacgggcgggcaaaatccattaccgttgacacgaaagcgggccagcgcggctggttgttgctgttaatcaccgtcacggataacgcgggcacaccgcagacgtttgaacaccctgtgaggattatgtaa

SEQ ID NO: 18707 - DNA, 1080 bp, Escherichia coli
atgccgtttccagttccgggcgttgctgaaaacacagaacgccagctacgtgatatcgctaacgccctgccgggagaaaccatcgacaccggcgctgacagcgattaccgcattcgtgcaaatgccgtatctggcgtggctgacgggctttatatgcatcaggggtggatactccgtcaggtgtttcctgacacggcagaccctgaatatctggagctgcactgccgcgcacgcaatgtttttcgtaaaaaagcaacggcctcatccggcccggcagtgattaccgggacacccggtaagatgctgccagccggtgcggaaattcgtggtgaaggtgtcagcttggccaccaccgcagactgcaccatcggtgatgaaggcagcgcggaggtgacggcaaaaagcaccaccacgggcgcacatacgaacgcatccacaacgcagacggcaacgctggtcagtccgccggaaggcatcaacagcacggtgacgattaaatccctgaccggcggaacggacagggaaagtgacgccgacctgctggcgcgttatctggatattctgcgcaggccgcccgctggcggtaacaaatatgattacaaacgctgggcgctggaagtggatggtgttacctcggcatatgtggagtcattgcgtcgtgggctgggaacggttgatgtggccattacgtcagccaatgaccttccctcacaggaactgattaatgccgtgctggcacatattgaggaagtccgcccggtcacagcgaaggacacgatggtgctggccccgacgaaaaaagccgttgatttcgttgtccgggtaaaaaccagcggcctgaccgttgagcagataaaaccgcaaataactgacgttatcacggattttatgaaccggctggagccggggcaggaattaataatttcacaactggaaacccagatttcattaatttccggtgtcagtgaccggcgaatcattacgccagcggacaacgtaaaagccattattaacgcgtcaacgtgggaatggttgcgcccgggaaatattgatattcagccttttccgcgcgaggggtga

SEQ ID NO: 18708 - DNA, 957 bp, Escherichia coli
atgaatatggtcgatttatttcgcgccatgctgccacctgtcagttatgacctgaacgggaaatatatttccgcagaactgacagccgaggctgacgtcatggaagtcgtgaaggcgtcagcggcgcgcgttctgacacaaatcaccccgttgcaggcatcgatgacgctgtccgactgggagcgcgtgtacggtgttattcctcgtgaaggggcaacacaacaggagcggcgtcagaacattctggtaaaaatggctgccacggggggggtgtcaatcccttacttcaaaagccttgccgccagtctgggctacaccatcaccattacggagccgcgaccattccgggtggggataaaccgctgcggcgaccgcctgctgataccagaaatccgctgggcgtggcaggtcaatgttatcgggacaaaaacacctgtctaccggttcagaacgggcgcatcggcaaccggcgaaccgctgacggcctttggtgaatccattttagaaaacacgtttaaagaccttaaaccggcttttacagactgttatttcacttatgaaatcacatctcagccagagccagtatcaccactgacaattaacagaattcagtttcagtcagtatgtcatgctgatgcgcctctgctgataaataatgccggaatgcattttgcagttattcctgtactgaaaggtaaaccgctcacaatcaacaatacgcagcttcaggcgggaaacctgagtcaggaaccattgctgattaacagaatgcaactattgtcggagcggcgaactattgaaccactgacagttaataccgttcagtggcagtcgggaaggcagaccacggagccgatgacaattaacaaaatacatttacaaacagcaaataacagcagtaccccattagtagttaaccataatgggctgcactttgccgttatcacagagccttaa

SEQ ID NO: 18709 - DNA, 1623 bp, Escherichia coli
atgcgcgttaacaatggtttgaccccgcaagaactcgaggcttatggtatcagtgacgtacatgatatcgtttacaacccaagctacgacctgctgtatcaggaagagctcgatccgagcctgacaggttatgagcgcggggtgttaactaatctgggtgccgttgccgtcgataccgggatcttcaccggtcgttcaccaaaagataagtatatcgtccgtgacgataccactcgcgatactttctggtgggcagacaaaggcaaaggtaagaacgacaacaaacctctctctccggaaacctggcagcatcttaaaagcctggtgaccaaacagctttccggcaaacgtctgttcgttgtcgatgctttctgtggtgcgaacccggatactcgtctttccgtccgtttcatcaccgaagtggcctggcaggcgcattttgtcaaaaacatgtttattcgcccgagcgatgaagagctggcaggtttcaaaccagactttatcgttatgaacggcgcgaagtgcactaacccgcagtggaaagaacagggtctgaattccgaaaacttcgtggcgtttaacctgaccgagcgcatgcagctgattggcggcacctggtacggcggcgaaatgaagaaagggatgttctcgatgatgaactacctgctgccgctgaaaggtatcgcttctatgcactgctccgccaacgttggcgagaaaggcgatgttgcggtgttcttcggcctttccggcaccggtaaaaccaccctttccaccgacccaaaacgccgcctgattggcgatgacgagcacggctgggacgatgacggcgtatttaacttcgaaggcggctgctacgcaaaaactatcaagctgtcgaaagaagcggaacctgaaatctacaacgctatccgtcgtgatgcgctgctggaaaacgtcaccgtgcgtgaagatggcactatcgactttgatgatggttcaaaaaccgagaacacccgcgtttcttatccgatctatcacatcgaaaacatcgttaagccggtttccaaagcgggccacgcaactaaagttatcttcctgaccgcagacgcctttggtgtgctgccgccggtttctcgtctgactgccgatcaaacccagtaccacttcctctctggcttcaccgccaaactggctggtacagagcgcggcatcaccgaaccgacgccaactttctccgcctgcttcggcgcggcattcctgtcgctgcacccgactcagtacgcagaagtgctggtgaaacgtatgcaggcggcaggcgcgcaggcgtatctggttaacaccggctggaacggcactggcaaacgtatctccattaaagatacccgcgccattatcgacgccatcctcaacggttcgctggataacgcagaaaccttcactctgccgatgtttaacctggcgatcccaacagaactgccgggcgtagacacgaagattctcgatccgcgtaacacctacgcctctccggaacagtggcaggaaaaagctgaaacgctggcgaaactgtttatcgacaacttcgataaatacaccgacacccctgcgggtgccgcgctggtagcggctggtccgaagctgtaa

SEQ ID NO: 18710 - DNA, 699 bp, Escherichia coli
atgaaagtattaaatacaaccggaattaatttttatctagaacatttaattaatacatcaattaatgaagtttatttgattagtccatatttaaagatttcatccgtacttcgtgaacttattgcgcacaaagcaaaatctggagtaacatttcatattgttttcggaaaaaaagacttgaataaagatatttttatttggctaacagaattaccacatattcacttaatgttttgtcataaccttcatgcaaaatgctacatgaatgaaacgatgtctataatttcaagtttaaacctttatgatttcagtcaaataaataacttagagcttggtgtgctattaaatcgtgacgatgatcatgattgttttaatgactgtaaatatgaggttgaacgcatactaagagcaagctcagagaaaactttagaagttccaaacaagcccctaccgcaaaaattaactatttcaggcctatcctcaaaatataatttaaaacacaaagatgtatattcccgcttattagatctcggctatttaactaagggggattctggttttcttctgacaccgttaggtcaaaaagcagggggggagtttaaacctgataaattcagaaaaggggagtattatttcttattccctgccgatattctcgataaaaaaagaggtttctttgatatcttattggggaaataa

SEQ ID NO: 18711 - DNA, 213 bp, Escherichia coli
atgtcagaagatattccattaccgaaaatcaatcagcgatacagagatgatcatggtgcgcttgtcaccgtgaccagtgttgaagaaacccgggtggtatttatgcgggacggctatccgcatccctgcatgtggccgatgtacaacttcctgggaaaattcaaacccgaaccccgggaaaaaaaaatccctgccggcaatcacactgcctga

SEQ ID NO: 18712 - DNA, 2520 bp, Escherichia coli
atgagtctgacagatacactttcaaaaactatctctgcttccctgaatcgttaccatttaattattccctcctgcccgtcaccactggatgttgagcatttcagcggcagggaggagatgagtcagacctattattacatcatcaattttaccagtactgacaacgacctggatgccgggctgctgctgcgtaaatcagccacatttacaatgggtacgggagggcttaaggagcaggtgagccagaaagtagtacatggtgtcattacagatcttcgccgtatatcgggctccgccgaccaggcaaaataccaggtgatactggaaccatttattaaactactggacaggcagcatcgttctcaccgatttttcgttaacaaatcggtgccggaggtggtgacagaggttctccaggagcacggtctgaaaggctgggagtttgagttccgcctcaaaaaaacgtatccgaagcgtgaacagattaaccagtatcaggaaagtgacctgcaatttattcagcgtttgctggctgaagtggggattttttattttttcaccctgcaaccggacacgcagacggaagtggtgcattttggtgacagccaggcagcgctgacgtttgataagacgctggcgataaacagtccgtccggaatgaatgataacagagcggattcagtgtgggggctgaatgtgacgcacaatgtggcagaggccagtgtcaccacaaaggcttataaccatcgtgaagcacaatatttgttgcagtctgccccggcagacatgacgcatggtgatggtgacggaattaactatggtgaggtgtaccactaccatttccgtcatctggaacggggggataaaatcgacccggtgccggagacggccaatttttatgcccgccttggtcatgaacgttatctggcggagcaggtacggataaccggcaacagtacagacgccacgctggcacctgcacaggttctgactatcaccgacagtcttccgccgacgttgcctgcgctgctgcgcaatccggtgttgcttacctgtgttggtttttctgcaagtcgcaaggatgccctgcaagttgtactgaagggcgttccttacagtgaagttatttgctggcgtcctcctttactgctccgtccgaaagttaccgggaccatgacggcccgtgtgaccagtgcaaaagaaggggatatctacgcctggcaggatgcatcaggtatgtaccgggtgaaatttgatgctgaccgtgatgataaaaatccaggacaggaaagtatgccggtacgtctggccaaacccttcagtggtgatgcttatggttttcattttccgctgattcagggaacggaagtggccattgcctttgaggagggtgatccggatcgcccctatatcgcgcatgccctgcatgattcacgtcatgttgatcacgttaccgataagaacggtacgcgcaatgttatccgtacgccggcaaataacaagttgcggatggaggacaaacgcggtgaggaacatatcaagctcagtaccgagtatggcggtaagacacaacttaatcttggccataacgttaatgcctccaggaaactcaggggagaaggcgctgagctgaggactgatgactggataagtatccggggaggaaaaggaatatttatcagtgcagatatgcagcctcaggcacaaggaaagatgctggatatgaatgaagctatccgccaactggagcaggcattatctctggcccgaagtatggcgaaggccgcaactgctgcaaatgctactcagggagatataagttgtcagcaacggttgaatgcatcgctaacagatctcactgcgccgggaatgctgttgcatgctcctgatgggattggcatggttagtgcgcgggcgttacgaattgcttcgggtagtgaaagcgtgggcataatgtcgggagataacactgatattagtgccgggcagtcatttacagttgcagcagaaggtgctgttagcctgttgagcagaagccaggggatgcaactgttagcagcaaaagggcgggtaaatattcaggctcaaagtgacgatttgtcaatgagttcccaacagaatcttgatattcaaagttctgagggcaaagtgactgtttctgctaatcaggaactgatactggcatgtggtggagcttatatcaaactaagcggtggaaatattgagctgggatgcccgggacagattctgttaaaaagcacgaatatgcagaagatgggaccaacaagtcttgatattgcgtctgttgaaatgccgcgagggtttgggggcggttttattcttaccgatgaagcgggagtgccgcaaccttcgacgccttatcgattaacaacggctgaaggtgatattctacaggggatcaccgataaaaatggtaaaacagcgccagtcaacacctccattccgtcagtagtaaaagttgagtttgggaaggtaaaaactcatggagaaacagaatga

SEQ ID NO: 18713 - DNA, 678 bp, Escherichia coli
atgaccagagataaaatcatttttatcgcaccattattggcattgttaactgggtgtaattcggttagctcacagtatgctgattcggataagactgaatggggttataaaaaattaccctatgatgaatggaaatttctctttatttatccaaaggctctgcctgcgctggccacccaggcattgatggtggacggggacggttataagacgacttatcagtatcttgataataccgagccgagtcaggtcagtgtagggcgctggaatgaccatctgggcgcgactgagtcgtattataacaaggggaaagcattacccctgatgttgcgtttttgctgggattcaataattgataaaaagagttatgaaactctgattttttttaaaaaagggacctgggagcagatggttacgccttacacagacaaccgctggaacgaaacctattatcgttcaacgatgattattggtctggctcctgaagggaaggtaagagtctggctgggagatcgcggtaatccggtggtacctcagttggatgctaaaattactacagtatcgggtgataaaatgaagatgtgtaagggggttactaaaagtgatttctcatatggatatgatgaagatattaaggagtttatcaaagataaaacttatccttacggtaactggtga

SEQ ID NO: 18714 - DNA, 1233 bp, Escherichia coli
atgagtaatgctgtttcttttctgaaatatggtgatgtagctgaatttcgtaatggtttaaatttcagcaaagatagccacggtaaagggtgcaaattcattggtgtagctgattttaaagataatttcactcctcaatggaaattattgggtgaaattaatccatttggagttgccaaaagggaagactaccttgagccaggcgatattatttttgtccgttctaacggcaacaaggccttagttgggcgaagcctttatatagatcttaatgaaaaatcgttgtactctggtttttgtatccgagccagattaaaaacagatgattttctccctctgtttttggcttactatacacgaactaatttttttaaatctgctatcacgagtgtggcggggacaaatattaataatttgaatcaagatattcttggtaatatcatgattccacactattcaataggcattcagaaatcaatagtcgctgtattgacatctattgacgaaaaaatcgctatcaacaatcgcatcaacgccgaactggaagcgatggcgaaaacgctgtatgactactggtttgtacagtttgatttcccggatgccaacggaaaaccgtataaaacttctggcgggaggatggagtataacgccacgctgaaacgggaaattccggcggggtgggcggttaacacgctgtctcaaatagcgaatatcacaatggggcagtctccagccggggagtcttataatgaagatggaatcggaacactattttttcagggttcgacggattttggttggcttttccctactcctcgccagtacacaacatcacctacgagaatggcgaaaaaaggtgatattttactcagtgttcgtgcgcctgttggggatatgaatattgccaatgccgattgttgtattgggcgagggcttgcggcattaaatagcaaaagccgctcagatggatttttattctacgtgatgaagtatttcaaacaggtatttgagcgtcgaaatgcggaaggaacaacatttggctccatgacgaaagatgatttacattcactgcaagtcgtttgcccagaacccggattactgaaacgatatgacgatattgtttcagaatacaataaaatgatttttacgcgtagccttgaaaatcaggatctaatcaaactgcgtgactggctcctccctattcttatgaacggacaggtcaagattaaataa

SEQ ID NO: 18715 - DNA, 195 bp, Escherichia coli
atggcggagctcgattcggaagtccggaaagtcagactgaaactgacggactcgtatgaagaaggggtaaaactgtcttctggtacgtttacgcttccggccagattctgccaggaaatactgcctgataatgccaggagtatcaccattcctctggaaaaaagcgatgatgactggtggtacgggagttattaa

SEQ ID NO: 18716 - DNA, 309 bp, Escherichia coli
atgattgtacccgttgatgtaaaccgtgatgaacacggatactggacgcatcctgcactgacccgcagcggctgtgaaactccggcagaacttcggtactggctgagaacccacggactggagtgcttcgtgatgaccatgcgggatgaggctcctgaagcctttgctgccggatttactgacgaggtaccggatgcgcgcggctggctgccggaaccgccggatactgatggctggttcctgggctctgtccatgataccggctacggacctgtctgctactggttccgtaataccataaaggcctga

SEQ ID NO: 18717 - DNA, 711 bp, Escherichia coli
atgagtttcttcagctacttccgtcttcgcaccgcgcagcagggactttgtgcctcgtacagtgtcccggtggcgatatttctgacgacggctttctctccgttcggtacctggtccgtttcgtggttctttgtatatctcatgacgctgatggcgctgacatggggcgggctggcgatctatacgcgggaaactgacagggttcgccaacttgctgattcacgaatgatcgctgttcgaaacagcaaatgcgtcattgtggccagaatgaaacatcacgagaaagcccggatggtctgggaggtgctgcaggatgatgatgttatccgccgccagctacagacatggtggcgtggtatcagtcgctatctggtgctgagtttccggtatttgcccgcgacggttctgatgacagccctcatcgtgtcctggctggagccagatacgggggtgaagatcgtcgaacaattcagggaatgcccggccgaaagtgtggtccgttgggtagcaggggggctggcctgtatgtatatggtcactggcctggcgtgggtgatatgcgacattctgatgaaccggcttccggtgaactgctttcgtgaggcatttctggcgaaagtggaagcgtatcggcaacacgatgacgatacgtccttctctggtacggatgcggcggctgaacatgctgaacgcagggagggcggaaaatga

SEQ ID NO: 18718 - DNA, 354 bp, Escherichia coli
atgaaaaataagcaaatcgctttatctgcggttgtctccgcttgcctgtcattaagcggaccgacgtttgctgcgcctacaattattgaaccagttcagacaattatagaaccagacggttataaaaacgttccggtacaccagactcagcagggagaacaggtgacgaccaacgttcttttgcgtcagattctggctgaggtgatcaaggcaaacagccagaaagaggataaacgctgtagcgatggtgagaagcactattctccgggctacatcatcagcactggcaagcaaacgctgcgctgcgatatcagcagcggctatccggagtgggtggaaggaggaacattatga

SEQ ID NO: 18719 - DNA, 576 bp, Escherichia coli
atgaaagtaacaactgatgatttaaaaaaagatgtagaaatgctttttgatgatcttaaaagaaattatgagatcccttccagttcgagctctattaagtttttatttaagatcatagccgtcgctctggtagtacagttttttctaagtgctctagacttttatatttggggggaggagtataggggaggttgtagggaagcgatcatcgtttattttatcggttttttaggggttttgcttcttccatcttttatacttattatcgtttaccataatcccataatgatgatttcgtgcctgagtgatgaagcaaggcggaagtcagtattgctaaacattgccaaggctaaacttcaatatgtcttatattttgcaatagtaactaatttgttggttgggatatgttttgcactaaatgaatctggaatgatcgcttttatgggggggagttggtttgtgacggtcataatttccacatctatttataatatgatgatggcaccctacgttactcctgcagtaaccagtagtcttttgaaaatgaaagaactgctttctgaatctcggaattaa

SEQ ID NO: 18720 - DNA, 600 bp, Escherichia coli
atgaaaaaaattacatttttgctggcaggcagtgtcctgctgttgaccggctgtgccggcgttaaaagcagctttgactgtgatgccacaacgtctgatacctgtatgaccatgacgaaagccaaccagctggcacgggacaaggcggcaaaacaggcgggaaagccggctgcgggcggactgccttccctggttaatctcccggccacttctgcggcggtgcttccgtcagcatcccgctatgctgtcagcacctcttcccgtatacaggtaaccagcaacaaacctgcagtatcagttgacggcgcaacaggtaaaagcacgaatgccgcagcgccaaccctgacgccccgtctggttgccggaacgccggtaacaccagtttcgcgtccggctgtgtccgtgggcaatccggctccctcatgccagaccgtgcgttgtgataatcccggctctgtacatcctcagcgcagccgggatcgcatagccaccgtctggatcgcgccctgggtggacagcgataacgctttccatcagcccggtcgtgtctcttttgtggtcagccctgctgactgggtccttccggcccgcataaattaa

SEQ ID NO: 18721 - DNA, 291 bp, Escherichia coli
atgacaaccaacagtaacggcgctccgggtaacacccgccaccttaatgatattgcggtctgctgtgagaatccggggatgcgtgtcatctgtgttgatgacgcagagagcgacttctggctctcagcgtctctgccgtgcgctaccgtccttgaggggaaagttgcggatttctcaggacgtacttgtactgcagcgggaacgagggcactgcctgttcccgggaactccgggggcaggtatgagcataaccaaacaaccgatgtaccggtttttcctggcgaagtctga

SEQ ID NO: 18722 - DNA, 186 bp, Escherichia coli
atgaaaaacagaaaaaccaatgtgatggtcgtggggaaaaccggtagcggtaagacagtcatcagcgttgatgttatgcggacctttttatcagaacaacaactccgtgactggcgtgaattgcgcaaaaacattcagaaagacggcaaaagcgcaggagataaagatcatgacaaccaacagtaa

SEQ ID NO: 18723 - DNA, 822 bp, Escherichia coli
atgcgattagcttcccgttttggtcgatataattctattcgccgtgagcgcccgttaacggatgacgaattaatgcactttgttccatctgtcttttctggtgataaacatgaatcccggagtgagcgttatacatatatcccaaccatcaatatcatcaataagttacgtgatgaaggtttccagccgttctttgcctgtcagagtcgggttcgtgatttaggacgccgcgaatacagtaaacatatgttacgtcttcgcagggaagggcatattaacgggaaagaagttcctgaaattatcctgcttaattcacatgatggttcatccagttatcagatgatccccgggatttttcgttttgtctgcacaaatggcctagtgtgtgggaataattttggcgaaatccgcgttccacataaaggtgatattgtcgggcaggttattgagggagcgtatgaagtgctcggtgtctttgataaagtcactgaaaatatggaggcaatgaaagagatacatcttaacagtgacgagcaatatttatttggcagggctgcattgatggtcaggtatgaagatgaaaataagacaccagtgacgcctgaacaaataattacccctcgtcgttgggaggataaacagaacgatctctggacgacatggcagcgtgtccaggagaatatgatcaagggtggattatcgggaaaaagtgcctccggtaaaaataccaggacaagagccattacaggtattaatggtgatatccgaatcaacaaggcgttatggatgattgccgaacaattcagggagtggaagtcatga

SEQ ID NO: 18724 - DNA, 810 bp, Escherichia coli
atgagaaactttcctgttccgtactcgaatgagctgatttatagcactattgcacgggcaggcgtttatcaagggattgttagtcctaagcagctgttggatgaggtgtatggcaaccgcaaggtggtcgctaccttaggtctgccctcgcatttaggtgtgatagcaagacatctacatcaaacaggacgttacgctgttcagcagcttatttatgagcataccttattccctttatatgctccgtttgtaggcaaggagcgccgagacgaagctattcggttaatggagtaccaagcgcaaggtgcggtgcatttaatgctaggagtcgctgcttctagagttaagagcgataaccgctttagatactgccctgattgcgttgctcttcagctaaataggtatggggaagccttttggcaacgagattggtatttgcccgctttgccatattgtccaaaacacggtgctttagtcttctttgatagagctgtagatgatcaccgacatcaattttgggctttgggtcatactgagctgctttcagactaccccaaagactccctatctcaattaacagcactagctgcttatatagcccctctgttagatgctccacgagcgcaagagctttccccaagccttgagcagtggacgctgttttatcagcgcttagcgcaggatctagggctaaccaaaagcaagcacattcgtcatgacttggtggcggagagagtgaggcagacttttagtgatgaggcactagagaaactggatttaaagttggtgtcaacgacggatgaaaagtga

SEQ ID NO: 18725 - DNA, 144 bp, Escherichia coli
atgctgtgtcccaaaagcccggaaggtttgcattacaactgcaccacagtacaaaatgtcagacacagtaaaaaagactgggtaatcaacccaccagagaaaacacgtttattgcaaaagagaggggaattatgtgcaaactga

SEQ ID NO: 18726 - DNA, 585 bp, Escherichia coli
gtgggattaagaggctatacaatcgcatatggtttcttattgttattttttctagatataagatataggcttaagatcaaatggttgttgttagtagctatattggtaacgaccatttcttcactgatccttaactatagaataggtatagaagtaaatagcggattattaggaattatttttaatccattattacagcaaggtgcttcatttgaaaccgtttatggtgctttgaaatacaatgaaaaaatattaagttgcatatcttactatgattatttttttacaaataaagatatcggttcttgtattgacatcgctcgtggtgtttattttaaagaaggaggaagtttcgcatcaagtttttacagtgagctaatatatttggggtggatcattggaagtgttgctttattactatttgcattttctctagcttttgttcaatcttgttatgagaaaataataaaaaattcaatgaataataaattggcatatacatatcgtttgatcatttttttagcgctaccaaatcttatatattttgcccgctcatcattatttgattttattactaaggtttga

SEQ ID NO: 18727 - DNA, 492 bp, Escherichia coli
atgccaggacaaccaataccaagtgagctcaaagagaaagggctgatatggcttttaccaccatactgctggtcacatcgtcagatagcccgtaagctgaagatcagtgcctcagttgtatcaaaatggagatgtgagttagtggagcaaggacttttacctgaaaatgaaaagattacctccgttgatgttgaagactgggcaccggagcgtcgattctcagttgttcttgagacggctacgctgtcagaaatggaacttgctgattattgccgacgcacgggattgtttgttgtacaggttaaagaatggcgggctatctcaattcaggcgcatgaaaagaaattgacggaaaatatccgaacagacagggcattgcgtgacgcaaaaaataagttacgagaactggagaaagagcttaagcgcaaagataaagctctgacggaagcagcggccctgcttatattaagggaaaagttcaatgccctctga

SEQ ID NO: 18728 - DNA, 1149 bp, Escherichia coli
atgggggaaacaatctcagagcaactggatatcattaataccgcctttaaagttatcgaaaccatacgccccaaactggcctgtagccggtgtgatgtcatcgttcaggcaccacttccccctaaaccaattgaacgcggttatgccagtgcggggttacttgcacggatcctggtcagcaaatatgtggaacatatccctttatatcgccagtcagaaatatacgcgcgacagggcgtggagctgagccgcaataccctggtgcgctgggtatcagaaatggcagacaaactccgtcctctgtatatagcgctgaatgactatgttctggaggcaggaaaggtgcacgcagatgacacgccggtgaaagtactggctccggggaacggaaagacgaaaacgggtcgtctgtgggtatacgtcagggatgatcgtaatgcgggttcatccctgccggcaggtgtctggttcgcgtattcggcagatcgcaaaggagaacatccgcagcaccacctggcaaagtatcagggcgtgctgcaggctgatgcctatgcaggttataaggtactgtacgaaacgggccgggtgaaggaagccgggtgcctggcccacgcccgccgaaaaatccatgacgaggatgtgcgccgtccgacagaaataactcaggaagcgctcagacggatagcagagttatacgccatagaagcggagatacgcggcagtccgacagaggaacggctcgcagtcagaaaagccagaagcgtccagttgatgcagtcgttgtacgactggatacagttgcagaggaaaacgctgtcgaaacatgcggagatggggaaggcgttcgactatatcctgaatcactggaatgcgctgaacgagttctgtcgtgacggccaggtggaaatagacaacaacatcggtgaaaacgcgttacgctcggtggcggttggaagaaaagattatctcttcttcggctcagacaagggaggagaaagtgcggcgatcatctacagtctgctggttacctgcaagctgaacgaagtggagccggaggactggttgcgcgaagtgatcgtgaagctcaatgactggccgtcgaaccgtgtgcatgaactgctgccctggaactgctcaactgtaaaataa

SEQ ID NO: 18729 - DNA, 528 bp, Escherichia coli
atggatttgatatttaaatacaagcaagcgacttttcttcaggcacaacaaatcgatagaaatttccatagcggtttatgttttataatgtgtattgactatatatacaataaaaagcacaatcttccttgtgattttttatatttttgtaaaacctggcactttacttcaagacatcgggcgttgttatatttatatcagagcggaaaatattctggagatccttatttaatgaaaaatggcaaattgacactgaaatatttaaggaaagcagaacatccaatagaaatatatcttttaactcaggggtgttacattataaacatttcactagatcaaggaactaaagctcatgcagtagcttatataaaaaaaataggggaaactttattttttgaccctaatcatggagagtacaatataaaaaataaattaaaattattggactttcttaagagagagtacagtacaagagtagattatatatctatttatcaagtgaccgagcctgtttaccattccgtgtaa

SEQ ID NO: 18730 - DNA, 921 bp, Escherichia coli
atgaataaaaaacattacacttatttagatataaaattgaaagtggcatccagttttgtatgggcaggacatatgtcagctattgaaacagcggcaagaaaaggtcgatttgcggtaagttttcgggctgcaggggaatatactctggaagccatcgcaaaaggagcggcggctaagggacataatattctcgaaaaaaccattaaaccaagctcaatagaaaaagtttatggtgaaatggcaaaagaaaaatggaatatgctgaagcaggcaggtttgaccggttatgttggtcattgggaacgtaatgagttgaaaggtatttatatgtcttcttgtcattcattagataattttgcacaataccatatatacccaattgatatgagaactcaagctactctggataagagcatagactccttacgtctttctaagaactgggaggtgcagctctttactggtgactatgatacacatgatatgatcacatttcgtggtgccggtcgcccacgctcagtactagttaattcgatggaagaaaaaatgattattaacgccatcaacatggagatttcaaaaattgatccgcatcgtcctttcaactctgtcgaatataatgttgtacgtcatgggccacaggtgaatttttcttcttatatgttagcccacgaatcccaaaatgttgttgacaataatggatttcttggctcagttgctcgccctggagagtttcctattgccatgtgtgatcgtggaacatgggaaattatttgtaatctacgggaattaactgatttttataattccatcggcgctagaattaaagagacctggatagaaaatggagaaagagtatttcaagagacatcaaatggaatggttaggctgggaagacgcagatgtacaattacatactaa

SEQ ID NO: 18731 - DNA, 156 bp, Escherichia coli
atgacaaaaacagtctcaaccagtaaaaaaacccgtaaacagcattcgcctgagtttcgcagtgaagccctgaagcttactgaacgcatcggtgttgctgccgctccccgtgaactcagcctgtatgaatctcagctctatgcgtggcgcagttaa

SEQ ID NO: 18732 - DNA, 462 bp, Escherichia coli
atgaagtatgtctttattgaaaaacatcaggctgagttcagcatcaaggcaatgtgtcgcgtgctccgggtggcccgcagcggctggtatacgtggtgtcagcggcgggcaaggataagccttcgtcagcagttccgccagcactgccacagcgttgtcctcgcagcctttacccggtcaaaacagcgttacggtacaccacgccttacgtatgaactgcgtgctcagggttaccactttaacgtaaaaaccgtggcggcaagcctgcaccgtcaggggctgagggcaaaggcctcccggaagttcagtccggtcagttaccgcgcacatggcttgcctgtgtcagaaaatctgctggagcaggatttttacgccagtggtccgaaccagaagtgggcgggagacatcacgtacttacgtacagatgaggctgactgtacctggcagtggtcagcgtcgtaa

SEQ ID NO: 18733 - DNA, 570 bp, Escherichia coli
atggttagttatagtgggattgttttcatctggtatccttcgggaggaaatgtaggtcatgcttcattacaaattggttctgtatattcccatgaaaactatgtaagttggtggcccgagagtacagcgaaaccctttcgtaaggagagggccagacaaacttggttttacaccaatgataattttgttaaagaaactcattcaacattgccagatgatattagagatgaggagggggaagctcatgttaagtatatgataaaaagcgattgttttaatgaattagccatgcttgaagagtggtttaaaattaaaaataagccgagtgctcattatatgttatttaataaaaactgttcgcatattgtggccagagtattgaatgccggttttattcgacaagataacggattttcaaggttgtccaaaagttggaatattacaaaacctcgtgatatcgcatcgcaacttaatacattagtttcattgggagcagtaacaaaacacgtcaataataattgcccgaagcgtatgcatagattaggatacgttcttttgggtatgcgttaa

SEQ ID NO: 18734 - DNA, 291 bp, Escherichia coli
atggagcctggcattacggtgtcccatgtggcgcgattgcatggtattcagcccagtctgttgtttaagtggaaaaaacaatatctggaaggaaatctcactgctgttgctgccggagaggatgtcgttcctgtctcagaactggctgccgctataaaacaaataaaagagttacagcgcttactgggtaagaaaaccatggaagttgagatcctcaaagaagcggtggagtatggtcagttgcgaaaatggatagcgcatgcgcccttgttgccaatgaacaaggaataa

SEQ ID NO: 18735 - DNA, 1080 bp, Escherichia coli
gtgagttgtattacgcatcttatatctatggatgagattgatataaatatcaatgatccaagaaataatggtgattttcttattcttagccatactatagataactatcatgcttacttaaatgatggagtatattggctcacgttagaaaagaggtgtttttctttaataaagcaattggggtatgacttacaaaccggagtttggttatgtttgatagagacaaaattgcatggttgggatgggcttgctttctcttctctcttattttcaaaatttcttgctaaagaagacccacagtgctggcctggtacagactttgcccatattcgtcatcaaatagtagactggtatagcaataatgtttttcctgccatagatgaactcaaaagaactgacttacgaagctctactcgcgctgtaatgatcaagtttctggaaatttttcttcagcaacccgtcgtgttagaatcaataaaatgcgctgagttcaagaagtttttgagcagtatgaagttacctgaaaatgacaatggtgattgtcagtacaatacgcataaagatgattgttctgaaaaaaataataaagaaaaattacagaggggcttatcatgcggccataaaaaaaatagcttccttgttccagtaatgtttttttttgcgggtattacaatgacctgtgcggttaattttattaataagcctaattccgcatggcgattagatacaatgctgccgggaaatattttttcttcatatgtattgggggagtgtagtgataatattgatgatgattcatggataaagttaaaaagacagattgatgattttgaatttagaattaaggatgttgaaaataaaggtggctaccttaccctatccgagataaaaacactcgtacaccagatgcaaattggaattttacaaagtgaaaagccattgtcatctcaattgaatagcattcataaaaaaataataaatggtgaggagatagaaccgttaagtttagagattgttaccaatcgtgtaaaaaaagtaaactgtacactagctagcatacatgctgaattagattattaa

SEQ ID NO: 18736 - DNA, 2532 bp, Escherichia coli
gtgagcttttatttaaagcaaattattagcaagttaacaccatctgcaaaaaaacatcttgatatggctatcaatctcgctgtatccagacgtcattatgaagttgatatcattcaccttatttatgtgatcattagtaatgatgaaaacttaattgaacagcttgcaaaagaaacattattaaatcctccgtctattattaatgctatagaaaaggagttcatggagttaccacaaggagatgtaaatacaccagttttttcagagactcttgtttcttttattgaaaagtcttggttacatgccactacaaaatggtcttgctcatctcttgatacaccagccttatttgctactgtattgtatacagaaagagaactacttccagaacatgtttcttatagtttaaattgtcaaaaaaaagtggctgagaatatattaagacaatcttgtgaggctagtgctattacaacgcaagataatgcgttttcttcaaattctatgcttgagcgatatacaataaatctttctacatcggctgaagaaggaaggatcgatccggtgattggaagagacaatgaaatacgaaaactaatagacattttacttcgtcggcgtcaaaataatcccatattgacaggagagcccggggtaggaaaaacctgtattattgaaggcctagcgttacgcataaaagaaggaaaggttcctgaaacactcaggaatgtagaggtacttactcttgatttaactgcacttctggcaggagctagcgctaaaggcgaatttgaaaaccgacttcaacatattttaaaggagatagaaaaaaaagctaaaagaattgttttattcatagatgaagctcatatgttagtaggagcaggcggtctggcaggacagactgatgcagcaaatttattgaaaccagctcttgcccgaggtacattgcgtgttattgctgctacaacatggagtgaatataaaaaatatttcgaaaaagatgcagcgcttgctcgacgctttcaaattattagggttagcgagcctgatgtgaatgctgcctctgcaatgttacgcgcccttgtacctgcatttattagccaccataatgttgatattactgaaggtgcaatcaaggcggcgactaacctatcaaatagatatatctcaggtcgaaaacttcctgataaagctgtaagtcttttggatacagcatgttctcatgtttctttatcacaaactcacatacctaaagaaatagaatatattgaagctaatattaaaagagatatgactgaattatctgtactggaaaataatgatgttttacggaaaaatcagctgaataaaaatataaaattttttaatgatagattattattacttaattcaatatggaaacatcaattagatctggtcaataaaataaaagaatgccaagattatgatgaaatacatgcacttagaatggaactaaaaaaatctcatcgggatgttgcaccaatggtttttgaacgtgttgatgagacttgtattgcggatgttgtttctgagtggacaggtattcctttaggtacttttttagaaacggaaaaagaaaaaagcaaagcattactttctcgcttacaacaacgcattattggtcaagattacgctctgtcagtcatatcttctcaaatagaaatctgtcaggcgaatcttcatgatccacataagccaacagggatttatttatttgcaggaccatcaggtatcggcaaaacagaaactgcacatgctttagctgaacttgtttatggggggagtaacaatcttattacaattaacatgtcggaattccaggaagcacattcattgtcaggtcttaaaggggctccgccaggctatgtaggatttggtcatggaggaattctgactgagggagttaagcgtaatcctttttgtgttattttgctagatgaaattgaaaaggctcatcctgatgttattgaacttttttaccaagtgtttgataaggggactatggaagacggtgaagggcagttaatcaatttcagaaacactcttattattatgacatcaaatttagctgcctctcaattaaacgatctctggatatcaggtgataaaagcataagcaatattttaagtgtaattcgtcctatttatgatgatttttttcagtctgcattcatggggcgcgtgaatttgattccttttttacctctatcacaggactctttaaaacgtataactaaaatgaaaatagaaaagatttgtcagcgtgtatcagatgctactgatcataaaattatagttaagtataaaaaatcccttataacttggatcctgggaaattgtaagtacattcagagtggagctagagaaatagatatgattttgaatcataacgtccttcctctactggcaaaacatatatgcaataatgacgttaataactttactggttgtttgaacttgtttattaaaaataataccattgttgttgaattcagctctgatggagagtga

SEQ ID NO: 18737 - DNA, 3402 bp, Escherichia coli
atgattaaaaaattgtcagtgttaacacttttgttgttcgtgtcaggattgcttttggccggatgctatgttattggtgtgttgcagtattggacaataatatcaatttttcttttatggattacggtcatatttactacaatagcatttaagtttttttatacggtgataaccatttttttcgaaaatggttatcaccaaaagataatagctaaatataaattatcccgtaaggaatatgcgttatactcagtgtttaaaaaaggaattaaaattgtaaggaacaaacaattcaaaaaatcaaatataccttggtttatacttatcggaaatcatgaaagtaaatattctcttcttaaggggacatcgctcccgttgtgttataatgttacaaataattcccttaacacaccattaaatggaataagatggtttttttttaaaacaatgggcctgcttgagttatcagataaattagtcaatcaacctcagctaaatataaggaaccgtcttttgaaatggatagctggaaatccaaatccctcaggcattattgtatttttatctgtctctgatttgatgagtcctgcagatcaagaaatacataatcgatgtctaagatttagacagtttattaatgaaatatattcgaagactaagcaacgtattccagtatattcagtgataaccgactgtggtgctattgaaggttttagcttatggcaaaaacatctttgtaatttaggtaaatatattccagtaggtttctattgggataatgaaccatatattaatgataagggcgatgaaactcttcatgaaagttttaccaaactcaaagagtcaatggggctgttaagaataaaaattcttgaaaatgagttacctgtaaatgaacgttatagtgtattgtcattccctgaacgattctattcattagaggaatcactgaaaatactaatatcagaaatgtgcgagcatgatgcttatttatctgcatgtaatttgtcaggcatatggttcatcgatacagatgataacaatataataaataataaatcacaaaaagacacattgcttgctgacctgttacctaagttaacattacaaggatccagttattctaaggggtatgatattcgcaaatttacgaaatgggttattattgcagccacttattcgttattatcttctggtgcatatcaagctgtaaaaattcttaagcaagaaaataaaactcctgaggatataattaaaaagatacaaagttttgatagttttactcgttcttctccagttaattttgcctttataccaattataagttggcatcagtcacagctgtatgagcagttgcgcggaatggttccattcaaaaaaaaatcaattcaggatgtgattcaacaatacagagataaattctatagtgcaccacctaaagaaaaacgcgagttactattagaccttgctaatgtaataattatatggaataaaggaggggttaacccttcaatattaaatgataaaatagatcttcattttccttcagcattaaggattacaaatgtatcaagagatatatcagaagaaatatctctcgccattgaatactctgaatttatgtggggatatgagaataagttagatgatatgagaatgcttttgaatgagtttattcaacatgataacgacttcttatggttagtggctccgtctgaaactattcctaatgtgtcactcagcagtttttggcctgattatgatggtggaatatatctagatggcgtctggactttaagcggacaaaaaaaaataaaagaatggatcagtttattctacagcgccggtctcgagaatagatcaacccaggtgttaaatgatttttttcgaagaataacagatttaaggcaggacgtatggcatcggtttattatagaagcaagtcttgaaagaaagtatagttatgcaactagaactaaccgtgaactactagatctaatcaataaagaatcatctgaaataaagtttctgacctttttaaaagaagaacttgatgacattccaaatttgcatgctcatgagtggcttgttaaattcagaggttttttttcactactttctttatctcataaaagtagtctcattcatcaaatacaacaatcagaaatgttgctacgtatgagagttagtagtgttatcaacaacaacgatcagccattaaccgaaatacagttaacatcatggtggagttggctggagaatcttaattctgcagtgaatgaggccctgaataatgaatatactggacattatttaattagaggcttgtattttagcaataaggaccaaaacaacccaaatccattagcagctgctttcgatgatcttggtaaattaaaaatatatttgtattctgataatgctgatcctacagttgatgcaatatggaaaatttatgagagtcaggcatatatactgttagataatgcaatcgctcgagcaggtagttggttgaataaaaaatggagtgaaactgttttattccctctcagaaatgatatggataatcttgaacacttatccttacaagataaggcatatacatatttaatgaattttctgcacggtcccgctaaaggtttatttttcttgtcagaaactggtttgacatcgcttgaatttgaaggccgtaaacttcttgtgcacaaatctttcattgatttaattaatactattgtgaaacctgatgatttacttaaactacccttaggtcaaaacgttcgagaaaaggatgaaattttcagcatccaatctaaactggaatcattgactacccaacttaatgctattcaaatcgtaccctatacagtggaagtaagtagtgggcccgccactatatcgaaaggcgctaagataatacctattggaactagattaaaattacactgcgggtctgatactcaggttttggatagtctgaattttgctgagtctgcttcttttacgtggaaagcaggtcaatgtcagaatgtcagtattgatgtgaaattcccaagctttattgcccgatatacgcttattggtgatactgcatggacagattttctggaattattctctgatggtgaggcagaattagcaacagataaatttccgcatgaaactgcatatagtcttcgtgcattaggtatcaaaagtattcttgtacgttataaagttagtgatagaagtactttagtgtcagcttttgatgagtggcatagacttaaaaaagaaattgataatctttttgttagacagaatactttattggaaaacacgccatcccaaaatagtgttaataatcaaggctggttgtcattgttacctgttactatttatgatgaatccccatccaattag

SEQ ID NO: 18738 - DNA, 591 bp, Escherichia coli
atgactttacttgattgttatatacctgtgtttacattgattactgatattgaagcgaattatacacaatatgattgttttcaggaaataaacactaaatgtactttagctattgaacaggcggtattaagatcggaagaaattaatgtaacagacaaagatcgtgatgctgctttttatgcggtcaccgtttttatagatgaaaaaattctatgttcttctctgagttttaaagataaatggagggataatcttcttcaatacaaattttttggttgctctgtcggaggagagcttttttttgaaaagttagatagtttagatgataagcagtatgaagcaaaaggtgtttttcttttttgtttactattaggttttaaggggaaacatacggacgatgagactggcataattgccaactatatagcaacacttcatcagtcatttttcaatgagcttaacaaataccctgaagttcaaataatagggacgactgtaaaattaagaagaagccgaagacctacgtttcacgacatcactgtaatgattttgggattttatattgtggtttctcttttgttactaaattga

SEQ ID NO: 18739 - DNA, 1413 bp, Escherichia coli
atgtataatgaacaaaagcaaatttattggtattctggcctatatttgcaaccacaacatttccagtcaattgatctccatcatagttatatgcttgctcagcacatcgcgagagctcaaccatggaattttgggtgttatgagtgtgaaatagaccatggtgcacttaatgaatcaatattgaaaattaataaattaaaggctatattgccctccggatattacctggagtatccaggtaactgtactatttcacaaaagcatttagtcgactccaacattactaatgggcatccaataagattttggattgctttacgtaggtttgacccaaaatatccaaatgtctcagataataaagaaaaaacaagtaatacacgttggattagtactgatgaagaacagcttatgaaggatgtttatcacaatagccctgaaacggggatcacgaggataagctataatcttcagattatttctgatgaagaaaagaatcatatgctagatagtgagttgttgccgattactagacttattcatgagaataatggtcttacagtagatccaacttttatacctccatttttgagcgtttttcaatctgatgggctaagaggtattattgatgatatctattacagcttatgtgcttgcgcacataaacttgaggcgtgtaagcacacagagcttaatgctataagcttccggaaaaacggaaatattgtcagattactaatgctttgtatatttaatagagtgttacctatcatagagtcgtggcagagggaaaaactggttcatccttggtattacttcaaccttctctgtcaactgatcggagagctgtcgtcatttgataaaactccctcttcattaatttctgataagaaacagcattgtattattaagtatgaccattataatctttttgcgtgttttagctcaataaaagatcatataagtaatcttctaattaagttatccttggacgacaatatagagattcctttacggagagtaacatcaggtatttttgttggtaatattatagaagactctactttaagtaacgatgtctatattatgttaagatcggacgtttttaggggtaatgctaaagcattgattcatactcctgatattaaaatttcatcatcagatgatataaatacaattattcaacatgcgttgccaggtgtagctatggaattaatggagtgcgcaccagggggacttccagagcgaatggatacagtgtggttgaaaataaatgttgctgatgttttatggtctaaaatgcaaaaggataaaaacatatcgctttattgggttgccgctcctgaagatctatatatagaactaataattgtaccgtcatcaccagatgattatttacttgatggaaaattttga

SEQ ID NO: 18740 - DNA, 573 bp, Escherichia coli
ttgattactcgtttactttggcaaccgatattgatatgcatatttttggttggttgctcctctgaagttaattctgaagaacaaatgaaaatggctattaataatatgacaatgcctttttcttcaggtgctatctctttacatataataccaagtgcaaagatgaatgcttggaatgatattgcaaatagtagcgtaatgttaatattgcaagcaaatgaaaaaagtatcttggaaaacgtcatgaataatcctgttattattaaacaaatgtttgatggtgctggatcttttgatggcattcttaaaattgatcgttacgtcgctatgccggggcaaaatacaacattacatattgatcgtagtgagaatactcgctatgtgtgtatcatttctggttattatcctttccctgctaagcaacatatgcttttaatagatatacctattgcaataacaaagcagggatggtggcataaaaaatggaatgctgttttgtctccattggaaatgaaaatattacttgggcaagaagcaatacagaaagttcatgagcctactgagagtaaataa

SEQ ID NO: 18741 - DNA, 243 bp, Escherichia coli
atgatcaacacttgtcgtactaaacgcactttttcccataagttcaagctagaggtggtgatgccaattagtagaatatatattttcaataaaagtaccgatgactttttcatgaagttttacagaacgagagaaactgacagttctgcgagccaggcgtttgattcgggttctcaggatcagattgttgcgttcaatgcgcagagtaaaaattttaccagtcagattcttctccttcggtaa

SEQ ID NO: 18742 - DNA, 1065 bp, Escherichia coli
atgaatataaatatcgaagttctattgcaacctattgatagtaaatctcctgttggcgaaaatattgaatatgaacttgtttataatgaaattcgccaagccagagaaagcgatccagaatacctctcaggcggtgaatggtctataacagaacctcgtagtgcgaattggaaaaaagtacgaaatctttgtgagcaggttctccgatatcaaagtaaagattttcagatcagttgttggtatgtggagtccctctcatatatctacggacctgaagggctggcagttggatgtgattatttaagtgagtttatatcacgattttgggaaaactgttggccatctattgatgaggggccagaaatgcgatatagtaaattaataaagttggataaagatatcgcacgttgtttaaatgaatatccaatattaaagcgtaaagatataaatttaagttactggtataaagttcgttcttttgaacataatcttagcattaatccagaacgacgagatgaaataattgagagcgaaggcgactattcaataaaaacatttgaaaaactcacaagtaatatatctccatcagatatctctgctaagctacatcatttagtggatatacctcataaattagatgagcttgagtcgtgttatttttttaatagtaaagatattattcatggcgtttttaaaaaaacgagagagtgtataagcgatttaacagtttttttgaataagttagctccagctatgatgcgggtaaataaatctcagctcgattctgaggttcttattgaagaaccgattgctccttatatatctaatttatctgttggggataataaagcattaaaaaacaacatgagccgtgaactagctctaaagcagatgaaagaaatagctgatttttttcgggaaacagaaccaagcagtcctgtcccttatcttattgagcgggcagttcggtgggcaaacatgtcagttacggactggttaaatgaattgttaccagataaagaagcaattcataaaataaatgaagttttaaaagggaataattag

SEQ ID NO: 18743 - DNA, 450 bp, Escherichia coli
atgaagatatcaaaatatgaacttccaataatatttgatccatcgaatttagaaaaagaaattgaatcatgggtgaaagactctaatttatcagagttgatagcatggctagcagcagttcttatgccgtcagagttgaccgaatcagctatattattacgtgatatccaaatatatttggagtcaccatcttcgaatttgagatggaatatatttaaaaaatcagaggaggtcggtttttcaacaacgtcagggttgttaggtctggcattatttttattgaaagggagtatgagtcctgatgaatatgaacctgtctatccacctgatggcgtagtagaacaaataataggatgtattctaatgttgctgacagtttctaaaagtcaagccccatcaaacgaagcagaaaaattatatattgcttggtgcaactacaaactacaatag

SEQ ID NO: 18744 - DNA, 1932 bp, Escherichia coli
atgcattatttcgatagacattataaaaatcaggataaacactttattaagatacatggtcaactagctgaaattctattgcctatttctatcgtaggacatgaaggtttttctgaaccattttgttataatcttaaggcttttgttcgtaaaggcagagaggggcctaaaaatatatatggaaataaaatatgttgtgaaattaaagatcctacacagtcttttcccgcaagatttataaatggagttataactaatactgaatatggagataatgatacggaattgattgtttgtaatttcaaaatagagcccgatttggcactgctaaaattaagcaaatccacaagagtatggaaagaaaaatcagtcccggatattattagtacaatcttgaatgagtacaatataagagacataaaatttcttttgtataaaaaatacacacccctggagtattgtattcagtatagagaatctgattatgactttatttatcgtattctttctgaagtgggtatttactactattttatacattcctgtgatgagcatgttatggtttttgcggatcataaatcagcacattctggtactaaagaaaccgagttatatttaacaacaccgaaatcttcatttaaaccagcaagtatcgatgaatggcatatctcatctgaaattataccaggcgagttttctatttctggatatgatatgaataaagcggaaggttttagagtgaggatggatggttatgaatatactaaaggattgaaaaaaattcactttggtgatatatcaccacttaatgatcgagagattttgacaaaaaaaataagtacattgattagttcacgtgaaagcaatacgacttttggctggggaaaaacagaggcatggtggctttcgtgtggggaacgttttaagttaaaaacggttgaggctaaaacatttaactattatgttttttctctaagtctgaaagcgtttaatgattatgattccgagtcaggatcttttagttgccaaatacaggcgttagacagtgatataaattggtgcccattagagcctgaagatacaccagtcataccggggatcttgatagctaaagttattggtccagagggcgaagaaattcatacagatgcttatggacgtgtaaaaattcagttcccttgggaagatggtcgaacaggggagcagtcatcctgttgggtgcgagtatctcagtgttggtctggatttggggctgctagtcaatttatacctagagtgggtactgaagtttttgttagttttattcagggggatccgaattgccctgttataataggaagcgtttataatggaaaaaataaaccaccgctagacttgcctaaaaagaaaaatattagtggttttgtaacaaaaagtattggtggaggagataaaaatgaggggcatagatttatttttgatgatacaaagggtgatgagaaaatatcaataacttcgcagaaagatttctttttaattgtaaataatgatgcgatccatgaaatcaaaaataaacatgcactaaaggttttaaaaggcaggagcacacaaatagaaagtggaaatgatgagttagaaataagtcaagggaatgttaatcaaacaatagctggcgattttaatataaagctcactaatggtgattataggttgatagttgatggaggtgccacgaatataaaatcagacaaatctttaatgattgaatcgattcaatctcttattttaaaagtggggtctaataaaattgagttatcaccgtcaggaataacaatcactggaactctgttaaaattagaaggtaaagctaccactgaagttaagggaaccatgatgacagtccagggaagtgctataacacaaatcaaaggtggtattataaatattggataa

SEQ ID NO: 18745 - DNA, 690 bp, Escherichia coli
atgcctaccatatatacagagtggttaattgaacgagaaactcgctataatgactttgcaccaaaagctttactagatatttttaatcacagacaatattgtctttcatatcttgcatggcataaacaacattatccatcaaaagtagaagggcatgacaataatacaattagcaatgttgtcctttcactatgcggaatgtcacatatatccgacaaattatctaataatggacatgcgcagttttatacctattcagtacggtcattaacaaatttagaaagaattttgcggcaaatttgtcaagcgcaggttattattatcccttttagtgggcgctggcaaaatattgatcacaatgaacgatgccaattaggggataaaaaaatattgctttcatatggaccagtaataggaaatgttcgatgggatatatcttctagttttgaggtgataattggtcccgtagatttaaatatagcgcataaatttatgtcacagggtgagtattatgattttattcaagaacaaatccgaatatatgttggtgtagttctcgattttattataaaagttaaaatacacatggctcctcataaatctatacctttaggaaaaggagaactagggaaagatacaagcataggtaaacaacatgagccatcgatttatacagtaagagtttactag

SEQ ID NO: 18746 - DNA, 1827 bp, Escherichia coli
atgtgttttggacaaaggccactgataatctttcactttatgaataaattactttcttattaccaaaaagaattatcgtttctaaaaaaacatggaaagatcttttcagaaaaatttcccaaaatagcaagacggctaggttttcaaaatggggagtcagaagatcctcatgtcgaacggcttgttgagtcttttgcatttttaacagctcgtatacatcaacgcctcgatgaggatctgcctgaagtaatggaggctttgcttaataacatagctccacaatttctgcattcttatccttcagcttctattgtggcaatagaaccgcatagcatatccagtggattgactagtgcgcatatggtgcctgccggaagtaaaatctatgctcgagacgagaaagattttgtgtatgaattttgcacaatttatcaaacagaagtattaccacttacgattaaagacgtaaatttaacacataataaaaatgatgcagcttggcatttgaaaattaaaatgaaagcttggtcaggagtatctttaaatatcgaatcaattcgattttatctgaatggagctgagaacattgtcggcaccatttatacattgcttttatcagagctgaatacattatcgctgaagttggatgaccaagcttatcagctaacgacaaatgatatccataatgtaggttttgatgagtttgaaacgatgttacctcagagtggaaacatatcttatctccatagtatgatgatggattatttttcattctctaaaaagtttcattttatagatatcagcctacccaaaggaataaagatttcgtctaataatgatattataatagaggcggtttttaataattgctatatgtctcatgatcttgatcgtatagagcataatattaatcaagagttttttaaaataaattgcacaccaattataaatttatttaaaaaaagagcagagccaatagtattttcagaagaaaagttggaatataaagtattaggtgacattcgataccctcgtgaggtcatagtatggtcagtaaatcgagtgatgttacaaaaaaaagaaaataacgttataaaaaatattgctattaatccgcttttaggcttggaacactctaacaggaatcgagactataatatttactggcagagttttcgtcgtcaggaggtatgcggagatggatatacagaaactgtatatttgaagttctctcgtgatgaagatgaggctattatcttagattctgaggatatcataactatggaagtttattgtaccaacggtaaccttccatttacttatcctatactctattttgaatcagaaatacctgtgccagaaataaagatatcatcactttgtcggccaacgagtataattaaccctatttctatgagtaaaataaattggagggtaatatctcagttatcgctaaatcatattttatatagtggttctaatggggcttctatgctaagggaaatgctatcaatttataattataatcaaaatccaggcaatgaaagattaataaactggattattgatttaaaaattacaccaatcacatctcgattgtcaatgactaatcctggttctattgcaaatggtgttagtatattaattacatttgaacattctgcatatacagaccctgaatactatcttttctgttcttttatagaacgcttactaggattatatgctcccgtaaatagttttacacgtgtagttacacaaatagaaaatgaaacacatactagaaaaatctggcctatacgagctggacggttatcatggctttaa

SEQ ID NO: 18747 - DNA, 486 bp, Escherichia coli
atggctaaactacaggattgccagtttattaaatttaaaatcgatggtaaagagctcaagggggcatctgaagaagatacttataaagactggatggaaggttatgctcctataaaccttcaagcatactccgggatcgatggtgctacatatgcgccagtaacactatcacttttgatgactaaagaaagtagtgaaatatatgagtcatatttaaaacgaggttataagagaattgatgttacgatagtgcacaggaatagtgataagtttggtgtgctatatgaatctcttaacgtggaataccaagactgtcagtgtcagtatataacatttgagagtattgatgggcgcttatttctgtgtacttcagtaatagttgaaggggcagtgcaggtaacgatgcaagtacccaatagcactgatactgggttggataagatcggacctatcaaatatgacatagcagccaaagcacttaaataa

SEQ ID NO: 18748 - DNA, 1479 bp, Escherichia coli
atgactgttgaacactcgaaagctcaattggaaaatatagtgcctgatgatgactatcttgagcgtattatcgataatactcaggccgtaagacgagaatctgatcgtcaaaggtttaaattacaagtaacatcttttttgacagaaatatcttcaggtgcattggttgtatctagtgatctgatcggaagtatagaaaagcggattgctgtgattgatgaagtattatcaaagcagattagcttaataatgcatgcaacagaattccagaaagtagaatcagcatggacagccttatataagttggtgcagtcaagtgttacggaaaatactgaaattagagtcttgaattgtagtaaaagtgaattactgaaggattttaagtcagcctcggattttgatcagtctatgctttttaaaagcatttatgaaagtgaatatggtacatttggcggtacaccattttcggtgtttgtaggtgatttttattttgataacgtaccacaagatattgagcttttggaacacatatctcatgtcgcggcagcagcacatgcaccatttttgagtgccgccgccccgggaatgttatctatgaatacatttagtgatcttccgaggccaagggatctgtccaaactctttgatactaccgattatgccagatggcggagttttaggttaacagatgatagcaggtatattgggttaacaatgcctaaagtattaggcagaatgccgtatggaactaagaccatacctgcagaaagctttaattttgaggagcatattaatgagtttaatgatggaaaggattatctatggattaattctgcatacgaattagcaattcgtattgtaagttcatttgaagaatatggatggtgtgctgcaatccgaggggttgagggcgggggattagtcgaatcattacccgcatataactatacttcgcacacaggagagcatgtattacagtgtcctacagaaatagcaatatcagatcgtcgtgagaaagaattatcagatttaggatttattccactcgtttattgtaaaggtacaaattatgctgcattctttgcggtacaatcaataaataaacctagactttataatactgatgaggcaaatgctaatgcgagattatcgagtcaattacaatatatcttggcaacatctcgattcgctcattatctcaagtcaatagtacgcgataaagttggtagctttatgtcaagaacagaatgtcaagcatatttgcaggactggattatgcaatatgttgtcgcttcagataatgcaggccaagagacaaaagcacgttatccattacgagaagcttctgttgaagtactagaggtacccggaagtccgggtacttacagagctatagcttggttaaaaccacacttccaattggaagggttgagtatgtcattgaggttagtagctgatctacctgctggtgttaattaa

SEQ ID NO: 18749 - DNA, 477 bp, Escherichia coli
atgggtagtacacaacataaacttgataaagctcgtccccctagagttcaaataacttatgacgttgaaattggtaatgccaaaacagcaaaagagttaccattggttattggtgttatgggggagttttcatcagaaacagagccattacgtgaaaggaaatttattagtattaataaagataacttcagtgaagttatgtcatcaatgaaaccatcagtagattttcttgttgaaagcgcgttgccggacactgaaggaatgatgaatatatctgtggatttcaatggaatagatgatttttcaccagattcggtagcaaagaaggttcctgctttaaaaaaactactagaactacgtgaacaattatgcgatttgcgtaatagaacagcaagtaatgaaaagctgaaagagcagttgcaggagttgctggataaaagtttgttaaatcgagaaaaagacactgtagaagaatag

SEQ ID NO: 18750 - DNA, 1875 bp, Escherichia coli
atgcctgattgtcttagtaaaaagatagatcagttgagcacaatccttgcaccttatggtgcaaggaagctttctacgaatgaattatcaaaattcaacgataaatatgtttgtgcttgggaattagtaactgatttagaatttagtaatgaaccaattgtattgcaactaagatacaaaactcttagtcaatttgacattccagatgtgtttatttcctcacctaaaattgatgtttgccaactcccgcacttagaaaaaaatggcaagttatgtgtttggcctgacagttatatcatcgatcataatgatatgacctatgcagtcgatttactaaacgatgctatactaatgctaagaaaaggaataaatggagatttaagtgaggatttcattgatgagttccagaactattggatttatcaatgtaataaaatagatcgacttataagcctgtgtgatctaacaaataaaaacacaaggtcggttttcggttatcggactcgaaaatttggagtaatatactctgacacacaaaaagaattaattaactggttggaaaaccaaaaaatattgccattagaatcggatgaaagtaattcaaaagataagagaataaggcaacagcaactctctaaaataatttcaattccattgatattcttcaatgaagcctggtatccgagtcagtatcccaaaactgcaagggatttatttgaactcataaatcagcaacaggaagattcagaaagcactattgaattgatcttaagatcttgtgctaatatgttcaatgtcaagccaataattctaatttcattcccaactccttctgggatgaatattataggaatacagattcctaagggagttagtgatcttgcctcagaccgtttcgataccagaggtattagtcggggtcgattcaggaatacagctttattagatggttatagaaattacatcgatggaaagattttaaaaaatagaataagtcaaacaaaaacagaaaatctcatagtagaccgttctgacgattcttggttaacaggccgtgagcataacaaaacttacaagaaaatctctgaacataaagtagctatcgtcggatgtggttcagtaggttcttcggtatcaagactgttacttcaatcaggtattagaaaaatgatgctttgggatgatgatttaatgaagagtgaaaactcctctcgtcatctattaggatttgattctgtttataaaaataaagcattagctcttgcctcaaggctacgggaagagtttccaaatgcgtatatagaagcttttaatgaagattggacagaagattccaagaataaccagaaaattgcagaagccgatattatagtaagctgcactgcacattggaatactgaacagcagttaattaaaagacagtcggaagacattcttggtgctattgtctttgcatttgttgaagctcatgcgatggctgggcatgtaatagtcaaccaagtggattctaatgcttttaatagctggcatattacagaaggtaaatatataggtgcattaaaatatccggctacttactggaaagaaaatactcgcaaaaggatagctgcatgtgccggagagttccagccatacggagctatcccattgactaatttacatgctctaactgcaagaacggtaatagatcttattatggatcgtttttcaaataaatcttttgcttatagttatttaggaagagaaacagaacttttggaattgggtggaaaatggaataataaatggatagcacaattcggaaatccagaaaagggtgattgtatcatacctcttgtttttgaaaattctaattgggaaaaatgtgatgcataa

SEQ ID NO: 18751 - DNA, 1155 bp, Escherichia coli
atgactgcaaagatatcttttttccccgtaggtaatggggatatgacacttattcaaaccgaagatggaaagaatatattaatcgattgtcgtatcagagatggtaaagaacatcccgatgttcgctcacaacttagagaaaaactttctcgtaatgacgaaggccgtctctttgttcatctctttatttggtcgcaccctgattcagatcattgcgatggagtatctgatcacttccatttgggaaaacctgaaaattggagtgaaaggagtgataaaattttcatcaatgagatctggtcaagcccaattgtatttagacgacatcatgcacagaatcatcctttatgtgatgacgcaaaagctttgaacgcagaagtcaagagaagagtcaatctttataaagaaaagggctatttggatggagtcggaaatcaagttttggttttaggcaaggacgatggtgataaaacggatgacataccaaatattctattagaattagatcaaaaaactcgctggattaaccaaagctattcctcatgttttgaagctcatttactgggtccttcaccgaagaaagaccttgatgaattagaagataaattgggtaaaaaccattccagtgtaataatgaattttgcaataaaaggtggtaataaaactgcttattttttaagtggtggagatgccgaagttgtttgttgggaatgtgtaagagatcgtctaactgataaatattcaatgtcttggttagattatgatatcttacaagcaccacaccattgttcatggcatagcctttcccatcatagtttaagtgatatgggtgatgaagcagaaacatcagagaaagcaatggaagtgttcaaccgggctaaacaaaatgctttcattatttccagttcaaaagtaattgaagatgatgagaaagaccctccggcctatcgagcaaaagaagaatacgaaaaaattgttgataatgtgcaaggtcaatttttatgtgtatcggaccataaaaagaatggagagaatattccgttagagattgaaatttccgataacggtattaagaaaattgctgcatctgcattaggtatggctgaatcatcaagtgctgctgtaaatagacaaggtggtggtggttatgcctga

SEQ ID NO: 18752 - DNA, 471 bp, Escherichia coli
atgaaaagaataatctgttatctcttcaccttactcttacttgttatccttgtgtatgcaggattagtaaagggtgatgtgttccctgaatggatcatgagcaagaagctaatgatccgttgtggactgatcggagtgcttggtgggactctttactgcctccgtggtgtatatctaaacaagtgtgtcagaaactgctgggatgaccgttggtatgtctggtatgtattaaggcctgttgtcagcggtatctgtggtgttgtggcctacctgtttctaaaagcaggtttgatagtgttagatgcatcacaaaacggtagtggtggagactatggatatatggcatttgccttctttgctggcttgaatgtagataaattcgtgggcaaaatcgaagatgtaggtatggctatttttgggattgaaaaatctcgcacagcaaggtcgggtgataattccgatcagaaataa

SEQ ID NO: 18753 - DNA, 1230 bp, Escherichia coli
atggcaaaaatcgctaagaagctcactgacactgaaatcaaaagcaccaagccagccgacaaagaaatcaacttgtttgacggagatggtttgatactacgaatcgctcccctctcgaaaggaggaaagaagaattggtatttcaggtatgcagtgccagtgagtaaaaaaagaaccaaaatgagccttgggacctatcctcaccttacactggcaagagcaagagcattgcgagatgaatacctttccttgcttgccaatggcattgatcctcaagtccataacaacgataaagcaaatgccttaaagaatgctactgaacacactctccaaaccgtggcaaggaaatggttagatgagaaggtaaagacctcaggtatctcacaagaccatgcagaagacatctggcgaagcctggagagaaatatctttcccggcttgggtaatgttcctgtcaatgagatccgacccaaactcttaaagcaacatcttgaccctattgagcaacgaggagtcctcgaaactttacggcgaatcatttcccgcctgaatgaaattttccgctatgcagcaacagaagaactcatagagttcaatccggctgacaaccttggacaacggttcagtaagcctaaaaaacagaatatgcctgcattacctccttccgaacttccccgcttcctgattgctctaaccaatgcttctatccgtttagaaacaaggttacttattgaatggcagttactaacttgggtccgccccggtgaagcggttcgcacaagatggtcagatattgatatagaaaccggcatgtggaacattccggctgagtttatgaaaatgaagaagcctcacaaagttccactaagcaaagaagctttgagagtcctggactcaatgaaagccataagtgggcatcgtgaatgggtgtttccaagcataaaggctcctcttaaccatatgcatgaacaaacagctaatgcggccataatccgcatgggcttcggaggtgagcttgtagcccatggaatgagatctattgcccgaacggccgcagaggagtcgggtaagttcaggatagatgtcttagaagcggcccttgcccattcgaagaaagatgaaataattgcagcttacaatcgtgctgagtatctcgcagaacgggtagttctcatgcaatggtggagtgattatgtttcatctcaaaaatacaaggctgacgcagcataa

SEQ ID NO: 18754 - DNA, 543 bp, Escherichia coli
atggcctgcagctggtccgagtcaccactggccacggcacgaccgccaccggccgcaatcagggcgtatgcccgtgccatgtcggtattgcccaccattgagctctcatcgagcaggaacagcgtgttgctgaaatccggcgtttctccgctgcgctgctgcagctgcgtgtcatgcagaaaggacgccagtgtctgcgcatccacgccggcgctgcgcatctccccgaccgcacggtgcgtgggccccagccccacaacacggggacgctcactcgccggcagcatgttcacggctgacatcaccgcccggaactgtgtggtcttacccacaccggcatacccctgtaccaccgtgaaacggtcggacgtttccagtatcatacgggtggcggcacgctgtcccgacgtcagtgtctccatgagttcgccgggtactctctccatcagcggcgtgaccgcctccttaccttcgagaatatggcgaagaatacttttttctgcctcatacgacgcacgggaaaccagcaggcctgtgccatag

SEQ ID NO: 18755 - DNA, 1107 bp, Escherichia coli
atgacaaaaaaacttttcttattttccctgctttgtatttttagtatcatcagcactttttcttttatgataaacagcaaacagaaaggaagtgcagagaaaattattcccgcaaccagcactcaatataacaataaatggcttacacacagattaataaaaatggattatgataatggaacagctttctctgttattcaaaaagcatggaataacaccgaacacttcatcctatcagccagagaaaaatgccagtcagccacaaccactcttgattttctttactgcacaaatgctctgcttggcgatatgttcccttataaggaatccaatatggtcagcccggcatatgccagtcagttctctgattgcgatctgaatgtctatcttctcattgacgcagccaaagaatctggcaggcagattgagatcatattcgcccccttccacgcttttatttcatatattgatgataataatgtaagagcatactgggaaacaactgccaacaataataaaggaactgttgctgatttaaatgataatcactggtatcaaaaaacattcaataaattctattatgctcctcgtagtgaaaattacatagaatcactctaccccgtacttattgcaaatagtgtggattcagcacataaaaaagaaatatacaacaatcttaagccagaaataaaaaaaacaccattagcttatgatctgtactacagcatgaaaaatgaaatctcgtctcaggatgctgaacagattaatcttttgttaagagaagacattacctcatcagataaacaacttcttcttacaggatacttcattaaaaacgacaatacagaagcagcccaaaaaatcattgacaacatacaagcaaaaaactgtaaatcagaatgcattgggtttaagaagaaagtgtactggtactttttcccatcatatctggtatctcaatatgcatcggaatttggcgtcactctgtcccttgaagatatatattattattacgcattcaatattatcattattctgtccatttccattttaattttgcccaacagcagagataagaacaagaaaaggcgtgataacaataaataa

SEQ ID NO: 18756 - DNA, 417 bp, Escherichia coli
atgaaattttgtcatataaaaaaggtatctgatattgtcttattttttatccttaacggtgtggcctgtggctacctgtttctgtactggtatgagtttttcgttgaatcagaaataaatacaccggcaccatttctgagagaaacaaaatatgtgctgatgatttatgccattgtaagcgttttgtttatgattgctccgtctttgttagtcagggctttatatggtcgaaccgggttatatgaatatacagaactgtgtcgtcatcgccctttgatcgtgacgggatgctatatcatggtgcctgtaacctgcagtctccccctgagtttccttatggatgggggagtgcctgctctgttatttattgttatcacgccttttcttgttcttatctctgctgttgggcaaaattaa

SEQ ID NO: 18757 - DNA, 240 bp, Escherichia coli
atgcataaatcagaaaatgaaaaaatagattttattctggatgagcatgagcggatattcagaaaacagggttctttgtgtatggcactgggtaagggctttttagttatagctattctttgtggtgttgccacattctgtgtttctggcctgtatctgaaatccctgtgcctgtccgttgcctgctgttgtggggtattcagtcgtatttttaattattacagcgtaccggaggaataa

SEQ ID NO: 18758 - DNA, 549 bp, Escherichia coli
atggctcatgcccggagaaaaatccacgatgtgcatgcaagagcgcccacctacatcaccacggaagccctgcagcgtatcggtgaactgtatgccatcgaggcagaggtccggggctgttcagcagaacagcgtctggcggcaagaaaagccagagccgcgccactgatgcagtcactgtatgactggatacagcaacagatgaaaacactgtcgcgtcactcagatacggcaaaagcgttcgcatacctgctgaaacagtgggatgcactgaacgtgtactgcagtaatggctgggtggaaatcgacaacaacatcgcagagaacgccttacggggagtggccgtaggccggaaaaactggatgttcgcgggttccgacagcggtggtgaacatgcggcggtgttgtactcgctgatcggcacatgccgtctgaacaatgtggagccagaaaagtggctgcgttacgtcattgaacatatccaggactggccggcaaaccgggtacgcgatctgttgccctggaaagttgatctgagctctcagtaa

SEQ ID NO: 18759 - DNA, 1077 bp, Escherichia coli
atgccgtatgaaatccccacgctgggcaaactgattgccgacggcgaaaaagatattgcgtatgaactcggcctgcaaaagctgccgcctgtcagtgttgagcaggcgctgaacgtgtcattcagcagtcaggtccgggatttatacgaccatcagagctggattaaggaccagataatcccgtccgccacgtctgatgatgaaaccattatcaaaacagcaacgtatgaaggggttatccgcaaacaggccacctttgccagcgggccggtgaccttcaccagtcagtctctccttccggctgaaacacggatgcagtccgacacgaatcaggtgtaccaggtgctcacatccggtgaggtacgggacggcgaggtcaccgtcattgtgcaggctgaagaagccggggtggcgggtaatcttgctgccggtgccgtgctgaccctgttatctccgctgcccggaacggccagtgcaggcgtggtggctgaaggtggcatcaccggtggcgcagacactgaatccatcgcggagctgctggaccgtctgctgtatgtgcgtcgcaatcccccggtgggcggtgctctgcatgattacgtcatctgggctcgcgaagtggctggcgtcagccgcgcgtgggcgtgggatgcgtggcacggccccggcacggtcggactggcatggctttacgatgatcgtgaagatattgtaccgacccgcaaagacctgaagacaatggagcagtatctgttctgccacaaacacccggccactggggttatggtgggcaaaccgggcggcattgaggtctggccggttcaggtcaggctgaagaaagtcgacctgtccatccgtctgacaccggacggccaggcgaacaggaacgccgtccgggcaaacctgacagcattacagaaaacgctggcccctggtcagatgctgccggtgtcctcgctgcgcacgaccatcggtatgacatccggcattacagattactttctcaacatcggggaagacaccaccagtgatgtggatgagcttatcaccatcggggaggtgacatggctcacagcgtga

SEQ ID NO: 18760 - DNA, 426 bp, Escherichia coli
atgctctcacggggtgacatcaccgtcacccataacggcctctcacgggatgaggggctggtcactcaggttcttatctgccttttcaccgatgcccgcgctgatgacgatgatgtcatccctgatggttccggcgacccgcgtggctggccgggcgacacatacagcgatttttcgtggggttcccgcctgtggctgcttgagcgtgaaaagctgacggaagatgtccgcctgcgcgtggaagattacgcacggctgtccatgcaaccgctgctgcgggccggttacgcccgtaacgccactgtcacggccagaatcatcgtccctgactgtattgcctttcaggtggtgttaacccgcccggacaaaaccacgctcacaatcgaaatcacccgtcgatgggaggccaccattaatgccgtatga

SEQ ID NO: 18761 - DNA, 537 bp, Escherichia coli
atgggattaagcgcaattacccgccgtctgcggctgatggttgaccgtgccattgtccgcatggtgtctgacagtctggagcggcagaacctgcaaatccagacgctggcagatgccaccgatgacgacgtggaacgcttccagaattacggttttacttccgttccgccggaaggttcagaagccatagtgctggccgttggcggacggcgtgacgggctggttgccatcgcagtggaggacaagcgatgtcgccctaaagacctgtcccccggcgacgtccggctgtatcaccgggacggaaaatcacacattaccctgaaggaaaacggcgttattgaaataacaggggaacaattagacgtttcagggaaaacggtaaatctcaccgccgacgaattgctgaatattatcggtaaacaaatgaaattcgtcggtccctgtgaatttactgaagatgtcaccatcaacggtaaatctttcagcaatcatattcataaggacggcgacaatgagaagacatcaccgcccgtatga

SEQ ID NO: 18762 - DNA, 1074 bp, Escherichia coli
atgggctccgtgattcttaccgttgacggcaaattgtgggaaggctggacggaaatgtccgtcagtcgttccctgaaggcgattgccggtgagtttgatctcagtgtgacaacccgctggtcagcggcggcaccgcgcgtgattcgtgaggggcaaccctgcacggtcaggctgggtgcggataccgtgctgacggggtatatcgatgattttattcccagctatgacgcagaaaacgtggagattcgcgtcatggggcgcgacaaaaccggtgacctggtggactgctctgtggtgcattcgtccgggaaatggaaaggcgtgcggcttgaacaggtggcggctgatgtctgccgcccgttcgggataaccgtcatcacggaaaccccgaccggggaggcgtttgcgtctgtcgttctggaacagggtgaaacgggctttgaactgctcgaccggctggcaaaacagcgcggcgttctgctgacgtctgacggagggggtaacctgattatcacccgcgcctcttccgttcgcgcaggtgtctcactggtgctgggaaaaaatatcctcgccgcccgtgggcgcttcagctggcgggagcgtaacagtcagtacatcatcaagggcaccaccagtgccggtggcaaactgtgggacagccagcctgcctcgatggtgggcggtcgccagtacatcaccgaagacccggaaattaaccgttaccgcccgcgcattctggtcaatgaagacagtctgaccgtgggtggagccagcattcgcggggaatggttcaaagcccggatgctgggagaggcccgcacgacggaaatcacggtggcaggctggcgcgaacagggcgacagcggcccgctgtggcagaccaaccgccttgttgatatcgacgacagtattcagaacctgaaaaccacctggttgatatccggggtgacctggacggatggtgcacaggggcggataacggttctggcgctggttccgcctgaatcactggacatgccggaaatgaaagtgaaaacgaagaaatcagcaaaagcggtggtcacatgggattaa

SEQ ID NO: 18763 - DNA, 1275 bp, Escherichia coli
atgacaacaagcaaaggcaaatgggacgggctgcgcgacgcctcgtttcgcggcgtccctttttttctggtggatacggaaggcactggtggccgtcgtgccattccccgtgcttatccccggcgtgaaaccgcctggacggatgataacggggccgttccggggcaacagcagattaacgcgaagctgttgggtagcaacttccaggctgatttaaacgcccttttagatgcgctcaatacccccggccccggcgagcttatccatccgtggttcgggatacagaccgtacaggttggcaaggtcacccatcgcctcagcacggaggaagacggcattgcgtatgtcacatttgaagtgtttgaggcaggcgagcgtctgttcccgtctgcggcggataacacgcagcaggaagtgctgacgggcattgatgcggtaaaagcggccattgacgatggcaactggttccgtgcacctgacgggctgggtgagatggccgacagctttctggccgatatggaaaaccttgtggccaacctgcccacgttaccgacggcactgaatcagtggatggacaggctgaaccattttaaggagatggcaggaaccattattgccacgccggggcgcctggtcagtgagctgtcctcgctcattgacggcgtggttgatctggtgacggaatcacccgaagcactggcggtttacacgacattacgcaaccagtgggccggagaacgcgcccgacaggttgccactggcgcactgccggaagatatcaccgtgaagcccggcagcgtggcagacggtgaaatcggctttgccatcgggctgtcagcggattatctgccggtatctgacagcctgcagaagaacattgacgacttccgccaggtggttgtgctggaaaccctgctgggacaggccaatgcagtggcctcgatgacgttcgataccagtgatgcggcattatctgccggtgacgcgctggcggctgaactgcatgagcaggcggtcgcggcggtggaaaataaccagcgggcattgtggcgaacgctgcgtgatttacggcaggccgtgattacggatgcccgcgagcgggccgcccgtctgccggaaacccggcaggtgacgctgaccacaaccacatctgccgcattgctggcatggcgcgagcatggtgacaccagccgacgggatgaaatcgtgcagcgtaaccgcctgcgccatccgtcattcatactgccaacgcaacctgtggagattaccgactga

SEQ ID NO: 18764 - DNA, 1857 bp, Escherichia coli
atggcaacaggtaaccgtctcagcacggaaatcatgatcaaccttgccgggaacctgaccgccaaagcccggcagtacggcgcaaatatgtcgcagttcgcccggaaccatcagaaggcaatgaacctggtcaaagccacaacggaatctgccacgcgtggccttgacgtgctgggtaaccgctacacggtgatgattgccggttttgcgggtagcgccatgatgcgtgagtttgcgcaggtggatcgccggatgacccgtattggtattgccgcagaaaagacgcgcgacgaaatggcacagatgctgaatggtattcaggacgccgccatcaaatttaaggttgatgacagtgaactgataagcgcagtggaaaaagtcggcaccgtgacgggtgagattgattttggtgttaaaaacaaagaaatgatggcggcatctatcgccgcttccggaagttcaggcgaatccatcggctcgctgttttctcagtttacgaagttcggcatcagggatgaaaacgaagccttaaaggcaatggataccctgaacctgctgggaaaagaaggtgcctatgaactgaaagacatcgcagaaaaagcaacccgtgcgatgtcgctgtattccgctgcgggcggacgtggtgtgcagggtgtcaaggacgtaggggttgcacttgaatctgccgttgatgccacagggaaccgtgataccgccgcaaccgctgttgaaaacctgatccgtgatttacagcttcctaaggttgtaaaaacattgcggacaaatggcattgatgtttacgggaaagatggtcggatgcgttcgcttccactattgcttcaggagattgccagaaaatcagggagccggggcgcagaagaacaaaataaaaggctgattgaagccggttttaaccaggattcagtcatgcttttaagcagcgtaacgtcaggcaaaggcgcagaaaacctgcagcgttatatgaaagtcgtcggtgatggtaaaggcatcatgaaagatgctgcgtatgctgcacaggattttacgtcggccatgcaggcactggaaaccagctggaaaaaattctcccacaaccagctggcaaagcccgttcaggaactggcggatgccatcaacagcgtggaccagaacaccgtccagaactggttgcaggtcggtaaatatatggcgattgcgctgggcggcattattgctgtcagaaagacataccagttcggtaaaaccattcacgacatcatgaatcccaaagggaaaggcaaagggatacccggtgatattacggatattttcggttccggtgtgatgccggtgtatgtggttaatatgggcagtggcgggatgaatggtaataccggtggtctgccggatgcgccggatccatcgcgcaatccccgcactccacgtaaccgtggcggggcggcaggtaaaggggctggcatcattgccggtgctctggagttttacgattttctgaccacgcaatacgccctgccgggtgaggttggcagtctcactaaatccgttgccggtgccaccggtgccagtccgtgggagcgcgagttcgcgcaacaaagtcaggataatcagaaagcactggaatccgtctggcgtaaggtaacggactggttcaactcgctgggtgacaagaacattgccgacccgcgaccgtgggcaggtatgcagggcacacagaataatcctttccttccgcaacaattgcagggggaaatccgtgtggtggtggaaggtgacgcccgcgtgaaaagcgtcagagtggatcaacccggcgtcagactcagtgcgcaggctggcgtcaccagcgtggagcaagggtaa

SEQ ID NO: 18765 - DNA, 138 bp, Escherichia coli
atgccgctggcggcggcactgatgaacctgctggttaacctgtcccagagattcagtattcagtacctggaacagctgcccctgcggcagctgttccgcctgataaagcaactggagaaacagcatggcaacaggtaa

SEQ ID NO: 18766 - DNA, 396 bp, Escherichia coli
atggccgcaatggaatttgaactgaaacacgggcttctgaccggcaaaggtacggcagatgaaaccctgcataaaaccgtgaaactgcgcgaactgaccgccagtgacgtgattgatgcgcaactggccgcagaacgcgtcgtcatgggcgggaacggaaaggcggtggcttactgctcggaagtgctgatggggctggagatgatgcgccgtcaggttgcgtcaatcggtaatatccccggcccgctggacatgaaacagctgcgaatgctccacccggcagaccttgagcttatcagcacgaaagccgccgcgctggatgagatgcttgaggaggtggcaacgcgggggcgaactgatgccgctggcggcggcactgatgaacctgctggttaa

SEQ ID NO: 18767 - DNA, 357 bp, Escherichia coli
atggcaaaaattcttggcatggcgaccattcgcgtgaatggccgcgaaattaaaaccgaggggaaatccatactgaacccgggcggcttcagccgcacccagcatatgggcggcggcaaggtctggggcatctccagcaagatggcctcgccgtccatcaaagtgaccattgcggcagcagcggatatggacgtgattgaaatcagcagctgggaagacgtcacggtgatgttctacggcgacaacggcctgaactacatgatgacgggttcagccacggataacccggcggagctggacgaggattccggcaccatcagtgcgaactttatcggtgaaaaatgcgtgaaggtgtga

SEQ ID NO: 18768 - DNA, 1476 bp, Escherichia coli
atgtcgctgggttcaattcctgatgatatccgcgtcccgcttgtctggatcgatatcgacaattcacaggcgctggatggtgcatccgcgcaaagccgaaaaattctggtcatgggccatgcggtatcgtccggcagcgcagacgccctgtcactgacccgcatcaccagtgacagccaggcagaccagctttatggcaaagggtcgatgctggctgaaatgctcaaaatgctgcgccgtgccaacacgtacacggaaacctgggcaatgccggttgccgcgcctgaaggcgctgccgcaaaagccacactgaccgtgctgggtacggcgaccaacgccggaacggtggcactgctgattaacggtgtgtccgttcaggtgagcgtgagcgccggggatacgaaggaaaacattgcaaaagccattgctgatgcggtgacgaaaaagcctgccacgcaggtggctgctgcggtgaaggatgatgccacggataccgtggagctgaccatgaactggcacggcgtcaccggcaacggtgccgacgttcgcctgaactactacaccggcgaagccttcccggcaggtgtgaaggtgaccgcaaccgcgtttaccggcggcaccgggacaccggaaatggcagacgccgttgcggccatcggcccggagtggtttaccgatatcatcgccccgttcaccgacacgaaaagcctgaacaccctgcgtgatgaactgctgaaccgctgggggccgctcaaaatgatggaggcgcagctgtggacagcgtttcgtggcacgcacggggaaaccggcacgtttggtgaaacccgcaatgactggctgattagctgtatcggcaccaacctgtcaccgcacccggcgtggatgtgggccgcgtcatacggcgcaacggcagcgtatcaccttgccattgacccggcgcgtccgcttcagacgctggttctgaccggcattctgccgcctgcgcgtaatgttcgctgggatatgccggagcgtaatctgctgctgcatgacggcattgccacgcacatggtggacgccggggataacgtctgcattgagcgtgaaatcaccatgtaccgggttaaccagtacggtgatgcggatgtgtcgtacctggatgtgcagtcacccgccacgctgggccgtatccgttacatcatcaaaaaccgtttctcgaaccgttatccgcgccacaagctggcggacgatgacgtgctggactcgctggatgcggggcagccggtgatgacgccgaagctgtgcaccgcagagctgctggatatctgccagaccgaactcctcccggcgggccttgtggagaacttcagcgattacagggacacgcttcaggtgacacgcgacagcagtgataaaaaccgcctgaactttatctgccacccgaatctggtgaaccagctgcgtgtgctggcaggcctgattcagttcaaactttaa

SEQ ID NO: 18769 - DNA, 201 bp, Escherichia coli
atgtacggggtgacgatggaacagaaactgattaagccagcgcgggaaagcgttcgtgtccgtaaaccggatggcgcgcatttatccccggaaggggaacgtctcgatgtctgcgcttactggctgcgccgtgaagccgagggagatgtggaaataaccacacttccgaaaaataacaacaaaaccagagggaaaaaataa

SEQ ID NO: 18770 - DNA, 612 bp, Escherichia coli
atgacagaacaacgccctgaactgcgcacaccggggagcacagttgcggccgcagagcgcattgtggcctggctgaaaatagcgcttcagggaaacacccctgaccgggccgacgtggtggagcgtcacatcggccagttcaacagccccgatgaagtgaaacgctatctgtccggtcgcaccggctgtatccgggtagctgccctgcgcgtccgggatattaacccgcgcggcgggctgtccggtctggtcacctgggtggcttacatcatggcgacggattcgtgggggtactcccgcgacgtgcgctgtgaagtgctggccgggaaggtgatcaaacgtctgctgtcgtcagatgccacagcgggcatgggggctgaacgcatggctgctgacgtgcgggcagacaacatttactccgccagcctcgacgggctgggcgtcaccatgtgggcggtgacgtgggagcaggaatttcagctggatgaagagattgatctcgccgcgctcccggacttcctgcgcctcgggacaacgctgcgtagcggtgaacatactgagattaacgacgtgatccatgtacggggtgacgatggaacagaaactgattaa

SEQ ID NO: 18771 - DNA, 543 bp, Escherichia coli
atggggatttctgtacaggtcagcggtgaccagcggctggaggatatccgccgtgccgttgaaaagctggcagatggttcattgcaggcagagctgctggaaagcatcggtgcggtggtggaatcacagacccgccgccgcatcatcgatgagaaaaccagtccgggtggcgaacgctggccggactggtctgacgggtacaaaaagacccgccacggcaaccagagtctgctgcgcggtgaaggtcatctactggagagtatccagtacattgtggaaaaccgcgtggtgcgtatcggttcaccgctggattatgcccgcatcatgaatgacggcttttccggcagtgtgccggtcagcgcccacaagcggcttatctcgcagtgtttcgggcgggcgctgaaatatccggtctggcagaccgtcggcgcacataaccgcatgatgaatattccacaacgtgaatttctggggctgtcttctgccaaccagcaggagctgcaacaggttatcagtcatttctggaaggaggttctgccatga

SEQ ID NO: 18772 - DNA, 438 bp, Escherichia coli
atggggtatatcacgcaggaagacctgttacgcgcggacggcaatcttgtctggaacatggcgattaaccgggaaaccaacgaactggatgaagacaaaatccgtcaggccatcagtgatgccgaagcggaaattgattcgtttctgtcccgccgctacccgctgccgctgggagtgacggaaatcccgcgcccgctgcaacgcgtggcggtatcgctggcgttttactggttgtcagagcgtgacaatcaaatcacggagctgatccagaaacgctacgacgacgccattaaaaccctgcgtgagatggcgaacggcacccgtgacctgggtctgccgacgtatgccaccccggcagaaaccgaccacgggaagatcattgtggtgggtgccaatgcccggctgttcacccgtaacaacctgaaaggggtgctgtga

SEQ ID NO: 18773 - DNA, 312 bp, Escherichia coli
atgagtgaaaaagcaggaaccaaaggcgcgaaagccgcaaagaacagcgcagcacaggaaaacccggcaccgctggcagacgttattgtggctgacggtcaggcgaatgaaccacgtccggctgaagccccggctgctgtacagggtgacgcccctgtccggctgaacgtccgggccgtgtctgaaaacgggttctggcgctgtggccgtttctggtcacatgccggtgaggatgtggcggtgaccgctgcggttgccacccgcctgatggctgaaccgaatctgattgtccgggaagcggagaaaggctga

SEQ ID NO: 18774 - DNA, 903 bp, Escherichia coli
atgggagcagtcacttccgaagtccttcacgcgctgaccacctgtctgagcgccgcttatacccgtggtctgagtggtgtcaccccacagtggcagcgtatcgcctctgaaatcccgagttcgtccgcctccaatacctacggctggatgaaggatttaccggagattaaagaatgggtcagcgcccgtcagatggcaacgctggacggttatggttacacccttgcgaacaaaacctgggaaagttcgatccgcgttaaacgcgaacacattgaagacgatcagattggtcagtacagcattatcgctgaacgctatggccgccagacgtcggagttcccggacaagctgtgttaccccctgctgtgtgccgggtttaacaccctgtgttttgacggtcagaacttctttgatgaagaccacccgctgggcgacggcacctgcagcaacgttgtcggcaccccggcatcagaccagggagaaccgtggttcctgattgatgattctcaggtactgaaacccatcatctggcagacgcgacgcgcctttaagtttgaagccctggatgatctgaacagcgagcacaccttcaagaataacgagttcctttacggggtggacggtcgctgcaatgcgggcttcggcttctggcagaccgccgtcggttcccgtgcggcactgacagcggagaactacgagaaggccagcaatctgctgctgggtatgaaggctaccaacggtgaaccgctgggcatccgcccgaccacccttgtggtggggccgaaaaaccgtgcagccgcgaagcgcatcattgacgccatgctggttaacggcggcgattccaacatctggtacaaggatgtggacatcgtggtcagtccgttcatcaccaccccggcataa

SEQ ID NO: 18775 - DNA, 963 bp, Escherichia coli
atgcaaccggaactgctggcgctgtgtttttccctgccagaacccatcaatgagctgacacccgctcaactgccggaatggcttgaactcgtccctgcgggtgagttcaccgggcgcgatggccggacgtggattaaccgcaatccacatgaggtggttgcccgttcgtccgacatcaaaattccggtggacattgaacacgccaccgaaattaaaggcccgcggggtgaagatgctccggcgtatggctgggtggaagaactgcgggtgacggacagcagcaccattgaaggccgtgttgtctggagtgagtccgcccggtggatgctgagcgagcgccgctaccgctattacagcccggcgtttttctttgacgcggacggtgcggtgacacgtctgtccagcgtcgggctgaccaataaacctaacctggattttcctgcactgaatacggagaaaaacccgatgacagtacctgtgcaaatcaccggcctgcttgggctggctgaatctgccacggtggacgataccgtggccgccattaaacaacttcaggagaacgaacaggtggcgctgaaccgcgcacagacacctgacctgacgaagtttgtgccggtggaaacccacaatctggcactgaaccgtgccgaaaccgcagaacaacgccttcagcaactggaagagaaggaagcagaagcgcttgtggatgcggccatcgaagccggaaaagtggccccggcaaaccgtgacatgttccttgccacctgccgtacggaagaaggccgcaaacagtttgcggagtacaccagaggtgcacagctgctggtgaacaacgacaagcccagccagggcaaggataaacccgtgcagacactgaccgacgccgaactggcgatgtgccgcagcatgggtattaccggggaagagttcctcgccgctaaaccaaaacaggagaataactga

SEQ ID NO: 18776 - DNA, 765 bp, Escherichia coli
atgcgtgaaaccctcatcccgaaagaggcgctggcgtggctgaaggcgaagaagctgcgccccggttttgattaccgggatgtgtggcgggaagaacaccggaacagcttcaccgtggcaaaaatgctgcaactggatttgttgtcggatgtgaaagcccttgtggaagacgccctgcaaagcgggcagacgttcagtgagttccgggaggcgctgcaaccgctgctgataaaacgcggatggtggggcgtacaggagatggatgatccgctgacaggagaaacgcgcaccgtacagctgggcagcgaccgccgcctccgcacgatttttgataccaacatgcgcaccgcccgcgcagcgggccagtgggaacgcattcagcggacaaaacgggccatgccgtatctgatttacgagctggggccatcccgcgagcaccgggcggagcatgtgaaatgggcgcgtctgtgtctgccggtagatcatccgttctggcagacgcattttgcccctaacggctggggctgcaaatgcaccatccgtcaggtcagccgtggtgaatatgcgcaactggcggcacagagcaccattcacaccgaagcgccggaaatcagaactgtccgctgggtgaacaaacgcacgggcgaagaggaagatgtgccggaagggattgatccgggctggaactacaatcccggcataaaccgtgagcaggagctggcgcgccagctggcgacaaaacaggcccgttttgacagtgaataa

SEQ ID NO: 18777 - DNA, 1572 bp, Escherichia coli
gtgaacctgaaacaactggccggagccgttcgccgtctgctgaacccggcaaccggtgaggaagatacgctgaaaaaagagaggctcgatgaagtacaggcccgtccgcgtcaggcgggtgtgcgctcggcctcgccgggcatcagtatcgcttccgggctgaatcccggcaggctggcaggtattctgcgcaatgccgccgacggcatcacacgtgatttttttatccttgccgaagagatggaagaacgcgatttgcattacgcttcggtgttgcgcacccgcaagctgacggtagccggtatcgaaccggtggtggttgccgccagtgatgacgatgccgacgtgcagctggcggacgccatccgggcgctgatggacgctccgcaaattcccgaactgttgtttgacttgctcgacgggctgggaaaaggtgtggcggtctgtgaaattctctggaacacccgcaacaaccactgggtgccccgtgattatgagtgggttgatccccgttttctgaaagccgaaaagcccacgctgcgccagttccgcctgctgactgacgatgagccggtggatggcgtaccgctgacaccgggaaaattcattgttcaccagccgcgtctgaaatccggtctgccgctgcgtaacggtctggcccgtctggtggcggtaatgtacatgctgaaatcctttaccgtacgtgactggtgggcatttgcggaaaaattcggcattccggtcacggtggggaaatacggtcccaacgccacggaggagcaaatccgcgtactgattgacgcgattgcgtccattgcctcggatgccgggtgtgccattccgcagtccatgcaactggagatgcaggaaaccgccagccggaataacggcggtgcactgttccgtgaaatggcggaatggtgtgatgcgcaaatcagtaaggctgtgctggggcagaccatgaccacggataacggcagttcgcgttcacaggcggacgtgcacaatcaggtgcgcatggacattgtgcgctgggacgcgcggcagctggctaacacgctgaatgaatatctggtgcggccctacatcgaggccaactacgggccacaggcgcactatccccgcgttgttctgcgtatcagtgaagcagaagatctgaaggcgctgacagatgctctggtgccgctgattgaccgggggctgcgggttcaggaatcggagctgcgggaccggttcggttttgctgaaccggatgaaggggcggaagttctgcatcctgtgtctgccggggtgccaggtgatatggcgatgaaccgtgagcgcgtcgccctgaaccgggaacaccccgacgaactggcacagatggtggatgatgccctgcgtgactggcagaaaaccggcgaggcgttcacgaacccggtgctgacactggcgcaggaatgcgacagttttgatgactttctgaaacgcctgcctgagcttcaggaaacgctgaacgcggacgactttgccctgcaactggcagaggtgtgctttaaggcgcgagcactgggagacactgctcatgcgtga

SEQ ID NO: 18778 - DNA, 897 bp, Escherichia coli
atggtgtggtcaccggaggccgaggcggaatggaaagaaggtctgctgagaaataccgccacccgcgaagacgccctggaggaatactactgcgtcccgaaaaacggcggcggcacgtatatcccccgctcactgcgtgaacgtgcggcccgtggcaccgggaaagtgttgcgctttaccggcacaccggaatttaacgcactgacagaaagccagcgccgggcagaaatccgggaatggctggagacggtggtgcgccccgagctggaaaaactcccgaagaacctgcgccactgtctgggggaagactttgcgcgttcgggtgacctgaccgtactggcccctgtgacggtgaacgatgacaccacccgcgaggtgccgttcctggttgagcttggcaatatgccgtttaaacagcaggagcaggtgctgttctggctttgcgatcgtctgccccgtcgtgacggtatcaaaatggatgcacgggggaatggtcagtatctggcagaacaggcggcggagcggtacggcgatgaggtggaacaggtgatgctgtccgtggcgttctaccgcgaaaacatgccccgtttccgtgcagcgtttgaagatgatgagctgatccttccgaagcatgaagacgtgatcaatgacctcggggccattcagttactgcgtggtgttcccggcattgacgatgcccgtactaaaggtagtgatggccgcaagcgtcacggcgacgccgctgtggccattttcctgggcttccttgccagtaaggatgactgccaccgttacgagctgcaccgcctgaaccgcccggcgaaaccggaagaaggcaacacgcgccgccagatgaagctgacacgcggcctgaaaaatgagggaggtttactgtga

SEQ ID NO: 18779 - DNA, 2445 bp, Escherichia coli
gtgtgtgcaggaaagaaggcagtcgcagagccggtttcgtccgtgtttttccgtcgggctgcacttgcgcttgccgtatcagctgcttttgccagtgccacaggtgttgcaggtgaaaaactggatatgtcctttatccagggtggtgctggggttaatccggaagtctgggcagccctgaacggcagctatgcgccggggcgttatctggttgacctgtccctgaacggaaaggaggccgggaaacagatactggatgtgacaccacaggacagtaatgaactgtgtctgacagaggcatggctgacgaaggccggggtttacgtcagtgcagattactttcgtgagggatatgacgccacacgacagtgctatgtgctgacaaaagccccgtcagtgaaggtggattttgatgtttccacccagagtctggcgctgtcccttccccagaaggggctggtgaagatgccggagaatgtggactgggattacgggaccagtgcatttcgcgtgaactataacgcgaacgccaacaccggccgtaataacacctcggcctttggttcagcggacctgaaagccaatatcgggcactgggtggtgagttcttctgccacggccagcggcggtgacagcggggataactccaccacgataaacatgtttacggccacccgggccatccgcgcactgagtgcggacctggcggtcgggaaaacatccaccggggacaacctgctgggcagtacgggaacgtacggcgtgtcgctgagccggaacaacagcatgaagccgggcaacctggggtataccccggtgttcagcggcattgcgaacgggccgtcgagggtgacgctgacacagaatgggcggttgctgcattcggagatggtgccagcgggtccgttctccatcacggatgtgccgctgtacacgagcggtgatgtgaccatgaaaatcaccggtgaagacgggcgcgagcaggtacagaacttcccgttgtcggtgatggccggacagttaagtccggggcagcacgagttcagtgtggcagccggtttgcctgacgatgacagtgacctgaaaggcggtgtgtttgcggtgtcatacggttacggtctggacgggctgacgctgcgcaccggcggggtgtttaaccaggactggcagggcgtcagcgccggggctgttctggggctgagttacctgggagcggtgtctgctgacggggcttatgccacggcgaaataccgtgatggcagccgcagcggaaataaggtgcagttatcctggagtaaacaacttgagatgacgaacaccggactgcgggtgagctggtcactgcagagtgaggaatatgaggatatgtcctcctttgacccgacagagttgtggtcgcagtcaaatcatggtcgccggacgaaggatgaatggaatgccggtgtcagtcagtcggtgggtggtctgttcagtctgtcggtgtccggctggcagcggagttattaccccgcatccatgaccgggagttaccggtacagcgatgacaacggtaaggacacggggattaccggcaccctgagcacacagattaagggtgtcagtcttaacctgggctggtccggttcacgggacacccggggggaaaacaactggtctgcatcggcgtcagtatcggtaccgttcactctgtttgaccgtcgctacagcagcagtacgtcggtgagtacgagtaaagacggtggcacaggcttcagcactggtgtgtccggctcgctgaatgaccgtttcagttatggtctgggcggtggtcgtgacagtgatggcggtgccagcagttatctgaacgcgtcgtacagcggtgaccggtcttatctgagtggtgccctgaaccactctcattccggcggaaccagtggttctgtctcggtcagtggttcggtattggccgttccggcggcgaaggacattatgttcagccgcacgaccggggatacagtggccgtggtgaatgtgaaggatacccccagagtgaaggtgacgtccggtaacggagagacagacagcgatggcaacctggtggtaccgctgaacagctatgactggaacacggtgacgattgatgcgggcacgctgccgctgagcacagaactgacgaacaccagtcagaaggtggtgccaacggacaaagcggtggtgtggatgccgtttgatgccctgaaagttaagcgttacctgctgcaggtgaagcagcgtgacggtgagtttgtgccggggggaacctgggcacgtgacagtaagaacacaccgctgggctttgtggccaacaatggtgtgctgatgattaacacggtggatgcgccgggtgatatcaccctgggccagtgccggatacctgcggcgaaactgcaggatactgagaaactacaggagattacgtgtgagtaa

SEQ ID NO: 18780 - DNA, 792 bp, Escherichia coli
gtgagtaagcgtaacgcagtaacgacgtttttcactaaccgggtgacaaaagcactgggaatgactctggcgctgatgatgacctgtcagagtgcgatggcttccctggcggcagaccagacccgctatatctttcgcggggacaaggatgcgctgaccatcacgatcaccaacaatgacaaggagcgtacctttggtggtcaggcctgggtggacaatatcgtggagaaggacacccgtccgacttttgtggttacgccgtccttcttcaaggtgaaaccgaatggtcagcagacactgcgtatcatcatggcctcggaccatctgccgaaggataaagagtcggtgtactggctgaacctgcaggatattccgccggctctggagggcagcggtattgcggtggcgctgcgcacgaagctgaaactgttctaccgaccgaaggcactgcttgaaggccgcaagggggcagaggaagggctcagcctgcagagccgcccggatggcaggaccatgctggtgaacaccacgccgtacatttttgcgattggtagcctgctggacggaaacgggaagaaaattgccatggataacgacacggcacagaaactgctgatgttcatgccgggtgatgaagtgcaggtgaagggaaatgtggtgaaagtggattctctgaatgattacggtgaactgcagacctggacgattaaccagaaaaaaacgccaacgtcttccgggcagaaggcatctgattcgccgattaatccgtctgataaggcagataaaaaataa

SEQ ID NO: 18781 - DNA, 780 bp, Escherichia coli
atgaaaaagactctgattgcactggctgtggctacctctgctgcagtatctggttctgctatggcgtggactgcaaacggcgatggtggttctgttagcctgagcggtaccgtgaatgtgctatcaccaaacaccccatgggaagttaaagtaggcgatgcggtaaataacctgaatcttgagatccactcaggagatagggaagccgcgatccctgtgcagaagataatccctattctgggtattcgtactgcgtcccatgaccccttccacggacagactggtatcagtccgcagattgatttcggtaacgctattaataccgattcatttgaaggcggtcgtacaggtctaactctggaagtgaaaaatgattccgatgtaaaaattggcactctaaccactatcttaacttctggagctgaagcgtctgcggcagttggaaatacccgttcaaagtttaatctctttgctgccaatcaaggtcacgctttttatggggggctaggtaaatcgaatgataagatttcccagaatagttggtatatagctaatcttttcggtaatgattatgtcgaaaactataacgaccaaggcgggaatcttgtagcttcaggtagttatcagtacttcaataatccccaaatcacctattcagctgtatatgctgctggtattctgaataatacagatacaaatatcacaatcacacttgatcagcctgctacatcaaatattacatggaaagcatccctgccgattcgtgttacttaccagtaa

SEQ ID NO: 18782 - DNA, 798 bp, Escherichia coli
atgaagatagcgcatcattataaatcccttctttcagccattatttcggtggctctgttttattcggcagcgccacatgcagatattcttgatggtggagaaattcagtttaatggttttgtcactgacgaagcccccaaatggacctggcagataagttcaccggaccagacctgggcagtggatactgctgatgcgcgtacagataacggacaactggtttttaatttgcgtgataaaggggctctgccgtttctggaggggcatctgcatgaagtggctgagcgaggtggtcccggattcaccccctttattaccttcagcagtaacggacagccttttactgtgacggaaggaaatggtacctcagcacagcatttccgcgcctctgtcccggtgcgtgacccggaaacgggaaatgtgtcggggcagctttctttcaccctgaatcaggggatggcagtcagtgccggtgtacaggaagagggggcgacagtgccggcagggatgtcgctggtcggcggacagagcgtgacggatgtacagtcaggaacgttgccacagtggcttaaaacccgcctttccacattacttctgatgaaccagggttttggcaatggcatgagtgccgcagacaatggtcaggtcatctctcagggggtattggctgacggccgggtgatgaatctggctgcggcatatgcctcagcagtgtcggattttgaactgtggttaccggcagagggcacgtctgcagcatggcaggcagggctgaatgtgacggttacagtacagtga

SEQ ID NO: 18783 - DNA, 765 bp, Escherichia coli
gtgaaaaaggtgacgttgtttctgtttgctgccagcctcctgccttcctgcgtactggcctggaacacgccgggagaggatttcagcggagagcttaagctggaaggcccggtgaccagcatccgtaacccgtgggtatggaaagtcggacagggaaatgaaggcctggatgttaaactgagccgcggtgttcgtgacggtgggcaggcaattccggtcgcactgccggcgatgaccgttttactgggaaaaaccaccctgaccacaccggcaggacgtgaggggctttctccccgtgtcagttacggaaagggtactgagggattttcgcttgaatggacagcacctggcgtggcggaggtgacgctgcctgtcaccggagataataacgtccgggcaggcacatttgttttcagaatgcaggctgtgggggtgttgcgccatgtgaaggacggacagccggcgtatgccggtgtgtatgacgacctgaatgtgaatggtctgcctggtgaaagcgcagccatgaagacttctgatattccgggtgttctgcagaagatgttcagtggcgaaggccccgactggctgcagacaatgaccatcagtggttattcgggagtgagtcatttcagtgatgcctccctgcgtcaggttgaaggtgcgtatggtgcacagactgtggcaggcagtggtgaattacgtctgaacggcacgatgccggagcgctggcgggtgtcactgccggtaagtattgagtaccagtaa

SEQ ID NO: 18784 - DNA, 3891 bp, Escherichia coli
atgaacagaatttattctcttcgctacagcgctgtggcccggggctttattgccgtatctgagtttgctaggaaatgtgttcataagtctgtcagacgtcagtgtttcccggttttattactgatcccggtactattctctgcaggaagtcttgcgggaacggtcaataatgaactcgggtatcagttatttcgtgattttgctgaaaataaggggatgttccgcccgggggcaacgaatatcgctatttataataagcagggagaacttgtcggtacgctggataaggcagctatgcctgatttcagtgctgtggattcggaaatcggtgtggcgacactgataaacccgcagtatatcgccagcgtgaaacataacgggggatatacaaacgttagctttggtgatggtgaaaaccgttacaatatcgtggaccggaatgatgcgccgtcactggattttcatgccccccggctggataaactggtgacagaggttgcccctactgcggtgacggcgcagggggcagtggctggcgcatatctggataaggagcgctatcctgttttttatcgtctggggtctggtactcagtatattaaggacagtaacggacagctgacacaaatgggagatgcatattcctggctgaccggcgggactgtcggtagcctgtcatcctatcagaatggagaaatgattagcaccagttcaggtctggtttttgattacaaacttaatggtgcaatgcccatttatggcgaggccggtgacagcggttcgcctttatttgcttttgatactgttcagaataaatgggtgctggtcggtgttcttactgcggggaatggagcggggggcaggggaaataactgggctgttattccactggattttatcgggcagaaatttaatgaagacaatgatgccccggtcacgttcagaacatcggaaggtggtgcactggagtggagctttaacagcagtaccggagctggtgcgctgacacagggaagcaccacatatgccatgcacgggcagcagggaaatgacctgaatgctggtaagaacctgatatttcagggggcgaatggtcagattaaccttaaggattcggtttctcagggggcgggttctctgacgttccgtgataattacacagtaacaacctctaacggaagtacctggaccggtgccggtattgttgtggacaacggggtgtccgtaaactggcaggttaatggtgttaagggcgataacttgcataaaattggtgaaggtacgctgacggtacagggtacaggtattaatgaaggtggcctgaaggttggggacggaaaggttgtactgaaccagcaggcggacaataaaggacaggtgcaggcgttcagcagtgttaatattgccagtggccggccgaccgttgtactgactgatgagcggcaggtaaatccggataccgtctcatggggatatcgtgggggcacactggatattaatggtaacagtctgacgtttcatcagttgaaggcggcagattatggtgccgtgctggcgaataacgctgataaacgggccactatcacgctggattatgccctgcgggctgacaaagtagcactgaatggctggtcggaatcacgtaaaggaactgccggaaatttatataaatacaataatccgtacacaaatacgacggattacttcatcctgaagcagagcacctatggttatttccccacggaccagagcagcaacgccacctgggagtttgtggggcacagtcagggggatgcacagaaactggtagctgaccgtttcaatactgcagggtatctgtttcacggacaactgaaaggcaatctgaatgtggacaatcgcctgcctgaaggcgttaccggtgctctggtgatggacggatctgcggatatctctggtacattcacccaggaaaacgggcgtctgacgctgcaggggcatccggttatccatgcatacaatactcagtctgtggctgacaaactggctgccagtggagaccattcggttctgactcagcccacgtcattcagtcaggaggactgggagaaccgcagttttacctttgacaggctgtcactgaagaacactgattttggtcttggtcgcaatgccacgctgaacaccatggttgaggcaacagattcgacgatcacactgggcgacagccgggtttttatcgacaaaaacgatggtaacggcacggcgtttacgctggaagaaggcacatcagaagcggtgaaggatgcagaccgtagcgtgtttaatggtagtgctgtcttgaacgggaagacgacgctggatatcatgaacgcaacctttaatggtgatatcagcggtcataccggctcgcatgtggagttgtcgcgccggagtcactggaatatgacgaaaagctccacactggattcgttcagaagcaaaggcgggacgctctcccttgtgacagacaactggtcgccgaaaacgctgacggtaaacacactgcacgccagcagtatgaatatcgccatgggtgtcagcacagccgacaacacgggggaccggattgatatcctgaataaggcaacgggcggacataacacactggacctgtcctccctgtttgaccagactgtcacactgaaaaatgacctgactctggcatctgcaccggtcggaacttctcacgggtatttctcctttgccagcctgaacagggggtttactgtttatacccctgacacacaggtgcaggagaaagacggcagggtttactggcaactgaaaagtcatgccggaacaactgaatctcaggtatcaacggatgtcagtgatgatgtgacagatgcaacctctccggttgcaccggaaacaggaagtacagaggcagatggtgttgtgtctgaaggaaataacagcagcagtgtcacgccttcctctgattctctggcagagaatgcgggcacgacggtgaatggcagtacgctgtttaagggctcggataacacatctcttctgaagaaagcgcgtgccatgtttgccgcccgtgagttcattctcagcgacagtgctgaccgctggacacaggtggtggataacagtgatgcagacggcggagcatgggccatgacagggtacagtcatggtggatatgacgacttcagcctcaatcagagcggactgaatgtgggattccgccagtctgctgccggtaacgcctggtgggggatgggggcagagttttaccgggggcacagcagcgcagatggctaccgggatgatttcagcctgtggggcgtgcatgttctggcgggcaaatcctttgccggtggtctgtttgtggatggtatgaccggataccgggagctgtctgaagattacactattcagggagacctgagtgacctgtccggcagggcaaaaagccatatcctgacagcgggtatccgtggtgggtggaagatgcatgcagccccccttgatatgtcgataacaccgactgtttcgctgaacggtgcccgagtggacggaaatcgtctgcagggccgggagcggagcgtggagcttcatgatggcgacgccctgtggctgaaagccggggttgaggcagaaaaagtctccggaaatatgacgctgaaggcaggtatctggcggaatatcacgctgaacgatatgccgggaatgaccctgcgtgatgactggaaagcccgtcactatgatgcagagaaggctgaccgctataccgtttcgtttggtatcaacggaaagctgactgagaaactgtcagtgcaggcaaaagtaaacagcagttttgatggttactttaagacagatgcggaaggaatactgggtatccggtatgacttctga

SEQ ID NO: 18785 - DNA, 612 bp, Escherichia coli
atggtcgatacagaaatttggctgcgtttaatgagcatcagcagcttgtatggcgatgatatggtccgtatagctcactggctggcaaaacagtcgcatattgatgcggttgtattgcagcaaacagggcttacattgcggcagacacaacgctttctttcatttccgcgaaagagtattgaaagctcactttgttggttggagcaatccaaccatcatttaatccctgcggacagcgaattttatcctcctcaacttctggcgacgacagattaccccggcgcactgtttgttgaaggagaactgcacgcgttgcattcatttcagcttgccgtagtggggagtcgggcgcattcatggtatggcgagcgatggggacgattattttgcgaaactctggcgacgcgtggagtgacaattacgagtggactggcgcgtggaatcgatggtgtggcgcataaagcggccttacaggtaaatggcgttagcattgctgtattggggaatggacttaataccattcatccccgccgccatgctccactggctgccagtctacttgaggaaccacggcagcctggcggctgcaaatcggggtgtggcagaatatga

SEQ ID NO: 18786 - DNA, 201 bp, Escherichia coli
atgtcatcgaaaaaccgtacccgcagaaccacaacccgcaatatccgtttccccaatcacatgattgaacagatcaacatcgcccttgagcataaagggtccggtaacttttcagcgtgggttattgaagcctgcaggagaaggctggcaacagatgcaacgcatctgcgcccggccagcatgacaaataacgagaaatga

SEQ ID NO: 18787 - DNA, 138 bp, Escherichia coli; identical to SEQ ID NO: 18765

SEQ ID NO: 18788 - DNA, 396 bp, Escherichia coli; identical to SEQ ID NO: 18766

SEQ ID NO: 18789 - DNA, 357 bp, Escherichia coli; identical to SEQ ID NO: 18767

SEQ ID NO: 18790 - DNA, 1476 bp, Escherichia coli; identical to SEQ ID NO: 18768

SEQ ID NO: 18791 - DNA, 201 bp, Escherichia coli; identical to SEQ ID NO: 18769

SEQ ID NO: 18792 - DNA, 612 bp, Escherichia coli; identical to SEQ ID NO: 18770

SEQ ID NO: 18793 - DNA, 543 bp, Escherichia coli; identical to SEQ ID NO: 18771

SEQ ID NO: 18794 - DNA, 438 bp, Escherichia coli; identical to SEQ ID NO: 18772

SEQ ID NO: 18795 - DNA, 312 bp, Escherichia coli; identical to SEQ ID NO: 18773

SEQ ID NO: 18796 - DNA, 903 bp, Escherichia coli; identical to SEQ ID NO: 18774

SEQ ID NO: 18797 - DNA, 963 bp, Escherichia coli; identical to SEQ ID NO: 18775

SEQ ID NO: 18798 - DNA, 765 bp, Escherichia coli; identical to SEQ ID NO: 18776

SEQ ID NO: 18799 - DNA, 1572 bp, Escherichia coli; identical to SEQ ID NO: 18777

SEQ ID NO: 18800 - DNA, 897 bp, Escherichia coli
atggtgtggtcaccggaggccgaggcggaatggaaagaaggtctgctgagaaataccgccacccgcgaagacgccctggaggaatactaccgcgtcccgaaaaacggcggcggcacgtatatcccccgctcactgcgtgaacgtgcggcccgtggcaccgggaaagtgttgcgctttaccggcacaccggaatttaacgcactgacagaaagccagcgccgggcagaaatccgggaatggctggagacggtggtgcgccccgagctggaaaaactcccgaagaacctgcgccactgtctgggggaagactttgcgcgttcgggtgacctgaccgtactggcccctgtgacggtgaacgatgacaccacccgcgaggtgccgttcctggttgagcttggcaatatgccgtttaaacagcaggagcaggtgctgttctggctttgcgatcgtctgccccgtcgtgacggtatcaaaatggatgcacgggggaatggtcagtatctggcagaacaggcggcggagcggtacggcgatgaggtggaacaggtgatgctgtccgtggcgttctaccgcgaaaacatgccccgtttccgtgcagcgtttgaagatgatgagctgatccttccgaagcatgaagacgtgatcaatgacctcggggccattcagttactgcgtggtgttcccggcattgacgatgcccgtactaaaggtagtgatggccgcaagcgtcacggcgacgccgctgtggccattttcctgggcttccttgccagtaaggatgactgccaccgttacgagctgcaccgcctgaaccgcccggcgaaaccggaagaaggcaacacgcgccgccagatgaagctgacacgcggcctgaaaaatgagggaggtttactgtga

SEQ ID NO: 18801 - DNA, 582 bp, Escherichia coli
atggaaaatgaacaacgccccacccgtggccgtctttccaaagtggatttactcccggacagcatccgggagcagttacatcagatgctgcgggaaaagcggcacacgcaggaagaaatccgcgaagccatcaacgccctgattgacgaacacaacctgccggaagagatgcagttaagccggacgggcttaaaccgctatgccagccgtatggaaaaagtcggggccaaaatccgcgcctcccgcgagatggccgaggtctgggcggcaaagctgggttccgcgccaacatcagacgtcggcaagctgctgatggagtttgtaaaaacgctggcctttgaaacgtccatgtcgatggcagaagacgacaagcccgttgcaccgaaggcgctgggccaactggcgctggttgcccagcgtctggaagcggcagccatgaccagccataaacgcgagaaagcgatccgcgatgcgtttgcgcaggagatggcagagaaaaccgaagaactggtcagaacgggcggtctgtcaggtggtgcggctgacaccatcaaacgtgaacttctggggattagcgcatga

SEQ ID NO: 18802 - DNA, 288 bp, Escherichia coli
atggcccgaaaactgaagccgttaagtcgcggagaacgggccgtcgtgcggcaactggcgtactgccttgtgctggcagatattgagcaaaacgccattgtccgtgcatacgaaaaacagacaggaaagccctggaacccggatgcaccggatacccccatgaaacgcgccctgcgatcatcaccggcatgtgcgcggctgtggaagctgttaagtaaggatattcagtccgttcgtgaagaaatatacgccggtctgaaaacgcagaggtctgaagatggaaaatga

SEQ ID NO: 18803 - DNA, 294 bp, Escherichia coli
atggcgatgaaagagatcctcactgaagaccgtcgtctggtgttactgcgttccctgctggactgtggcgacagcgcgaatgaatccgtgttgcagacctgccttcaggcttacggtcataaggtatcccgtgatgtggtgcgcactcagcttgcatggcttcgcgagcaggggctggttcgtctgtctgatgtgggcggctgttacgtggctgaaatcaccggcagcggcgaggatgtggcaaacggcctgtccagcgttccgggcgttaaaaaaccccgtgcgagggactga

SEQ ID NO: 18804 - DNA, 306 bp, Escherichia coli
gtgtcctgggaaatgatcagagccaactggcccattctgtgggcattgctgatgacaggaataaacctgcttcagttgatactggcgaaaacctacgtcaaacgtgaagagtttgattcactccgttcccgcgtgtcggtgatggaaagccaggtacaccatttacctgaccgtgatgagttccaccgcctgcaactggatatcagcaatctgcggggagaaatcaaagaactggggccatccatccgccaggtatcccgcatcagcgatttgttattagagaacgagttaaaggaaaaaaattaa

SEQ ID NO: 18805 - DNA, 228 bp, Escherichia coli
atgaccgacgaaatcgaccgcatcagtgaagtggttatgaacgaacgtcagagcgtcgttaacgcctggcagacgcggacaaaagaagcgccccatagtcggggctgctgcaatgactgtgggaacgttattccggcacaacgccttgcggcgctgccggatgtggtgacctgtattgactgtcagcatattcgggaacgcaggaggaaaacgtgtcctgggaaatga

SEQ ID NO: 18806 - DNA, 486 bp, Escherichia coli
atggtggaaagcgtccgggaaagcctgccggttaccgaacagcaacgcattctggaacaacaactgacggcgttgtcaccggagcaactgatgcaactggaaacgctgaaagtccagttacaacagcttgaggtggaacggcagaagctggtgctggctgacgagcaggccgcgcatcacgaacagcaggaaaccatccgcaatggtgacaacgctgcggacagctatgtgcgccagacgcgcccgctgctggcccgtctttcctgttacagcagtctgacctatgtgctgttgctctcctgtggccagattgccggagccattgccggtgccagaggtatcacactgcatatgccgtcaccggactgggatatcacgctgatgttgcttaccccggcgctgggctatctcggagtaagaaccatggacggctttgcccggtacagcaaatcgagccgtcacaaaatgtctgcggggccgaaatga

SEQ ID NO: 18807 - DNA, 489 bp, Escherichia coli
atgaaactttccctgatgctggaagccgacagaattaatgtgcaggcactgaacatggggcgaattgtcgttgacgtcgatggtgttaatctcactgaactgattaacaaggtcgctgaaaacggttattcactccgcgtggtggaggaatccgaccaacagtcaacctgcacactaccaccgtttgcaacccttgccggcatacgctgcagtaccgcacatatcacggaaaaggataacgcctggctgtactcgctgtcacaccagaccagtgacttcggtgaatcagaatggattcatttcacaggtagcggatatctgttacgtaccgatgcgtggtcatatccggttctgcggcttaaacgcctggggctgtcaaaaacgttccgtcgtctggttatcacacttacccggcgttatggcgtcagtctcattcatctggatgccagcgctgaatgcctgccgggtttacccactttcaactggtaa

SEQ ID NO: 18808 - DNA, 198 bp, Escherichia coli
atgaaatcattaaccacggaaaccgcactggatattctgattgcgtggctgcaggacaatatcgactgcaaatcgggaattatctttgacaacaatgaggataaaacggattcagcagcactgtttccctgtatcgaacaggccagagaggatatccgtaccctgcgccaactgcagcttcagcaccagaaccggtga

SEQ ID NO: 18809 - DNA, 165 bp, Escherichia coli
atgtctgaaatcacagtctcccgtccggaagtggtcaacgagaatacggacgttatctgctccacctcagtcaggtacaggtcactggaatatgataattttccggaaatcagcgaagcgaacattctgagcacatttgtaagcgtgcagcaagaaccgtattga

SEQ ID NO: 18810 - DNA, 498 bp, Escherichia coli
atgaaggcaaccaatatagaccctcaactgcttgaaaaagccacgagtatctttgctgagttgggcttacctattgagcaggctattaacgtctttttagctaaatccgttcaagccaaaggttttccgttttctgttgctcttgaaaatgaagtagagacacgggaagttgcacaaacgcaacacaatatcagcaatgcagagataaccgaagctatccaagacttggttgaacatgctctaccactgagtgaaatagaaaacctcacgcagctaacctattgtcgcaacatttttgggttgtcattccccgtgctcaaactggctaaatcatcacggccagaagacattcgcagtgcagccaaagatgccaaagagcgaaaccgctactccaccactaaagtggcccagcgagatgaaaaaacctatgttatttgcacccaatggaccgacagacatcgttctgcattttgccgttggcaagccatctttagctag

SEQ ID NO: 18811 - DNA, 1980 bp, Escherichia coli
atgaacttacaagacaaagaacaaagcgccaaactctccagtgctatttggcgtatggcagatgatttatggggtgatttcaaacacaccgattttgcgcggattatcctgccatttttgctactgcgtcgtattgaatgcgtgttagaacccacccgtgaggaagttcgtaagttctatctggccgaaaaacaatccggcatagaccttggtttagtgttgccagaaattgcgggattcgccttttacaacaccagtgaatatagcctagaaaccttaggcgcgtcagacaccggcgacaacctagaacactacatcagccagttcagcaaaaacgttcgtaccatctttgatgagtttaaatttggtcaaaccatagaagatctggaaaaagccaagttgctgtatcgcatggtaaaccattttgccaacctcgacttgcatcctgatgtagtgtctgaccgcgtattatcagatgcttatgaagagctgattctaaagttcgccagttcggttaatgaaaaggccggggaatttatgaccccgcgtgatgccgtgcgtcttgccaccaaactggtgctggcggcggatgaagatatctttagtgaaaagggtgtgatccgcaccatctatgacccaacctgtggcacgggcggtttcctttccgatgccattagccaaattgaagaaatgggcagcagcgctaaagtcgtgccttttggtcaagagctcgaccccgcgacccatgccatggcgctgaccaatatgatgatccgcggttttgatgccaataacatcaagcaaggcaacaccttatcagacgatcagttacgtgccgacaagtttcactacggccttgccaacccgccatttggcattaagtgggaaaaagccaagaaagaagtagaacgtgagcacaaacagctcaaatacgccggacgctttgggccaggcctgccgagtatttctgatggttcaatgctgtttttactgcacttggtatcaaaaatggaaacgccagaaaatggtggtggccgagtgggtatagtcctttctggctcgccactgtttaatggcgatgcaggctcaggcccatcagaaatccgccgttggctgctagaacaagacttagtcgaagcgattgttgccctgccaaccgatatgttcttcaacaccggcattggcacctacatctggattttgactaaccataaagagccaagacgcaagaatcaggtgcaactgattaacttggcagatatttggactcccatgcgtaaatcgcaaggcgataagcgcaagtacctgagtgatgaacagattgacgatattgtccgtgcgtacgatggctttgaagccagtgacaactgtaagatcttccagactactgattttgcctaccgtaaagtcaccattcagcgtccactgcgtgccaaactagatattaccgctgcgggcattgctgcatttgtgcagcaagatacgtttaaaaaactcaaaccagagcaacaagcggcatgggtacaatacctcaccgataaccttggccttcagccttatgaatgggcacgtttggcggttaagaagaataacaataagggtgactttggtaagtgctcaaaagcactggctacggccttaactgcgcactttgtaaaaattgatccgcaatttgagcctgcactggatgaaaaaggccaagtgatcgccgaccctaaactcaaagacaccgaaagcattccttttgaccgcgacgttgaagattacttcgcacaagaggtgctgccacatgtaccggatgcctttattgatcactcagtgcgtgatgaaaaagacggcgaagtgggcattgtcggttatgaaattaactttaaccgctatttctaccaatacgtgccaccacgcgagttgagtgtgattgatcgtgagctaaaagcatgtgaagcgcgcattcaggctctgctgaatgaggtggcgtaa

SEQ ID NO: 18812 - DNA, 1287 bp, Escherichia coli
atgaatgctggcaacatagtagatgctttcgtatctgactcgaaatggaactcagtaccagctaaacgtttatttacgagtagcaaagaaatcaatcaaggaatgaaagaatctaatcgtcttgcactaacaatgaaaggtgtcataaaccgctcgttagacgatttacaaggacttcaatcttctgattactctgtttatcagatttttgaaaaagatgacttagtttttaagctcatagatcttgaaaatataaagactagccgagtggggattgtgcatgaacgaggaataatgagccctgcatacatccgtgtttcagcgagttcaaatagcatctacccaaggttctattactggtacttttttgctctatacctaaccaatatttataacaaactgggtggaggagttcgtcagaacctaacagctggtgatcttttagaaatacctgttccactgattgatatttcattacagaagcaggttagcacattccttgatcgcgaaacccagcgcatcgacagtctgatcgaggaaaagcagacctttattaagctgctcaaagaaaaacgccaagcactgatcagccatgtggtcacaaaggggctctatcccaatgtggagatgcaggactctggcatcgagtggattgggcaagtgccgaagcattgggaagtcaaaaagataaagcatatttgctccaactttatgtatggaacctctcaagactgtaaccagtctgatgttggctatcctgttctcaggataccaaacatcaagagtaccaatgttgattttgaagatctcaaatatgcaaatatcagtgatgttgatgctttaacttatcttttatcaagaggcgacattttagtcatcagaactaacggtaaccctaatctggtcggccaaagcgcgctttttgattcaaatgggcagtatttatttgcgtcgtacctaataaagttaacaccaaagcaaggagtggatactagcttcttagtggaagcgatgaactcactatctgttcgtcaagcattaacatttcagtcaagaacatcggtaggtaactacaacctgagcattccttcactagctaatacaagtattgctatcccaccaattgatgagcaaaagacaataacgaattacttgagtgcagcaacgataaacattgatttactgattcaagagactgataaatcgattgatcttctaaaagaacaccgcacatcgctgatcaacgcggctgtcacaggaaaaatagacgtcagggaggcggtgtaa

SEQ ID NO: 18813 - DNA, 3237 bp, Escherichia coli
atggctgcacatcatgaagtgcattttgaacaatatattaccgagcagttggtgaacaatggctggaaagaaggccattcctgccactatgaccagcaacgcgccctttacccgcaagatgtcatggattgggtaaaggccacccagccagatgcctggcacaaactgaataaactgcatggtgtgaatgccgagcaggtgctgttggagcgtttggaaaaagccctctcttcccacaaagctggcagtaaaacaggtggcaccattaatgtgctgcgtaaaggctttaccattgcaggttgcggcacgattgccatgggccaacgcaaacccgaagatgcgcgcaatgaagagcgtatagcccgttatgagcacaacattttgcgcgtggtgcgccaactgaaatattgcccgactcgcgagtgggaaattgacttggtgttctttatcaacggtctacccgttgccaccgccgagctaaaaaccgattttacccagtcgctagaatcggcgattgcgcagtacaaagaggatcgtctgcccgttgacccaaaaaccaagcgtaaagagccgctgttaacctttaaacgcggtgcagtggtacattttgccatgtctgatacagaaatcgccatggcgaccaaactggcgggagaaaatacctattttctgcccttcaataaaggccatgatggttctacctctgatttgcccgtacacatcaacttgccgggtgaagatggagagtatccggtcagctatttttggcaagaaattgcccaaaaagataattggctacgcattttctacagctttgtgtatgtcgaaaccaaagaggttgccgatagcaatggcaaggttgagcgtaaggaaacacagatttttccgcgttatcatcagttagccgcagtcaacaagatgattgatgatgcccgccagaacggcgcaggcatgcagtatctttgtgagcacagcgccggttcgggaaaaacctctaccatagcctggacggcccatgatttgattcgtttacgcagcaccgatggtaaagcggtctttaaatcagtgatcattgtgaccgaccgcaccgtgctggattcgcagttgcaagatgcggtgcaacagctggatcatcaatatggggtgattaaggcgattgatcgcgaaaagagcagcgagtcgaaatcaaaacagctgactgaagcgctattgactggcacgccgatcattgtagtgacgattcaaaccttcccatatgcgttagaagcgattctgaccaatcaatctttggcacaaagtaactttgcggtgatcatcgatgaagcacacacctcgcaaacaggctctacagccaaagggttacgcgcagcgcttactctaaaccttagccctcaagagttggagcaaatgagcattgaggacattcttactaaggtgcaagaagcgcgcgccatgcccaagaacgtttcgcactttgcttttacggcaacacccaagcacagcaccaagatgttgtttggccgcccgaaagaccctaaccaaccagtgtcagatgacaatcttcctgaatcgttccacctctacacccaacgtcaggccattgatgagggttttattcttgatgtgctggagaattacacccactacgatacagcctacaaaattggtgagaacaatctggatgagaagcgcgtagacagcaaacaagctcgccgcgcgttggcgcgctggatgtcactgcacccaaccacggtcagccaaaaagtcgaatttattattaagcacttcaaggccaatatcgctcacctactggaaggtgaagccaaagccatggtggtcacatcgggcaggccacaggcggtgaaatacaagcttgcttttgataaatacattaaaaagcatggtattgaaggtatccaagccttggttgccttctcgggcaaagtccccggcaaagatttgggtgatgaagacagccaagacccgctagaaattgatttcgataaagagtacaccgagtacaacttaaacccagacacgcacggggctgacctgcgccatgagtttgagaaaaccgaatatcgcgtcatgttagtcgccaacaagttccaaacgggctttaatcaaccaaaactggttgccatgtatttggataagaaaatatccgatgtagaagcggtgcaaacgctgtctcgcctaaaccgcacctatccaggcaaagacacaaccttcgtgattgattttgttaacgatccacaaaccattctcaatgcgttcaaaaagtacgacaaaggcgcgcagcttaatgaagtgcaagatgtgaacgtcatctatgacatcaaagatattttggatgaacagaacatatacaaccatcaagatttagagttgtttaagcaagcgcgtggtaaatcgattctcggccaatcacctgacaaaaagtcacacgcgcacaagaaactgctagctgccacacaacgccctaccgatgtgttcaacgttaagctcaaagagctggttgatgctgcaaaccattgggatcagcaatacaacaaagcgcaccttgcgggtgatgaaaaagcggcgaactacgcagaatctcagcgcagtgatttcaccaagcagcgcgaagcactaatgcgttttaagtcagatttagctcgatttgtgaagcactatagctatatggcgcaattgattgagtttggtgatcctgaactggaaaactttgccgcgtttgctcatttgctatcacgtcgattgaaaggggtaacaccagaaaacatcgatctcagtgcactggtactagaaaaattcaaaatcaaatacgacaaagagccgcttccagaagcgtttaatcaggtacttgaacctatccgccccaactataacgaccctgcggatcgtgaacaggcatttcttgccgatatcattcgccgcctaaacgaactgtttggcgatgtcggcgacgaacccggtcgccgaaactttgccaacggtactattacgcgtgtcacccaaaatccaattgtggttgagcagatagaaaagcacgacaagtcgattgccctcaaaggcgacttgccgcaagcggtgaagcaagccgttgtgcaggctctgctgaaagaaggtgatatagcccgaacgctactcaaagacccacaagttatggcaagttatgttgagttgatttttgacatgatgaagcaaggtgcagaacaggcggcggtgaaataa

SEQ ID NO: 18814 - DNA, 555 bp, Escherichia coli
atgaatactgcgtttcgggttttacttacgttcaatgcaacatcactactagtgattatctttgcggtacaaaaagggtactcactcggatatttctttggtggtttcgcttgcttcgattggatagcagcacttccgaacgcagtatcatatttactctattttcttatccctgttttatcgactggattgagtatttggctgagtaagtatttgggtaaagacgattttaaggcgggtgaagtagcgagtattgagcatgccaataacagcttcctaccaagttatttgggttactttttcgtggcgttgagcattggtaactgggagacattgtggtttgtttatggcgttttgtttgtttttactctcttatcgcaagcactctactttaacccattgtttttactgtttggttatgagttttataacattacaaccaaaaacggaacggccattttccttattagccgagagcgctacaagaagccagatgacatcgaaatatcattggcttatcgaatcaataattacacatttatcgagcgaggataa

SEQ ID NO: 18815 - DNA, 840 bp, Escherichia coli
atggaccatgtactggcacatataaaaactagagcaaaaaaacgcattttcaaattggtttctgatcaatctctttttgataccgtcacaatcgacttaaatgcctgtattccatacaatccagaccataaccttgacgaagactcatggtttaaaattgaagactttagtcaaaaagagttttgtattgaactgctaaaaaaagactatgattcaaaagactacgatgacttaaccaaagataacttcgccaagatcgcctacttatttgcaattcaaggtaatgatttttactttcaaaaaatcactccaagcctattcgtaaaacgcaaaacgcttgtttttggtgaagccgcagaaattgagaagagccaaacacgtttagtaataaacgccttacctgatgcagtgtacttcaaagtggccgataccttgatattcaaaaatctggcaacgatctcgagcatttttaaaggtatcgatgagttgtacaaggaagcaacaaaagaagaagttgagcagtttttagatgcacagtttatagagttgggtaatgactacaacgtagatagcgtctcaaaacctaatagaaaacgtattggccttgctatggcaacacttgatgcgatgtctgctgacgataaagctaacatgcttgattatatcgacggttactgcggtgaacagaagctgaaattcgataaagaaaatcagaagtttgaaatatctaatgacgatgagttgaagttactgctttatggcattgaacaacgcttctatacgaccccgtttggcaaagaaaaaaggctcgctaactctgtaaccgctatggataaataa

SEQ ID NO: 18816 - DNA, 1035 bp, Escherichia coli
atggccgataacatcccacaagctcctcaaggtgagtttgttcttttcaccagtgctgatggtcaaacccgcgttgagtgtcgttttgagtctgacaccttgtggctttctcaggctgcaatggcagagctttatcaagttagctctcaagcaatcacccaacacgtaaaagctgtctattctgaagaagagcttgagcaaatttcaacttgtaaggattacttacaagttcaactggaaggtggcagagaagtaaagcgaagcattcgtcactacagtcttccggttattcttgcagtaggataccgagttcgctcaacacgtggcacccagttccgccaatgggcaaccagaatgttgcaagaatacctaatcaaaggattcgtcatggatgacgagcgcctgaaaaatccgcccattggccattctgctgtgccagattactttgatgaaatgctggaacgcattcgtgatatccgagctagtgagcgtcgcgtttatctgcgagtcaaagaaatctttaccatggctgctgattacgagccatctaaccaagagaccaaccgcttcttccaaaccattcagaataagctgcattatgcttgtacgcatatgacggctgctgagcttatcgccagccgtgtggatgccagtaagccggatatgggcttaaccagctataaaggcgatgaagtgcgcaagacagacgttactgttgccaagaactatttgcgtgaagacgaaatcaaagagcttaatcgcatcgtcaatatgtggctcgactttgctgaagaccaagcactgcgtcgcaagcaggtatttttacaggactgggccgataagcttgaccagttcttgagttttaacgatagagatgtattaaacggtgcaggaaaaatctccaagaaagacgctgatgacaaagcgaaattggagtttgaccgctttgcccagcagcgccgtcgtttaaaagaagccgaaggcgcacgggccaatatcgcagccctcaaggccatactaaaaaaagataaatag

SEQ ID NO: 18817 - DNA, 219 bp, Escherichia coli
atggctgatcacctggtatttgtcagaattctttttaggtttaaactcgttgtaaacccagaaaatttcgagttttttgtttctttgccttacacgacaaccaaaatgacctgggtagccttcagagtttttacctctatgtgcaacgttgttcagccagaacaagtctgcaattttttgtgctatgtagaagtagcggagctgttctatttcggttga

SEQ ID NO: 18818 - DNA, 201 bp, Escherichia coli
atgaccaaaaatcattcatttttagaacaacagatagctacatttggtgcagcactaaatgggggaaatcaaccgcaatctgagtacatagaagccttctcaaaatcatttaaaggactagaaacacaaattaatatttgggaaacctttattgtcaatagcacaaatgttaatcaagacgacgcaatgctttttccttaa

SEQ ID NO: 18819 - DNA, 183 bp, Escherichia coli
atgtttctatcgccattaccggtcgtgctggagtggcattgtgtgatgtgtgagcagttttttcatgggaagaaattctgtgaggcctgtggtacggggatttattgcagagcggtatgtacgaagtctgtttacagctaccagccagacttgtttcaggactgcggaggtgcgagtacttaa

SEQ ID NO: 18820 - DNA, 792 bp, Escherichia coli
atgagcggaaaaccggcggcgcgacagggcgatatgacccgcaagggactggatattgtgcagggttcagcgggggtgctgataggtgcgccgacgggagtggcctgctcggtgtgtcccaacagcccggtggaggagcagaagggtaacccggtgaacccgctactgggtgcgaaggtgctgccgggcgagacggatcttgcgctgcccggcccgttgccgtttattctttcccgcgcctacagcagctaccggaccaggacacccgcgccggtgggggtgtttggtcccggctggaaagcgcccttcgatatccgcttacaggttcatgagcgggaactgatactcaacgacagtggcggcaggagcattcactttgagccgctgtttcccggcgagataagctacagccgcagcgagtcgttctggctggcaaggggcggggtggcggagcagcacagttcgcagccgctaagcgcgctctggcaggtgctgccggagagtctccgcttaagcccgcatgtgtacctggcgacaaacagccttcaggggccgtggtggatactcggctggccggagcgggtgccgggggcggacgaggtgctgccgccggagccgcccgcataccgggtgctgacgggcgtggtggacggcttcgggcggacgctggccttccaccgggcggcagagggggaagcggcgggcgcggtgacggggggtgacggacggcgcgggccgccgttttcatctggcgctgaccacacaggcgcagcgggcgaaagccttccgtaa

SEQ ID NO: 18821 - DNA, 789 bp, Escherichia coli
atgttgataccacatttggaatccgatcagataaagataaataacgtcagagtccataagtacacaatcttgtatacatcaaactgcattatggatattgacatctcgggaaaaacttttttttgcgatagcaataaatttgtctttttagaaagaggggttaacttgtctgtcagaataaagaaaatagacatagctaaaaaaccatattttgttattcggctacatgaagatattcttttctgtctgaaaaatgtaatggttaacatttatggcctctcgccagaagcacatgaaagaaccagcgaaagcaaagtgttaatttgtgatgaagacaaatcttccagagaattatttgaagaaattcaaaagaaagatttcagtttaaatattgttcctgaattgctttattttatttcaaaacagcaaagcaggaggaaaatcgtcgagtcgatttatatttcatctgttacttttttttcggataaaatcagaagcgccattgaaaaggatttgtcaaaaaaatggaaactgaatattatagccgatgagttcaatgtatcagaaataaccatcagaaaaagactcgaaattgagaatatatcgttcaatcaaatactggttcaagcacggatgaccagagctgcaatacttattcttgaaaactcatatcaaatagcacaaatatcaaacatggtggggatatccagtacttcatattttattagattgtttaataaacattttggtgttactccaaaacaattcgtttcttacttcagaggataa

SEQ ID NO: 18822 - DNA, 510 bp, Escherichia coli
gtgaatgagaaaggattttctttaattgaaagtgtgatagtgataatgctttcaactgtcattgttatggggatacaagttagcataggtaatatcattagtagtacagtgcaaaactatactgcagcaacaataaccagtcttcttaacgaaatatcccagaaaatacagaataaatgtgaacagaaagcagcaggagattgtaaagatataattaatattgaaaaatataacaatgacaagcttaaaataaaaatagataaaatccctggtgaaaataataagtatgaaatacttgcaatttacctaaggagtgagaatgagaacggttcaattgaaccgtttgttaagagaacagcgtctatctatggatatcccgctggtaataatatagtctctgttctgggtgagtggacggtgccattaagcaaatatgagcttttaaaaaaagatgaatcgaatggaaaagcagcatattatttctataaaaaagtattactctcagattaa

SEQ ID NO: 18823 - DNA, 591 bp, Escherichia coli
atgaatcgaatggaaaagcagcatattatttctataaaaaagtattactctcagattaatgaactgggtctttctctgatagaagtgtctctggcgagtacgctgttatcaagcgcaatgctttttatgtggcaaacatcaaaaacagaaaatgaaatatatttatcacgagagcgttctgctgttatttgtcagtatctgaatgcatttgattcttatttatcgaaaaacaagcagagcacgaaacaagaagtttcattagatactttgaaagaatatttgccaggtgaatataaaacttcaatgttagccaaaaacataaagttttatacaacggataaaagtgatgggttacttcttttgacaaaggataacaagccaaaagaatcgggtgcaggagtgagttttctgggtttcagaacagcacaaataaaagacggttatgtatattcttataatagtcgtataaaaatcaaatcagaggattttcctgctcttccggacaaagaagaaattgaagttatggcgataataccaaaagaaacctcttatgttaagaggtgcttaattgatactggaggaatggaatga

SEQ ID NO: 18824 - DNA, 423 bp, Escherichia coli
atgaataaacaaaacggaattagcattattgaggtttgtgtagttctaatttcatcattattttttttatatatatcttcatatatattacatttaagcaaaacatttaatgctgcaagagatgtggcaaatgaactgcgcttaatgagagagcagatagaaatatacaataatatcaaggtaaagcaggggtataagatctataagagtgctagtggttattatttaataatgggagacggagaaaaaaaaattgatgaaatccttatgatatgcatgttagtaaaagattcatgtgggtatgttattgataataaaatgaaatatgtttcttttcttcgtgctggtgtgtctctcgcggatatcgggttttcgttggcgccctcaaaaactgtcaacgcagctctcttgttcaggatatag

SEQ ID NO: 18825 - DNA, 459 bp, Escherichia coli
atgctttatttttgggttggattatttacacttatgatatccataattaactactctgtgcatatggatgcgtttttatatatgcaaaaacaaaagaaaatcgcagatgagcaagctattctggaagatgttttaacatcatctgaatatatcgggaagattattgctgaacacaaaggcaaatgttcagacattaatacgacgtgcactgaattattgcaaaatcggctggagaatgacggttatacagttaataataacgttatgcattgtcgccataatggcaaaataataacctattataattataaaccaaatgatatattttacgattctgtgcttagtttatataaaaaacatggagtgcaggatttgaaaactatagatcatacgacttcccgtggttgcaatctctcttctgaaggagtttatatacaaaaggaatataaagataattaa

SEQ ID NO: 18826 - DNA, 597 bp, Escherichia coli
atgcacctaaattttaagcatgcgagaatcaataataaaaaacaagaaaaagggttatcgttgattgaatcagcaatggttttggctctggctgccacagttactgccggtgttatgttttactatcagtcagcatcagactcaaataaaacacaatcagctatttctgaagtaatgagtgcaacttcagcaattaatggtttatatattgggcaaagtagttataacggattgggaggaacggttcttataaattcctctgcgatacctgataattataaggataagacaaacaataaaattcgtaatccatttggtggtgatttagaggtggggcctaaaaatactaatgcttcgggttttgggtattatattacccttactaacctaccaaaatcagcttgtgttagccttgcaactttaaatttaggtacatctgctgccggatatggtattaacgtccccactccaaatagtgtgaatttgggtagtactaattcgcagactggtagcgttagcaccgacgctattagtccatcaacggcttcaactggttgcactgcagctactaacaccgtaacttattttatgaaataa

SEQ ID NO: 18827 - DNA, 414 bp, Escherichia coli
atgagaggatatatagtgcataataaactaaaatatggtttgtcgatattttctttattcgctataacttgtaatgtgcaggcgtatcagacattgactcctcataattcatctcaagacagtatgttgaagtcagaacaggttaagagcggtttgaagaacaactggagtgtaaaaaaaggccaaactctgtatggtatactatctgactgggcagtatctaatggctgggaagtggtatgggaagctaaaagtaattatgtaattaatgcttctgctgaatttaaaaacatgaacattgatgatgctattaaaaaccttttggtttcaatgggagatgttcagcctaaggtttttgttcgcatttttgatggtaatagagttattttagttaaatcagattctggaatataa

SEQ ID NO: 18828 - DNA, 1614 bp, Escherichia coli
atgctaccggcgctaacagcgtgttcaggtacaggcatctataataagagtttgaaagatgttaatcagattctggatgattcagcattacagatgaaaaaatccagaaatatttctctttttaaaaatacagatcttgtcaatagaaataaaggtatatatctcggtcataaagaagtacagacttttcatggcgaccctttaccaggaaggtttgaatcttcaaatggtgtgactctcagaacaaatattcctatggggttggataatattatcgctcttattcaggatgcgacgaaaattcctgtagaaaagaatttcaaacgttcgaatgtaggtaccgcgacgaacgcaaatgttatctctgataatcttaacaaagctacaggagatacagctgagcgctcagggacaaatattctgaatttgatcgtgaattcatctacaggaaatatgcagatggatgttgattatacaggtcctttatccgcatttttggataaaattgcattgaactatgatttgttctggacttatgaacatggtcgtcttgttttttcgacagaagaaacgaaaagtttcagtattagtgtattacccagtgtatacacaacaaaaaatacgatcagttctgatagttccggttccggttccggttccggttccggaagcagtagctccagtagcgactcacaattggatgtaagtgtatctcttgatgtctggaaagatattgaagaatcaatcaaattgattcttggtgatgaaggtacatatacactttctaccagtacatcatctgtaatcgttcgaacttctgcgcagaatatgaagcgcgttagtgagtatattcaaaagctgaataaacaattagaacgtcaggttactattgatgttgctgtatactctgtatctacatctgatgtaagcaatctgtcaatgtctctgcaggcattgttaaccagaaatggtggagttctgggttctattacgtcgaatttccctgctgcaagtggaactccgacaataactggattcctgaacggaaatggtaattcaaacaatcaggtattactaaacctgttggccacgtcaggtaaggtaagcgttgttacatctgctgcggtgacaacaatgtccggtcaacctgtacctttaaaagttggtaatgacagaacgtatgtttctcagattggaacagtaatgggacaaacatcaacgacttccagtgcgtcaacgtcatctgtaactacgggttttctgatgaacctgttaccatcagttggtgaagatggaaatattctgttgcaatatgggatcactatttcctctcttgtaggaagtaatgatggttttgatcaggctacagttaatggaacaataattcagctaccaaacgtggattcaacgacatttgttcagtcaagccttcttaagaatggcaataccctgattctggctggctatgagcagaaacgcaatgaagtctcggattctggattaggaaaaccaggctttaaattactgggtggttcacgaaatggtaaagacagtcgagagataaaaattatttccatcaccccaagaattatcgacgttaaggccgggcaatga

SEQ ID NO: 18829 - DNA, 264 bp, Escherichia coli
atgttgttgaatgttaatgatataaaaaaatacattgaagattcatttgaagaaagcttctttcctgtggatattgggcaacccgtaatatctggtgacagaggtgatatttatagtgttaactttaagatcagtttgtctaataatccattacttataattcctatactaaaacggatcagtggtctgattatttcaaaaattgaatatgatcatacatctggagagtggaaaattgatggtaaattctgggggagtatgtaa

SEQ ID NO: 18830 - DNA, 459 bp, Escherichia coli
atgctaaaatattttttcatctcattgtttattttctctaatgtttcttttgcaaacgaagcaacagcatcattgcatacagaagtaaataaagaagaacagaaaaaaattgatattctcaatgagataaatatagaaaaatataaagatgaactaatggaataccagagacttcaacgtgaaaatctcatgttgaaactaagacttgagaacagaacgttagaaaagtctctgggagtagactctttcatgccagaaggtgtgaaattagttgcaattatgtcttctggcgcaggtagcttaagagcaaaaatctatgagaatgggctcaaaaatgtaaatgaaggtgatgttttatctgaaaaatataaagtaataaaaatcaataaagataatataaaaatacaggatctttcctccatggaggaagacacagttttcctcttatcaaaaggataa

SEQ ID NO: 18831 - DNA, 1596 bp, Escherichia coli
atgcatttacctgtacctgcttcgccatcagatctggagagattcagacgtaatgtaacaaggattgttacatccaaaggtggtgatattgaactcacagatgagcaaaggaaacatttcctgatattttcaaatggagattttcttgtttcctcagagttttcgcgtacgagaacattacatatgctatatgaggtttcgttgcgaaaagggatttcaaatataagaatatttgaaatcagtctgaaagatatcaggttattgtatgagcaatcagcaaaggtagacacaaagcaacaacgagatttaatgccaattgaacaagttgtgtctaatcttatctctgaatgttgtgaactgaatatcagcgatctacatataaaggtatatgatttggaagctgatatttatattcgcaaagatggagatatgcaattattacggcagatagaagccgaacttgctcattcaatactggcatctttatataataatgcctctgatgctgatgctacttataaaataaatatgtatcaggctgcaaggattgttgcgtctaaaacaagattttacatgcctgaaaaaatacaggctatacgtctacaatttaacccccttggtcaagggggaagatatatgatcgcccgattcttatatgcggagaaaatgagcgataagaaaacaatagatcctgttaatataggatttcattctgtacacgcaaaatcttttgctcgtatgaggcgattaccaataggtataaatatagtttctggaccgactggttctgggaaatccacaacactgaaaaatctgttagaacttctttatgttgaaagaagacaaaaagtaaatataattagtatcgaagatcctccagaatatgaaattgaaggaactgcacaacttccggttactaacgttgagactgaacaacagaggggtgaagaataccgtaaagctataacagcagcattgcgatctgatcctgatattattatgcctggtgaagcgagggatgcagaagtcattaatcttttattcactgcagcgatgaccggacaccaggtgtggacttcattgcatgcaaataatgcgattgcaatttttgatcgtcttaaagatcaaggtgtggatgattttaagttgactgaccctgagttaataacaggtctgattgcccagcgccttgtaaaaaagctatgttcagaatgtagtttatcgcttgtcgactatcttgagtctggcggaattctttccgaggatgaaaaaatagttattgaaggatatggagataaagtcaggtttgccaacaccctcgggtgttcttcatgtaaatcaggatataaaggaagaacaattattgctgaagtgattgagccggacagctatctgttaaaacttattgcggaaggtaaacgtcaggaggctatttcatactggcttaacgatctgaaaggtttatccatgaaagaacatgcctggataaaagtattgtatggtgatatcacggctgcagacgcaatggaccgaatagcaggaatgactgatataactcaggaaaggaaaaaatttttattttctcttggtaggtaa

SEQ ID NO: 18832 - DNA, 1077 bp, Escherichia coli
atgggaaaattggcacagatagaacaatcttttacaaagatacaatttaattccaaaaccaggatgcgaattttttcaaaattgtctcgctatttaggtaatggtgttcctgtatcctttgcactgggtgaattgtacaagttttctactgatgatgggaaaaagaaaaaaactactgaggcaatagtccttttgacatggttaaatgcaataagaaatggtaccagcctggccgatgcgatgaaaggatgggtacctgcagatgaactttcgattatttctgcgggggaaatatcaggtaatttaagcaaatcttttgacgacatcatttatataaatgacacaaagaaaaaggttaaaagtgcactggctggcatcatttatcctgtagtcctggttcttacaacttgcctctacctatatatttttggtacacaagttgttcctgcatttgcaggtattttacctgttgaggaatggcagggcgctggtaagatgatgtattaccttgctgtttttgtacaaaattatctgttggctattatggtattatctgtctttataatactggccgtgattatatcgatgccatactggagaggaaagataagaaaacactttgactcttttcctccgtggtcaatatataaaacagtttttgggtgtggttttctgttatccctttctgcattaatgcaatcaggcgtaccagcaccagaagccatacgtataataatgcgtacagccaatccatggtataaggaacgcctgtcggcgattagattcagattgttaaatggtgatattaatctgggtgaggctctttattcgacacaatatatgtttccttcaaagcaaatgattatggacttgcgctcttatgctgctctcggtggatttgatgacatactgcataaattatcagtacaatggcaggatgacagtgttgagtttatacacaagcagatgtctatatttaaaaatgttgctattgttgtcatggggatcatattcatgtggattgtctcaggtatgttcgcattgcaacagcagatcagtgatgcagcacaattttaa

SEQ ID NO: 18833 - DNA, 957 bp, Escherichia coli
atggatagtattaataagttaactttcgcagaccttctgttaactgaagaaaaatcagtatttcgctatcttgaagggcagaataatcctattgttaatgtcgacagttattatgatgatgaaataaaacaaataaaaagcaacattaaagtgctcagtcaatctaaaggaaaggagtttttctactctcattttggaactccatatcgtgttaccgtaattaatacagttggtggaactggttattttttaagaaaactaaagatacctgtgccggcacttgatcagcttggtttctcagctggcgttctgtcaacactcaaatcactgggtaaaatgaaggggcttatcctggtcggtggcgcaacgggctcaggtaaatcaacaacgatatactctttattaactgaatttttaacacaatatggtgatattctgatttctattgaggacccaccagaactacctgcacaaggaagttacggcgctgacgcgaaaggtatctggtatcaactggatgcaagagatgtcggtggctatgagcaagcgatgatttcagcgatgcgttataatccaagatacattttcttgggtgagattcgtagtccaaaaacagcaaaagaagcaattcgtgctgctgtgaatggacacctggttgtatcgactattcatggtagttctgtacagggctctctctatgctctacagcaaattgcatcagctgaaggagagatggacctggtacgtagcattattgctgatggtttattgtgtgttatacatcaggagttgcactttatcgataatggtaagagaaaacttacatgcaatattttgtgcaatgatgggacaccatcaataccttctaagataagaagtggtaagctcgaattgttaaacaacgaaattgaaacgcagaaaattcttctgtccagaggaaacagcttagttaaatag

SEQ ID NO: 18834 - DNA, 735 bp, Escherichia coli
atgctgttgtttgtctttttctatgcatcagttattacaagctttctttgtcttgctgtagatcgactaccacatcaacttaagtggagggaagagccagatgaaaatctaacgatttacagtcctccttctcattgcaatgaatgtaagacaaagatcagatggtggggactgattcccattatcggatatcttctttgcaagggaaaatgtttaaactgtaatgtaaagataccgatagcctatccactatcagagctatgttgttcattaacttgtgtgattattttctggaaaatacaagattttcagacatcacttattttatgcagtatatttctatgcttgttttttcttagttttatcgatattcgtgagcaatggttgccagcttgtgtaaccattccactattctggtcagggcttgtcttttcttattttgctgaaccagaatcaaagattcttggtgcctgtacaggattttttatcatgtatctgtcaatgaaaattgtaagtcatatgaaaaaagatgacgtagtggccggtggtgatattgctctatcctgcgctgcaggtgcatggttgggagttgatgaggtaatgattttcttgctaatctcatcagttatgtttttattatattctattccctatagatttaaggggacagtttttgttccaatggggcctgctttatccgctggatttttcatatgcttattgcgagtgatataa

SEQ ID NO: 18835 - DNA, 432 bp, Escherichia coli
atgcttattgcgagtgatataaataatttacatacctgttttgttaacgctactattgcaaatagtctgaaaccagagttacttgcggcagttatttcagttgaaggaggcaggccgggcgctgtctccgtaaataaaaatggaactcatgatttaggaatcatgcagatcaatactggtgcatggttaccactcatcagtaaaactttttttaataaccaacatgataaagcgtataatgccctaaaagataatgggtgtttcaatatatatataggttcatggattctcgcgtattctatacgaaaagagaaaggggatgtttgggaaggtgtcggtagatatcattctgcaacgccaaaatataagtacagatatatagaaaaagtaaagaaagtttataataaacattctttaaaaacaggatcataa

SEQ ID NO: 18836 - DNA, 291 bp, Escherichia coli
ttggcgtcgaaaagagctaaaaaagaacaatgtgagttaactatcaaatctatcgaaaaagcttatattaagcgagcccatcttttgggtggactttttgttaaacattgtccaccagatacattttctggtaatgtcgtaaatattcttgatatcgagaatatgatgcgtacatttgaacaaattatttctatcaataatgaaatacttaaacttactcatgattacaatataatcgcctctgaatcatgctttgataactttgagatcttaactattaataccatatag

SEQ ID NO: 18837 - DNA, 621 bp, Escherichia coli
atgaaatatacaaagaaattagttgcattgcacaaaggtttaagtctgattgaatcagcaatggttttagctataagtgccactattacttcaggtattttgtattactacaatcatgcaaaagaaaatcgcgaacttgaagaaggtataaagcaaatacaaacaatcgcagcaacgattaataagctgtattctaacagtgtgactcctccagccgatggtaatgcaaatgatgccactattgacgctattgcaagtgttagcggccttaagactgttaaggagggtaatcaaaaagtatttgttagtgccacaggtaagcatacgcaattaaaatggatgactaactctcagaagagaagagttgctcttctgagcactcacgcaagaagtatatcgtcttgcatgtcatatgcaatattaaatctcggcacgttgatggccagtaaaacaagggttacacataatggtcagaatatagacaaacctggtttcgataatagtctggaaaaaccttattatctcaccccttcagaagcatctcagcagtgtgagtttgcttatgatgcaatgaatagagatggtcaatctataataataaattatgctattatgtattaa

SEQ ID NO: 18838 - DNA, 204 bp, Escherichia coli
atgactattcgttataaaatcacggcaataataatgaagcccggcaatttgcctgtgttctggacacgttactccgaaaaaaaaatgacccagactgagtgtgagaagatgttttccataccaaaagaaccaggtcgttcttttggtgataaagtaaaagttaaagaattccgatgtgtgatgactgaagataaaaataactaa

SEQ ID NO: 18839 - DNA, 1155 bp, Escherichia coli
atggtgcaattatttgcatgtattctgttattttcgttgttcatgtcagaaattatatttaatgataatataactttatatataaaaggctcagggaactttctgttccctgttttttttatttacagttttttttatttttttctgtatctgttatttgtatcctatggtttgtttggggtttttgttcatacactagttgtcactcttattccattctttggcatattaacaccactgaatcctatcatactactatacagagaacgcatattgccattaccgtcattagatatatcaattttaaacctatttgtcttgaatttaattccagccatttttttttcgtttaaaactcccggggttatcagggggctaatattatcgctgacagtattatcattagataatactatgtatagtacatcacaaaagaaattaaatgttgttgttgttcaggttggactttatcttgaatcagtaggatttcgtgataacctgtctgctgatttaattgaatttataaaagataagaatgtagatctaattgtattctctgaaaatactttttttggtttcaaaaatagttatatagaaaagaagacagtacaactcatggaatatatagaaaagaatcgaattaatgacgattatggtattttgcttaacttttatggctatcgcgacatcaataatgtcgtatcatatttctggtataagaatgaaatatcccatcatcagaaaagtaatttaatacctttttttgaaaaaagaaatatattcaatacgcctgaagctttagactccccatttatatattatgataaagaaataaaagattctaaatactttaattttaagggtaacataattagtactcatatatgttacgaagggctattcccaaatgcagaaatggaaacgccagacctgtcaattatacagtctgattactcaaggcttaatgtaggtgataaatacgataacctgatcattaatggaactcttttgtcaaaattttcagtagcaccaaagagttcattaattaatgtgcaaaactatggaggtactattgttgtagataaaaactggaatattgatatggatatattcgaaaggtcaaaagttgaaccgtttgttctaataaatatatga

SEQ ID NO: 18840 - DNA, 369 bp, Escherichia coli
atgaaaaaaatcatactttcactttctgtaattgttttttcacattctgtttctgcaggtagcactaactggcaaccatcagtaggtccgggacaatgtattgtatatgcagaaattggtgagacagggggatataaatggaataatcaaaatgattgtaatgaagttgtacgcagaggatatgcatctggagtaggcgtatcaggtcgagtcatatatgaaggaaatacaccagggactaatggagattctatcggatatacaggtattgtcactcctaacaaaccttacgaacgacaagctcctgccacttataaaggaaagaaaaaagtgggtcatggggatagttatacgtactgggcaaaatag

SEQ ID NO: 18841 - DNA, 678 bp, Escherichia coli
atgaaagaaaaatttaaaccacgtctaacaacaattgacgaagagtattgtattcctgattatattatacataaaatggcggggttattcccacatgaacaaaatgaaaatcgtcagtactacggtgaaagaataaaaaaatgggactcggaaacacatagacaaaaactgctgggccctcatcattaccccaaaaaacattctcgaaatgatcctagcataagatattcatatgacagaagcagttctggattatgggagttcatattacaacaacgagaaaaacacctcaataaaacaagaagcacggatgatataaaagaaaaattaattcaaagacacgctgtttttcaggaaaacataaatatcataaatgaagataaaccattgataaaacaaaggaattataacaatccagcgcataagatatgggagcagtgggaatctccaaaatatgtgatgtcagtagatgaaatagaagaaagatacggcgtcagagagaagttgtgggattccagacaacataaaaatatgctttttgaaaaagccagacaaccaatgcactatccttttaagcatgccaaaaatgataatagcagaagattatcatatgaaaatagtagtgaaggattaagagattttataaagactcgtagatcaatcaccaataattcataa

SEQ ID NO: 18842 - DNA, 276 bp, Escherichia coli
ttgctgtataccgaatcgcagactgtgttcttcgcttatccaacggacatccgcaaagtgatctatacgacgaatgccatcgagtcgctaaacagcgtgatctgccatgcgatcaaaaagcgtaaagtgttcccgacagacgactcggtgaaaaaagtggtgtggccggcaatccagtctgcgtcccggaaatggacgatgccgttgaaggactggcgaatggcaatgagccgctttattatcgagttcggtgaccgcctgggcggtcacttctga

SEQ ID NO: 18843 - DNA, 4095 bp, Escherichia coli
atgaataaagtgttctctcttaagtatagttttttagccaaaggttttattgctgtttctgaacttgcccgtcgcgtttctgttaaaggaaaactgaagagtgcttcatcaataattatctcaccaataacaattgctattgtttcttatgcccccccatctcttgctgcaacagttaatgcagatatatcgtatcaaacatttcgggattttgccgaaaataaaggagcttttatagttggcgcatcaaatataaatatctacgataagaatggagtgttagttggagtgcttgataaagctccaatgcctgattttagtagcgccacgatgaatacagggacattaccaccaggagaccatacactgtactcacctcaatatgttgtcacagcaaagcatgttaatggatcagatataatgagttttggacatattcaaaataattatactgtagtaggagagaacaaccataatagccttgatattaaaacacgacgtttaaataagattgtcacggaggtcgcccctgcagaagtctccagtgttggagctgtaaatggcgcttatcaagaaggggggcgttttacagccttttataggcttggaggtggattgcaatatataaaggataaaaatggaaatcttacaccggtatatacaaatggtggtttcctaaccggaggtactatcagtgctttaaactcatataacaatggccaaatgattaccgcacctacaggcgatatatttaatccagctaatgggcctcttgcaaactatctaaataaaggtgatagtggctctcctttatttgcgtatgactctctggaaaaaaaatgggttttagttggcgttctttcatcaggaagtgagcatggtaataactgggttgtcacaactcaagattttcttcatcagcaactaaaacatgattttgataaaacaatatcatatgactctaaaaaggggagcttacaatggagatatgataaaaacgcaggagtgggaacattaagtcaagagggagttgtgtgggacatgcatggaaaaaaaggggaggacctaaatgcaggtaaaaatcttcaatttacaggaaataatggagaggttattttacacgactctatagatcaaggggctggctatttgcagttttttgacaactatacagttacatccttaacggaccaaacatggaccggaggtggtatcattactgaaaaaggtgtaaatgtgctttggcaggttaatggtgttaatgatgataacttacataaagttggtgaaggcacattaaccgttaatggaaaaggggttaataatggaggactgaaagtcggtgatggaaccgtaattctgaatcaacgccctgatgataatggacacaagcaagcctttagctctattaacatttccagtggtcgtgcaacagttatactttcagatgctaatcaagttaacccagataaaatatcatggggatatagaggcggcactcttgatttaaatggaaataatgtaacctttactcgtcttcaggctgcagattatggtgctattatttctaataataacaaaaataaatctgaattaacacttaaattacaaacactaaatgaaaatgacattagtgttgatgtgaagacatatgaagtttttggggggcatggtagtcctggtgacttatattatgtttctgcatcaaatacttactttatcctgaaatcaaaggcgtacggtccatttttcagtgatttaaacaataccaatgtctggcaaaatgttggtcacgatcgtgataaagcgattcaaatcgtgaaacagcagaagattgaggaaagctctcaaccttatatgtttcatggacaacttaatggttatatggatgtaaatatacatccactctctggtaaggatgtgctgactcttgatggttctgttaatctgcctgaaggggtgataacgaaaaagtcaggtactctgatattccaggggcatccggtgattcatgcaggaatgacaacctcagccggccagagtgattgggaaaaccgtcagtttacaatggataaactgaagcttgatgcagcaacattccatctctccagaaatgctcgtatgcaaggagatattagtgctgccaacggaagtaccgtcattctgggaagttctcgggtctttactgacaagaatgatggaaccggtaatgcagtatcttctgttgaagggagttccactgcaacaacagctgctgaccaaagttattacagtggtaatgtgctgctcgaaaaccattcgtctctggaggtcagggagaattttactggtggtattgaggcttatgacagttctgttagtgtgacctctcagaatgctattcttgaccatgttggtagctttattaatagtagcctgcttctcgaaaaaggagcaaaactgactgcacagagtggtattttcacaaataacactatggaaataaaagaaaacgcctctctgactctgacagggataccttctgtaggaaagccggggtattattcacctgtgatctcgactacagaaggaattcatctcggtgagcgggccagcctttcagtgaaaaatatgggctatctgagttcaaatattatagcagaggactctgcagcaattattaatctgggagacagtaatgcaactatcgggaagacggactctccattattcaataccttaatgaagggatataatgctgttttgcagggcaatattatggggccacagagctcagtgaatatgaacaatgctctgtggcactctgatagaaattcggaaatcaaagagctgaaagccaacgactcccaaatagagttaggtggaagagggcattttgcaaaactgcgggtaaaagagcttattgcgtctaactcagtgtttcttgtacatgtaaacaatggccaggctgaccagttgaatgttaccggcaaactgcagggcagcaataatactattcttgttaacttttttaacaaagcagccaatggtacaaatgtgacgttaatcactgcaccaaaaggcagtgatgaaaatacattcaaggccggaacccagcagattggattcagtaatatcacgccagaaatcaggacagaaaatacggatacagccacaaagtgggtgctgactggatatcagtctgtcgctgatgccagagcctcgaaaatcgcaacggactttatggattcaggttataaatccttcctgacggaagtcaataatctgaacaaacgtatgggggatttacgggatagtcagggagatgctggagggtgggcgcgtatcatgaatggtaccggttcaggtgagagtggttacagagataactatacccacgttcagattggtgcagacagaaagcatgagctgaacggtataaatttattcaccggtgcattactgacctatacagacagcaatgctagcagccaggctttcagcggtaaaacaaaatcgctagggggaggggtgtatgcatcaggtctctttgagtctggagcttattttgacctgattggtaaatatctccatcatgataatcggtatacgttgaattttgcctccctgggggaaagaagctataccacccattctttgtatgctggagctgaaatcgggtatcgttatcacatgtcagaaaatacatgggtggaaccacagatggaactggtttatggttcggtatcaggaaagtcatttaactggaaagaccagggaatgcaattgagtatgaaagacaaagactatcacccactaattggtcgaacaggcgtggatgtaggtagagtgttctctggagatacctggaaagtaacagcacgtgcaggactgagttaccagttcgatttgctggcaaatggagaaactgttttacaggatgcttctggtaaaaaacacttcaaaggtgaaaaagacagcaggatgctaatgaacgtgggaacgaatgtggaagttaaagacaatatgcgttttggtctggagttggagaagtcggcgtttgggagatataacatagacaactctataaatgctaacttccgttattatttctga

SEQ ID NO: 18844 - DNA, 192 bp, Escherichia coli
atgcaggaagtgttgagctggatgcgccgtaatggagaagaaattatagatgaagatatcgctcggctatctcccctgatgcacgggcatatcaatatgttgggccattatacattcacactgccagaggatattttaaaaggagagctgatagctctaaatttaaatataaacaacgaattatctccttaa

SEQ ID NO: 18845 - DNA, 180 bp, Escherichia coli
atggtgcgaaccgctggttgtgtaaacaaaacgctatatctcctcaattatattgatgatgaagattatcgtcggcggatcctgacgcagctcaatcgaggagaaggccaccacgctgtggctcgtgcgatttgttacggacaacgcggagagatcagaaagcgttatcgtgaagggtag

SEQ ID NO: 18846 - DNA, 885 bp, Escherichia coli
atgtcattcagccattcttccctctctgcacaagtgaaatcatatctgacgtttcttcctgaagaaatacgccagaaaatccttgaacatctccactgtgttattcattacgagcccgtgattggtattatgggtaaatccggcaccggcaaaagcagtctgtgtaatgccatttttcagtcccgtatctgtgccacgcatcccctgaacggctgcacccgtcaggctcatcaccttacccttcagttcggtgagcgcagaatgacgctggtcgatctgcccggcatcggtgaaacaccgcagcatgatcaggaataccggacactttatcgtcagctgctaccggaactggatctgattatctggatcctgcgggctgatgaacgtgcgtatgctgctgatattgccatgcatcagtttttactgaatgaaggtgcagatccctcgcgttttctgtttgttctcagccatgccgatcgcgtgtttcctgctgaagaatggaacgacacagaaaaatgcccgtcccgtcagcaggcgctctcactggcgacggtgacagcccgggtggcaaccctgttcccttcatcatttccggtactctccgttgccgcacctgtcggctggaaccttccgacgtttgtgtcgctgatgatccacgcactgccaccacaggcaaccagtgcggtttattcacatatccggggggaaaaccgctctgaacaggcccggaaacacgcacaacagacttttggtgaaaccatcgggaaaagttttgacgacgccgttgcccgtttcagttttccggcctggatgttacagcttctgcgcaaaacccgggaccgcattatccacctgctggtcacactgtgggatcacctgttctga

SEQ ID NO: 18847 - DNA, 228 bp, Escherichia coli
atggtgtattattgttacatatgcttaacattgtggattatgttcttccctgcctgtatgtccggaggacgttgctgttctgtgtgtgtcagcgagtgggaagagtggcaggaagacggtattgagcaggataaaagtatgcgatgtctgagcaaagaaaagtgtgtacgatgggcgtcattatcaggatgtcgggtaaccacggaaggttattcaaaaaggaaatga

SEQ ID NO: 18848 - DNA, 483 bp, Escherichia coli
atgcctgccgtcttcggtctgctcaattttgacgccccacatggcattccatttatcgttggcgtctttccactctttcgaaaactcctccagtctgctggcgttatcctctgtcaggtcgactttttccagcagctccttgccgagatgggattcagttatctggcctttgaaaaaatccaggtaaccttccgcatcatcgctcgcccgaccgacagcctccacgaatgccgatttgccaacggtgttcacactgcgaacgtaaaaataataatcatggcccggcctgatattgatactggcagctatccagtacagcgccgtgccaagatagcgggctgtggtttcaacctgcctgatatccgcaatctgcttttccgagaaccagaactcaaactgtaccgtcggatcataaacggcaagatgcggcgtggcggtgatctgaaaatagcccggagtcagctcaatccgcgacggcgctga

SEQ ID NO: 18849 - DNA, 351 bp, Escherichia coli
atgaataacccaataattaaaaaatttattagcgcagaagattattggatattttttctgatatcgttaataaaatttcctgagactgcagaggaactcctgaaaaatgcactggtaaccctacccgcagatgctaattataaagacaaaacgttactcctgaaggcgatttacagcggatgtacaaatcttccattttcactttttattaataatgaacaattattagagattagggagtgttgtaaacaggcaataaaagtaacatttgcagcagagctctttgatacacaaaacagtaataaaaaacaaaataaaaaaccatggaagaaggtaatgttcaatgtttaa

SEQ ID NO: 18850 - DNA, 558 bp, Escherichia coli
atgtccacccatgacagtctgattgaactgactgacacacttatccagcagaacggttaccaggggttcagctatgctgacctggcgaagacgctgggtatccgtaaagccagcattcactaccatttccagacaaaaacagacctgggaatagcctactgtgaatataaaaaagccggttttctggcgctggaagccaccctgcagcagttacctgccgggaaagcccgcctgaagggctatatggaggcctttctggcctgcgcggacaccggccagatgtgcggggtgtacgcaatgatgtcggactgtaacctgtttgagcctcccctgcaggaggccgttaaccggttggcacagacggacctgcgcattctgacggcggtcctgctgtccggaaaggaaagcggagaactgtttttttctgccccggcagaagatgttgctatgattgtggccagttcgataaaaggcgccctgatgctgaaccgcataccgcctcacgacgcctgcatccgcacgatgaaagcgctggagcagttgctctgccgggtctga

SEQ ID NO: 18851 - DNA, 291 bp, Escherichia coli
atgaaaaaaacaacctccaccgcattactggcactgaccctgggcagcgtactggcagcggccagtgccccggcaatggccactggcgataatatggaaaaatgttacggcgtttcgctgaaaggcaaaaacgactgtaaagccggcgccggcacaacctgtgcaggcaccgcgaaaatggattatcagggaaatgcctggaaactggtaccggcgggcacctgcgtgaagatgaaatccccgggttcccctaccggccatggccagcttgaggcctttaaaaacgcataa

SEQ ID NO: 18852 - DNA, 927 bp, Escherichia coli
atgatgaccagccagactcacccctgtgatccctctgccagcactgcttctggtatgtggaatgcgtgcctccccgcccggggaggcatcagcctgaaaccggagcatttccggcaacttctggcagataaacccgatacgggctttctggaaattcatgcagagaattatctctgtgccggggggcctttccaccaggcgctgacggccctgtgtgaatgctatcccctgtccattcacggggtggggatgtccatcggtggagaacaaccgctgaataccgcacatctgcagcgggtggcggccctggttgaccgctatcagccgcattcattttcagagcatctggcctggtccacgcatgatgatatttttctgaatgatctcctgccgttaccgtacacacaggccacgctgaaccgggtatgtgaacatatcgatcaggtccagaatacgctgcgtcgccagatattgctcgagaatccggccacctatgttgaattctctacctccaccttcagtgagaccgattttatccgtgaggtgatccaccgtaccggctgcggactgttgctcgatgtgaataacctctatatcagcagcgtgaatcacaatcgcgatccgtaccagatgttgcatcaactgcccctggaccgggtgagggaaatccatcttgcaggctataccgaaagccaggacggcgtcggtgcccgcctgcttattgacagtcatgatagcccggtgacggtgccagtctggcagctttatgagtccgccctcaccggcacaggtgcggtcgccaccctgatcgaatgggatgccagtatccccccgctcagcgtcctgctcggtgaggcagcaatggcagaaaacagaatgaaagaaggagccaggcatgcaaaacagtctgtaccaggcactgcttga

SEQ ID NO: 18853 - DNA, 759 bp, Escherichia coli
atgcaaaacagtctgtaccaggcactgcttgagccacactccccccccccggtggggcttaccgtctggaatggcagcgatccggccgtccggtttgcggtctaccgtaataatatcatggcctccttaacggaagcgctggcagaaaactgcccggtcctgcaacgacaggttggtgacgaattttttcgggccatggttgctgaatttatccgtcagcatccaccctcgtcgccggtattggcggggtatggacatgctctgcctgcctggatagcgtccttttccccactggctgaatggccgtggctggccgatctgacccgactggaactattgtttatcgatgcgttgcatgcggcggagacgaccagcctcgtatccgaagaacagctggtgcgactggcgcagaccggactggtcagtctgactgcgggcctggttccttctgtccgacttttcagctcgccttatgcgatatacagcctgtgggcagctcatcaggaggaggagccattgtttgttgaccctctgcagccagagcaggtgctgttgttccgtttgggggatgacgtgcggattacgcttctcagccctgccgacttttcgtttatggtggcggtacatgccggcaataacctggcgcaggcaacgttgcaggccagagagcatgactgctgttttgaacctggctctctgttgctgcgcctgcaccagaacaggctactcgggtggctggcctgcacagaggagaaatga

SEQ ID NO: 18854 - DNA, 528 bp, Escherichia coli
atggcattgatgagaagttttctgcagcggggccaggcattactgcaggacagtctgatcccccttctggctcgtacaggcctggccgccacattctggctgtcagggcaaagtaaggtagaggggttggttctggatatactgggagggatgccaccggaactggatgttccgcatattacccgttcggcggttgcgctgtttgccacagagtaccgactgccgtttctggcaccggagactgctgcactgcttgcagcaggagccgaacatatttttccggttctgcttgtcctgggactggcaacgcgtttttccgcactagtgctggcaggaatgacgatagtgatccaggtgtttgtctatcccgatgcctggccggttcatgccacctggcttaccgcccagatgtatttactggcgtatggcggcggaaaatattccctggataacctgctgaaacgtacgtatcggcgtaggcaccagaatgtgatgcagaaaaggaataaccctatgatgacgctataa

SEQ ID NO: 18855 - DNA, 363 bp, Escherichia coli
gtgactaattttaaatcagacttaaatctaataagaaaagaatggtataatgcattttattcaggtaatactgaaatgctagattacttggaagctgattggtttatttcaacaaatggtcaaaaagttatctataaaaaacatcagttacgaaagattgatatgcgtccagcgaggattttacctggcatagaaagatatgaatatgatgtcgtaatgcgtgagtttaaaggaattgcttgtgtttcagggaaagctgaaataaagcaaaatgatggaaatatattaatggcatttattgaaaattggataaaggttaatggtggatggaaaatgcagtttatatcgtatgaaaaaatctaa

SEQ ID NO: 18856 - DNA, 2070 bp, Escherichia coli
atgagtattttaaacgaagcaattaaattgtataagaatggtgaatatcataaatcattgctattatttgaaaaagcaagcgaaatatatgatgctagttgggttaaggcaaatataattttatgtaaaaaagcattgcaagatttgggtggtgttcacactatctcagcgcaaaaaaatatagagtgggaccctgcaacacagatcatgtattcaaattctaatattaaaaaattgagtgaaaaggagattggtgaattaataaaaaaatataataaagcaactttaagaaagtcagaaacagcagaaacgaaaactataaatcctattccttctgattggccaaaagatttaaatttatccaaattgccagagagtactaatgattttaaatggcttgccaataaaaaattagtgaaagatgggaggcgtgagaataaaaacattgatggtctcagtatcgtcgtaccaaccttcaatcgttcaaaaatattagaaataacgttagcatgtctttgtaaccaaaaaacaaaatttaattatgaagtaattgttgccgacgatggaagtaaagaaaatatagaacaagtgattagaaagtttgagcagctaattgatattaagtatgtacgccagaaggataatggctatcaattatgtgcagtaagaaatttaggacttagaaccgcacgatacaacttcgttgctatacttgattgcgatatggctccaaatcctctttgggtacaatcttatatggagttacttgaattagatgatgatgtggctctgatcggtccaagaaaatacattgacactaccgaatataattatttagagttccttgaagacgaaagcttgcttgagaaactacccgaaattattacaaataaccaagttgcgggaaaaattgaacgaagcaaatcagttgattggcggttagagcattttgagaaaacagataacttaaggcactgtaatactccatttcgatatttcagcggtggcaatgtggcatttgcaaaaaaatggcttgagcgtgcaagttggtttgatgaagaattcacacactggggaggggaggataacgagtttggataccgtctgtacagggaaggatgttattttcgttctgtagatggtgcaatggcatatcatcaggaaccgccaggtaaagaaaatgaaacagaccgagaaactggaaaatctatcactattcaattaatacaagaaaaagttccatattattatagaaaaatagacaaaattgaaaattcaacactcaagaaggttcctttagtatcaatttatattccagcctataactgtgcagaccatattgtacgttgtgtcgatagtgcattgaatcaaacaatcactgacttggaagtatgcatttgtaatgacggttctacggataacacgttaaaaattctagaagaatattatggaaatcacccgcgagtacgttttattacacaaaaaaataaaggtattggagctgcttccaatgcagcggtaaaattgtgtcgtggtttttatattggtcaacttgactccgatgattacctagaacctgatgctgtggaactttgtttaaatgagtttaaaagagatctatccttggcatgtgtttacacaacgaacagaaatgttgatagtcaaggaaagttgattgaaaatggttataactggccagaattctcgcgagagaaacttaccacagcaatgatttgtcatcattttagaatgtttacggccagggcatggaatttaacggatggatttaatgaacagattagcaatgctgttgattatgatatttatctaaaacttagcgaggtaggtccattcaaacatataaataaaatatgctataacagggtattgcatggagataatacatctataaaaaaaataggcgtgcagaaagaaaatcactttaaagtgataaatgaatctttggctcgtcaaggtataaaatcatattgttttaagcctgtaaatagtgatgattcaagcaggaaatattcaattatgaaagttagcatggcggataattttgaataa

SEQ ID NO: 18857 - DNA, 1260 bp, Escherichia coli
atgaaactgatcaccgtattcttttcatttgtgcttttatcatttttttctccggcttatgccgtttcagaaagtgaggcacgacgtgtggagatgtcaatggacaatgcgcctttacctcaggttatcagcatggtctggcaacgggtttttaatcgcccttatcagttgtcgccggatattgcaggagacacaagacttgtcagtttctatctgagtaaaaatcaggagccgcgaagcttttttatttcataccttaaacgcctgaatatcagcgtcacgtcgatgaaggatggcgtggattacatttcagtgataaagcagactgagcagaaagtgcctgatgtggtttttacttatctccctaaataccgcagcgtgagttatttatcggcaatgcttaactctgtggtttcttccggggctttcagtaatcatattcagtccgtcgattatttgtctggcggtgtgtcaggtataaccacgacagacagtgcatcgacgcgtatgtcgatcgcaacggatgccgaagtgctggtttattccggtccggcagcatccgtccggcagatagaaaaaatactgccgcgtattgacgttccggcagagcaggtaacggtgagcggctatgttcttgaagtccagacgacagaccgcaatgcaaccggactgcaaattattgctgatttgttccgtaataaactggggatgtctgtgggggctcgtcttgatgggggtaattcgtttacgctgaatgttggagggctgaatgcgttttacagtctgatcaaagaggattcacgctttaatgtcgtgagtaatccgcgtcttacggtgctttccggcagtaagtcgcagtttactgtgggtcaggaagttccggtgctggacagtgtcagctatcagggcagcagcggaacgccagtccagtctgtgacatacaggaacagcggggcgatttttacagtaacgccggttgtgcttgacggactgataacactggatatcagccagcaactgagcgattttgtaaagacaacgacaggcgttaactccagcccgacactgacgaagcgggaaatcagcacaaaggttgatgttaaggacggtgaattacttgtgcttggtggccttgccagcagtaagctgacgcagtcgcggacaggtttttcatttttgccgggttttacaggcaaatcagacgagaataaccggacggatataattgtggtgcttcaggctcgcagggttggcaaatga

SEQ ID NO: 18858 - DNA, 1059 bp, Escherichia coli
atggctattactgcatatattggcgtgccgggttctggcaaatcttatgaagtggttaagtctgttattattccggctgttgcatccggccgaaggattgtctcaaatatatacggactgaatcatgaggcaatcattcagtattgttataaaaacaaactgataagtgatgatatttcaccaggtgaaatcattcatgttgaaaatgagcgggttatgtcccctgatttttatccggttaagggaaatcaggataaatcactctgccagccaggtgatttaattattctcgatgagtgtcatcgtttttttacatcagataaagctttgtcatctgatgcccgtatctttgctgccgagcatcgccattatgctgatgaaaaaacggggcaaacctgcgaccttgttcttattaatcaggcattgacaacgttgcctcgctttcttcgtgagcgtattgagcagactttcagaatgaaaaaactgattggtctttctcataaaagttatcgcgttgatgttttcgacggttccagaaccacaaaggcaacgcatctttcaaattatgtctgccgttacagtaaagatatttacccgctttacagctctcatgatgttaagggagcggtggaaacaagaactgacgcaagggcggttttgtttaaaccgcaggttattcttttgtttatttttcttatattgctttctgtttatctcttctttagttttcttttgcctttttttaatccgcagaaaaaaacagaacaggcacagcagtcagcgccgttacgttcttcgccgtcttcgccgtcggttaatatttcgccttcaccggagaataaaaccgctcctgcgccttctcaaaagtggtgcgtaatagggcgttttaatgacggggaccggaactatgtttttctgcgcgatacggataatcgccttcgtatggtttccgcaaataaattcagggggctgaatattatgcttgagggagaggtggacggcgtgaaggttgttgcatggtcctgtaataatccggtttctttcagggggcaaaaatga

SEQ ID NO: 18859 - DNA, 288 bp, Escherichia coli
atgtttgccatttttattgctgcaataaatactgctcttggttttatttttcgtactgcactcattaagtttgtaatgttctctgcaatttatattatggttgtagaagttcttccgttgattgtgactcatcttcctgatggtagcagtatttcctcgcttttttcagagttgccttcttctgttttgtggtttcttaatctgatgtcttttgatgttgttttgcccatgatggtttcagccatgtttacgcgtttctttatacgccgtattccattctttaattaa

SEQ ID NO: 18860 - DNA, 171 bp, Escherichia coli
atgtctactcaagaatttaaagttaaattgccggaatacactatcgagcagatagaaagaattatttacaataaaaatacaaccattgaagaatatgttgtttcagttattcttgaaaaagccgatcaggatttccgtcgaattataaaaccatttagtttttactggtga

SEQ ID NO: 18861 - DNA, 249 bp, Escherichia coli
atgtttgcaaaaatgaccaatctttttaagggtgttaataagaaagttgcagctttatctttttccgctgcttctgctcttgctgtatctccgtcttttgctggtacagtcgatttttcatcattgactaacagcattgatatgtcttctgtttctgctgttattctttctatcggtgttgcaggagttacagtttatctgacttttgctggcgttcgtaaagtatggggagccatcagaagtatctga

SEQ ID NO: 18862 - DNA, 123 bp, Escherichia coli
atgattgatgtcttgggaccggagatacgcagacggcgtactacacaggaaaagatcgctattgttcagcagagccttcgggtaggcagcctgacggctgcggcttgtcatagcctgaaatga

SEQ ID NO: 18863 - DNA, 1134 bp, Escherichia coli
atgtatcatttgttttttctgatattaaaagaatcgttgcaaaacattcaagaaaacaaaaatatgatgtatctgtatttatttgtcctgattctttcctttacaggggtgattattacagattcattgataaatagtgtatcaaaaacagctcagtctgagttaagagatgagggggattcaattattactataaattttcatgtacctaaatcacgataccagatggctgctatcttatcgcaaatggaaataaaagatatgtattttagtaaaagaatttttttccaggtgggagagaatccatttgcaacgcaattaaagaaaataacggggattgaaagtaaagatgtgttacttagtggtgcgatctctgatttcggaataaaggataaaaactcggtagccatacgtgataatgagtcttttaagaaaaagttcatttacatcaatggcattccatttaaagtacataatatcgcggctaaaaagaaaacaaattttttggatagccttggtttgagttctttacaggaagatggaggtttttttatcccactggaaacagcactcaggttgtctctcagtaacgaaatagatagcgtaaaacttctcctaaaaaaagaagctgatgattctgttttgttacagctaagagaattattaaaaaaaaatggagttaatgattatagtgttattagttttatcgacgcaaaaaagatcgttgataatgtattagacaggttttcattgttaacaaacattatgtatttttttctcacggtgacatctgttattacagcaaaatcaatgagcaaaaaaatgttccaatacaggagtaccgagtttgcattaaaaatacttaatggtataaatgggaaaatcgtttgtttcgttattcttatggaaagcattattgttgctttattttcattgttaatgtcattgcttgtgtctttttttactttaataaccgtgtcaaatataatttcagtaaaacttataatgcggtatgatgtgttggggatgtctgtttttataatagtgtttttcttatgcgtatacaacattagattgagttattcacttttttcgaaagatttatccatattaattaaagaaagattttcatga

SEQ ID NO: 18864 - DNA, 1203 bp, Escherichia coli
atgaagactatatttgtattgttagctacgattcttcttggtaattcatctgctgttgcgtatgtttgtcctcttgatttgtactttagaaaaaccttcgattacaggacttatcagataaaatcatttcaaactgagatggagcgcctggataataactattctttcttgcctgaactctctctttctacagggcaatcggcatataataaatcagggtttaaatctcctgaatacagcaatgccggcatttatatttctatgcctgtttattctggaggtagatattttttgaacaatgaaaagttgtcattattagatatttcacaagaaactacccttgaaagaaacagaatcaattacctcctgtcaatatatgaaataattatcagaagaaaggaaattgaatccctgttaaaagagtatcagcacaaacaaaaagaagcagacatagaaaacaaacgtttgcagtacttctttgaacagggcgcggtgtctgagttcgaattaaatctcaaaaaaaacataacagaaaatcatcagaagaatataaagttattgaaaaatgagttgcagtatctggagcgggggctccagaatgaatataatattcctcaaaatatgtttgagattattgactcagacataataaagtcatgtaaaaaaaatgatatcagctttctgatcaaaaaggaaaatatggttgagcttgaggaagccaatatcaattttgacttagaaaaagcagctaactatccatcagtttcattatctttgggattgaccccaaaaaatggagggactattagggatatatcaatagaacatggtaattatgttgcttccgttagtttaaatattccgttaagtggattacttaaactggcagtaaaaaaagaaaaacattcgctaaacgtggattcagttaaattaagcattgacaaaagaaatatagagttagaggatgcgaagcaagggattttaaataagttaaacaatgctattgatgagttatcctatttaaggaaacagttttccattaataaaaagaaagttagctatctcaagaaacgattaaatgatgataacaatatgttgtcatactacaatgaaattaatactttgaatgaaatagagaaaaacttaataagaaaggaaaatgaaattgaattatataaaatgcgtatgttttttattgggtag

SEQ ID NO: 18865 - DNA, 768 bp, Escherichia coli
ttgaattatataaaatgcgtatgttttttattgggtagtttattaccaaatgtttctcattcatatttattgtcatggtatggtatactaagaggggagtcttctataacttataaaagtccagttaacggaattattgaatatttagattgtattcctggttcagataagaatgatgtaaaaatatttaaagttgcaagcatagatagcgcgtctaaaaaagatatattagagctaaaattatatagagccagagatgagtataagaaatataaagatgattatgaaaaagccaacagtgcttacaatgagggattgatcgcgaaaaatgaactcagagatattgataataaaatgaaagatgccgttataaatctaaaggagatcgagagtgaactgatatcattaaattatatcaatgaacttagtaatccgtatgtacaagggaggtttgtttgccaggaggtttttgtctctccggggagttatatagcctctggcgatcttataatgaatatcgagatgataaacaaatatcgcattgaaataaaattcgatcctgttacaacaaacctaaagaagaagtctatcagatatcgttcgttagtgaatggttcaacaggatgggcaaaagttatatcaacaaaaaacattacaaataacagcagtatggaagggttgaaatcagcggttcttgaactggaagataatggaaagctatctcctgagcttctggatacagcatttgagataacactacatgattaa

SEQ ID NO: 18866 - DNA, 627 bp, Escherichia coli
atgattaaattaagtattgaagagaagatgttccctgatcgcgttataatttctgactttaacatttccatacaaaaaaatgaatttgttgttataaccggagcttctggtgcgggaaaaagcactttgctgaacataatcgggcttattgatacatcttatcatggtcgatatattctcgacggagttgatgtgtctggtatagactataaaaggcaactatatttaagaggtagttattttggttatatttttcaagattctcttataaatgaaaaacaaaccattctaagaaatttgctatcagtaatagagttgaaaaaacaaaaggagtatcactgtgttatcttaaacgaacttgagaaaacaggattgcatggcatatccccggaaacatcagcggctctattatctggtggcgaaaaacaacgtgttgcacttgcaagagccttactaagaaaacctaaaatactacttgcagatgaaccgaccgcaagtttagataatgataataaaataaaaattatggatatacttcttgactatcataaccatggtggaaccgttattatggtaactcatgacacaaatttaattacaaatgatatgaggattatatctttttga

SEQ ID NO: 18867 - DNA, 645 bp, Escherichia coli
atgcaggggcagacgtttgataaggcagcatatccgaaactggctattgcctatccttcaggtgttattccagatatgcgcggctggacaatcaagggcaaacccgccagtggccgggccgtattgtctcaggaacaggacggcataaaatcgcacacccacagcgccagcgcatccagtacggatttggggacgaaaaccacatcgtcgtttgattacggcactaaatccacgaataacaccggggcgcatacgcacagtctgagtggctctacggggtctgccggtgttcatactcatggtaatggtattcgttggccgggaggcggcggttctgcgttagcattttatgatggcggtgggttcacttatgtccaggattcacagtatcaagtaagcccggagacttcttcctatagatcgtattatcaacgtattcagacacagtcagcaggtgctcatacccactcgctgtctggtactgcagcaagttctggcgcacatgcacatactgtaggtattggtgcgcatacgcactccgttgcgattggttcacatggacacaccatcaccgttaacgctgcgggtaacgcggaaaacaccgtcaaaaacatcgcatttaactatattgtgaggcttgcataa

SEQ ID NO: 18868 - DNA, 348 bp, Escherichia coli
atgccaggacaaccaataccaaatgagctcaaagaaaaaggactgatatggcttttgccaccatactgttggtcacaccgtcagatagcccggaagctgaagatcagtgcctcagttgtatcaaaatggagatgtgagttagtggagcaaggacttttacctgaaaatgaaaagattacctccgttgatgttgaagactggacaccggagcgtcgattctcagttgttcttgagacggctacgctgtctgtcacgaacggtgcaatagtggatcacttttcatccgtcgttgacactgtcagaaatggagcttgccgattattgccgacgcatgggattgtttgttga

SEQ ID NO: 18869 - DNA, 246 bp, Escherichia coli
atgctggcctctgacccaggacggcaaatagctgatgtcccaactccagacttgattcggtgcaacggccctgagtacatcaggccagtttatactggcattcacgggatcgtttcttcaactgcttggctgatttcagtacacgataaaaacttgattcagaagcaatataaatgtaagcgtaaagccaatgccgtctgtaacacctgctccttgcagactaaattagagctccttctaaattag

SEQ ID NO: 18870 - DNA, 438 bp, Escherichia coli
atgatcgtcgatatttacagtcgcaaaattattgctgctgaggtatttgccagcgaatctggaaaacatgcagcagaactactccagcgtgcagtatggaatgaaaaatgttcatccaacaatctggtactccattctgataacggtggtcccatgcgcagtgacacgttgttggcgaaaatgtatgcgcttggtgtgctaagttcttattcccggccaagagtcagtaatgataatccttactcagaatctttgttccggactctcaaatattgtccctggtggcctgagaacggttttcgcactattgatgatgccagagtatgggtaaaccgttttgtaaactggtacaactttgaacataagcacagcgggatcaaatacgtcacgccagccgagcgtcatcaaggtaatgacatgaaaatactggcagcctga

SEQ ID NO: 18871 - DNA, 975 bp, Escherichia coli
atgtcgaatgagaaaagaaaaaccattggtagacagttaaatactcaggcgttaatggtcgagatgactgacacccaaagaagtcaggtatttacccttaaaactggcaggaagataacgttcaggtttgttcgggtacctgcatcggacgttgaaagtaagacattcgtaaaccaggaaatcaacggaagagatcaacttgctctgaccagggagtccctgaaatctattatccagacgattaagtttcaacagttctttccttgtattggtattcagcaaggtgaaaagattgagatactggatggttcaagacggcgagcctcagcgatttatatccgtacaggccttgatataatggttaccgatgaacttttatcagctgatgaagctcgccatctggctaaagatatccagacagctaaagagcataaccttcgggagatcggcttaagattgatggctctgaaagcgtctggattcaatcaaaaggaaattgctgaactggagggattatcccaggctaaggtcaccagggcactgcaggcggcagcagtaccgcaagaattgatttctctgttcccggttcagtctgagctgtcgtttagtgactataaaattctgttagaggttaatgaaaaactcagtgaaaagggcttaacatctgaagggctcattcagtctgtctcagatcagcataatgcaattttgagtgagtatgatcgaccagaagacgaacagaaagccagtatactgaaattgatttctcaggcctctcagacattgatagctccgcctcctaaggaaaaatcagtaatttccgcactctggacctttgaagaaaaggacaagttcgcgcgcaagcgtgtgaaagggcgtacgctgacttatgagtttagccgtatgtcaaaagtggttcaggatgaactggacaaagctatcaacgaggtccttgatagaaatttgagtcaataa

SEQ ID NO: 18872 - DNA, 318 bp, Escherichia coli
gtgaccgcctatatacttacaactgatgcggaagccgacctgcgaggcatcatccgctacacgcgtaaacagtgggggatcgcacaagttcgtcgctatattgcaaggctggaacatggtattgcagatcttgctgccgggcgaggttccttcagggatatgagcgaacttttttctgaattacggatgatacactgtgaacatcattatgttttttgtctgccacacgggagtgcgcctgcactggttgtcgcgatttttcatgaacgcatggatctcatggcccggctgagcgagaggctcaacatcgaaagttaa

SEQ ID NO: 18873 - DNA, 252 bp, Escherichia coli
atgagccgcctgacaattgacataacagaccagcagcaccagagcctgaaagcactggcagccctccaaggtaagaccatcaaacaatacgctctcgaacgtttgttccctggcgatgcagacgctgatcaggcatggcaggagctgaaaaaactactgggaaaccgtattaacaatgggctggaggggaacgtttctactaaaagtattggagacattcttgatgacgaactgagcggagatcgcgagtga

SEQ ID NO: 18874 - DNA, 435 bp, Escherichia coli
atgtgccccgcattatgtgcggagtatggctgccagacgttgccagttccctgggctggccccggaagccggtatacgctgctgttcgaatcgtttgttctctcatggctgaaaatcagcactgttgatgctgtcaggaaacaacttaagcccagctggaatgcggttgacggcattatgatccgggcagttaagcgaggccttgcccggataaaaaagccattacccgcctgtcatatgaatgtggatgagatcgcctttaaaaaagggcatcgttatataacggtgatttccgatcgcgatggtcatgcgctggccttaacggacgatcgtggcatagagagtctcgccagctatcttcacacgcttactgacgggcagttgctggctatcaaaacgctctcaatggtaagcgtcaacggagcaccgtattga

SEQ ID NO: 18875 - DNA, 186 bp, Escherichia coli
atggacgaaaagtccctctacgctcatattctcaacctgaccgctccatggcaggttaaatttctttctcttgatgaaaacgccggttctgttaccgtcacagttaggatctctgaaaatgcccggttagcttgtccgacctgtggtaaaacctgttctgttcacgatcaccgtcatcgtaaatag

SEQ ID NO: 18876 - DNA, 423 bp, Escherichia coli
atgttgttgtttgtctcgcccacttcagaacctacgcgttctacagcacctttgtacacagaacgctgcccggcaggttttccgtcaccgactgcggactataccgaagacgaactggatctgaatgcctactgtatccatcgccccagcgcgacctactttgtccgggccatcggagactcgatgaaagatatgggcctgtactccggcgatttaatggttgtcgacaaagctgaaaaccccatgcagggggacattgtcatcgcggaaacagatggcgagttcaccgtcaagcgtctgcagcttaagccccgtatagccctgctgccgatgaattccgcctcctcctccctctactcagaggaactgcagatattcggcgtgatgatcgcattcatacataagacgcggagtgctaactga

SEQ ID NO: 18877 - DNA, 399 bp, Escherichia coli
atgtttgcgctcgatgatgtgaattcgttctatgcgagctgtgaaaaggtgtttcgtcttgacctgcgcaacaggcccgttgtggtgctcagtaacaacgatggttgtgtcatcacgcgcagcgccgaagcgaaacgactgggcattaaaatgggcgtcccctggtgccagctgaaaacggcacaatttccggagccggtcatcacgttctcgagtaattacgagctctatgcgtctatgtcgaacagggttatgtctcatctcgaggagatggcgccgcgcgtggagcagtactgtattgaagagatgtttctggacattcgcggcatagaccactgcatcaatgttgaggacttcggcggcaactgcgcgagtacgtgtgctccggtacggagctga

SEQ ID NO: 18878 - DNA, 387 bp, Escherichia coli
atgaagccatgtgccaggcagtttgtctacgctgagcgtgcagctgaaaagctgcgcggtgagcatcagttctgcaggcatattgccgtttttgtgaagacgtcatcgttcgctgtgaacgaaccgtattacgggaatgtggccagtgaaaatttgatgactcccacccaggataccagggacatcatagccgcagcgatgaaagcactggatcggagctgggtgaatagccctcgatatgcaaaagcaggttgcatgctcaatgatttcactcctaccgggatttcgcagctgaacctgttcgatgatactcagccccgaagcaacagcaaacagctgatgaaagttgtggacggtattaaccattcgggcaaggggaaaatatag

SEQ ID NO: 18879 - DNA, 384 bp, Escherichia coli
atgggtaaaataataacattgtcgtatacaaataatttcaagcctattagcgataataaatctcaatcattgcgaatacactgtgtaagtgtacgattaaataaagaagagttagagcttctcaatgcaagccgtggtgataaacgcaaaggtgaatggcttcgcatggcatcacttcaaaagcttcctccgaccattcctgcaatcaatttagaagtttggcaatcattgtctgatatatctcaaaagctaaatcgtctaataatccaccttgatactaaaagcagtaatagtgaactgacgaaaacagagatcttcgctgttaaaaagcagattaaagagcttcgctcatgtcttacaggttctgatccgtccgtaaggtag

SEQ ID NO: 18880 - DNA, 1152 bp, Escherichia coli
atgaaaggaatgcagaagatcaaaaggggtaagagcttcgctggtgttgttcgttatgcattgcaaccgggagcacatcataaaagcgatccagtcgtaattggcgggaacatgttaagtagctctgttcttgaactgatttccgaattcaatggcacaaaacagcttcggctagatgtccagaaaccggtgtggcacaactcacttcgattacctacgaatgaatccttgtcgaatgaccagtgggtaaccatagctgatgactacatgaagaggatggggttcagtgatactcacctccgttgctatgtgcttcataacgacgaaggccagcatatacacattattgccagcagaatcgacatagccggtgggaaactctaccttggcaggaatgagaaccttataagtacccgcataatcagtgagcttgaaatcactcataatctaacagtgaccaaaacagcctcagccattgcaccaaagcaaccgaagcggaaaagaatctctcgcaacgaacaaatgctatcagaacggactggtcttcccgcccctaaggaagctctccaacagatacttgataaaagtttggcagatacacctgaccttttaacttttatcaagaggctggaagaagcagaagtcggctggacggcgaatgtcgcttctaccgggaaaatgaacgggttctctttttcctaccgcgatatagctttcaaagcttcgcaattgggcaagagctacagttgggcaaatcttagtaacaggctcaactacaacccagaccatctagaagctctgcgaaccggcataccaccagaagaaccccctgctcctgctcctgctcctgctcctgctcctgcaacgatcttaaggacaactgagagaagggaaagtatcggtggaaaaattgcagaactggaattacggctcagagaagacaaacggaccgcaatcgtagaaaagattcttctaaagaatacagtcaaacagcaaaagcatctcaggctcagtagctggtttccctttttacaacggctcatagagcttctccgaagctacggtaagagcattcttcacaacaaccctgcaagattctcaaaagtctatgcaactcagcatctaaaacctgcaagaaaaattcgtttatag

SEQ ID NO: 18881 - DNA, 387 bp, Escherichia coli
atgaataaatttattgtaacctcctttttcattgcaatatttttaatttctggctgttcaacatcagggaaccaaaaaatcaaaaatgaaacggctcaaagccttcaatcgaaaataattaaaaacaaaacaactaaggcagagctacttgttcaacttggtgagcctgacaccagaacgactcttgacgatggcaacgagcaatggagatatttcatgtataacaatcagttcaatgcctcaacttttatccctgttgtcggtttgctaactggcggctcccagactcagtctaaaactctcgaaatcgacttcaatggagaaaccgtaagcaagtggacattctctactgataataacaatacaaaatctggcattcttaattaa

SEQ ID NO: 18882 - DNA, 315 bp, Escherichia coli
atgaaaacatactcaattctcgcagttatcctttctacttttctattaacagcctgtaattccgaaccttctgaaaaagacatatacaatgctttcaaaagtgttgtagatagatcaaatgcaagtatgaaagctctgaactcaagtattcccgaaaaagatcttttaagaatagattatgttaagaaactaagttgcacagaagaagcaaacaatgtttacaactgcattgtcgatgcttctatcagcaacatgaaacaaacaaagcctgttaagcttgtgaaagctgatggtgtctggaaagaagttcagtag

SEQ ID NO: 18883 - DNA, 150 bp, Escherichia coli
atggctctggtagatatattattagttctcatcctgttttttaattgtggtttatttaatagagtatatatcattaaccataatatgcgcaggggatgtatatggttaataaaactaaaagacaatatgatgataaaggaacaactttaa

SEQ ID NO: 18884 - DNA, 150 bp, Escherichia coli
atggttaataaaactaaaagacaatatgatgataaaggaacaactttaattgaatctgcgatagtattagcgctttctgttgcttctgtatccggcgtgttatatcattataataatatgcaggggaacagaaagtttgaagagggttaa

SEQ ID NO: 18885 - DNA, 864 bp, Escherichia coli
atgataaatgaaatgacaataacttctatattatcatatattgaagaaaatattgaaatcacctcaattaatatagatactcttgtgcagcattccggatacagcaggagatatttacaactactttttaaaaagatgattggactgcctgttggtaaatatatccagagacggagaataacacgggcagcgacttacttacgcttaacaagccttccagtatcaataatatctgacaaactttgctatgactcccaacaaacattttccagagagtttaaaaaaaactcgggctatactccttttcagtacagaaaaaacaaactgtggatgtttaaatatcaaactggttgcaggaatataaaaacatcattccctattcctgagttatgtttcttgcaaaaaaagagtttctttggctcattgataaagtataaagagaaaataccatatacgggttccagttcaaataaaaaatgggatattgttaaggccttacttccccacagcttatcttctttatttatatcaaataatataatacaaggtaaggaagccaaaaatgaatttaccataaattctataatatggacaaaaaaggaatcttcaaatactgaaacatcaatagatgaaggtatttatgcgcgctttacatataaaggagagatagatgggtatgccacttacatcaataatatctatatgaatatattgccttactatgggttgcaaaagaaaaactctcttgacctggaaataatatcaacaggaattgatggatgcaaaaactttgaatatttcttacccatagagagaagtggcattaactatatacccaaaacaaaagaattgcattttccgtaa

SEQ ID NO: 18886 - DNA, 858 bp, Escherichia coli
atgttaatagtcaatcctgatactcaccgtcccctcgtcctgcttcccggccgtgatcagcgtacgctggcgacctggttcagaaaatatccggaaatacaggttgtctcgcgtgatcgcagtggagtctatgcgacagcagcacgtgaaggtgcacctcaggccagacaggtggccgatcgatggcacctgctaaaaaatattggtgatgagcctgaacgaatgatgtacagatatatgcctctgatacgtcttgttgtcagagagttatcactgaagaaatcacctgagccagaaatatctgtgcctgtagcatcgctccgtcgtctggaacgccttaaacagcacatccgcaaaaaacggcatcagcgttggacagaggttatggccctgcataacaagggatgtagtttcagggaaatatcccgtattacaggcctgtcgcgagtgacagtcagtcgctgggtgggttcaggaacattccctgaaatgtcaactaggcctccaaagcgagggcttctggacccatggagggagtggttaaaagagcaacgagaatgtggtaattataactccggccggatatggcgggaaatggtggccaggggggttacaggcagtgaaaccatcgtcagggatgctgttgccaaatggcataaaggctggatcccaccggttactactgccgcaagacttccttcagtgtcccgggtaagccgctggttgatgccctggagaataatcaggggtgaagaaaattatgctttccgatttattagtctgatgtgtgaaaaagaaccggagttgaaaatagcgcagcaactggtactcgagttctaccgtattctgaaaacctaa

SEQ ID NO: 18887 - DNA, 510 bp, Escherichia coli
gtgctgactgaactgaaaaaccgcggtctgaacgatatcctcatcgcctgtgtggatggcctgaaaggcttcccggatgccatcaacacagtatatccgaaggcccgcatccagttatgcatcgtgcatatggtgcgcaacagcctgcgcttcgtatcatggagggactacaaagccgtcactcgcgacctgaaagcgatttatcaggctcccacggaagaggcaggccagcaggcactggaagcgttcgctgcggcctgggagagtcgctatcctcagataagccgaagctggcaggctaactggccgaatcttgccacgttcttcgcttatccgacggacatccgcaaagtgatctatacgacgaatgccatcgagtcgctaaacagcgtgatccgccatgcgatcaaaaagcgtaatgtgttcccgacagacgactcggtgaaaaaagtggtgtggccggcaatccagtctgcatcccggaaatggacgatgccgttgaaggactga

SEQ ID NO: 18888 - DNA, 666 bp, Escherichia coli
atgcagcagcaccaggtggcaccgcatcacgggcagttcaggaaattcgggcagcacgtgagcagtgggaacgtgaaaacggatttatcagcgacggaaacggtctggaagctgtgggaactcatgggggaggtttattcgaaccgctggacccagaagaacggggccgcaccttcgaagctctggattgcacagattggcgcgatgactgagcagcaaatccgacaggtctgccgccagtgcatggaccgctgccgggcgggtgaaacatggcctccggacctggctgagtttgtggcgctgatttcagaaagcggggccaatccatttggcctgacggtggatgctgtgatggaggagtaccgccgctggcgtgatgagtcctggcgatatgacggaagcgacaaatatccgtggcctcagcctgtgctgtaccacatctgcctcgaaatgcgtaccagagggattgagcgccagatgacgcagggtgagttaaaacgacttgcggaacggcaactgacgaaatgggcaaagcatgttggtaacgggatgagtgttccgccagtgcgacgacaactggaaggggctaaacacccgcaagggccaacgccaattgaacggctgaaacaggaatacgaacgccggaaggcagctggttttatttga

SEQ ID NO: 18889 - DNA, 756 bp, Escherichia coli
atgaaaaaattatcacgttcatttactctagggctcgcacaatcatttttgatatgtctgacattactctgctgggcagaagaaaaccaccctgtaattattttcgctctcatgtttattgtctgtgtggcaatcataagaacgaaaataccaaataagaggaccaggctaccaagaaaattcaaacaaacgcaatgtatttcattattttcgtcgacaattttcatgtttacttgcttcattctgtttaaaacagaatataaagaacatctttacactatcattctaacaatcgcaacaataatctcaatggtattaattgcacggtcacatataacatctattgacaacaaagaaaaaactttatcttcatacacaaagacaataataaaatacacatggatagtcatttctctgtttagttataacatttcacgagccctaataagcatcacgttcgatataccttttgacagtaccaacgacagaccaataactttcctcttttcttttttttgtattttttggatttactacagcctttattacttattcctcttcgtcatattttacctcacagaatttgttaactcttcacgcaacaaaaaatcaaaaacaaaattctatccaggaacagaatatcacctttcagttattttaccttcattttttatatatattgcattatctaatgtgttaggcattaacattcccaatatacttaaaacaggaacaattttttacgctgcgttatga

SEQ ID NO: 18890 - DNA, 396 bp, Escherichia coli
atggaaagcagtgatccgaaaaaaagaaagaaagttgtggcatacctgcacccgacactttatccgcaggacagcctgacacaacaaacaattgactctctcccgatacaaatgcggggagacttctacagacaatcccttatttgtggagcagctctttattctgttgacccccgactgttaacgctaatcagtagttttttcagtgagaaaatcactgcagaaaatctggtaaaacttatagagcaaacaacaggatacaaatccacatcgattgatataagtacgctaaaaaacattatagaggcatcttcagaaaacaaatcagagagcatcacttcaaaagatgattttgaagaacaaaccaaacgcaatctttccatgttaaaaaaataa

SEQ ID NO: 18891 - DNA, 960 bp, Escherichia coli
atgctaaaagtatcatgcgacgatggttcaactaacgtaaaactggcctggcttgaagatggcgaggtaagaaccagtctgtcaggaaacagttttaaagaaggctggaacccgggactgtttaatgccggcaaagtttacaattacgtcgtggatgggaaaaaatacacctatgatttgggcagcactgctgtcataggtacaacacatgtcagttatcaatacagcaccaccaatctgcttgccatacatcatgcactgctgacatccggccttcagccacaggatgtagaactgacagtgacgttgcctgtgaccgaattctttgataatgacaatcaaccaaatgaagaaagaatagaaaggaaaaaggcaaatgttctccgtgagatatctctgaataaaggggaaacatttaaaattaaaaaagttaatgtaatgcctgaatctttgccagctgcatttgaatcactaaagaaagataaagtaaacaaacttgaacgcagcctgattatcgatcttggaggaaccactctggattgtggtttaattctcggtgcatttgaaggcatttctgaaatccgtggctattcagaaatcgggacatcacgcatcactcataccgtcatgaacgcactgacgaaagcctccacaccctgcaattattttattgctgatgagttaataaaaaacagacatgataatgaatacctccagacattaataaatgatgtaactgaaataaaaaacataactcatgtaatagacagtgaagtgaaatctctggcagaaagcatcaggcaggaaatttcaacattctcaggaatgaaccgaatctatctcactggcggaggagctgagcttatttaccctcacataaagcaatatttcccgaatctgaaagtgaacaaggtggatgaacctcagtttgcattggtgaaagcaatggtgcatgcgtaa

SEQ ID NO: 18892 - DNA, 261 bp, Escherichia coli
atgccccttaatcggcatatcaatagttttgccgtccttcaggcagctgatattgcgggtgcgtacaatggcacgctcactggagacatccccccaggcttccagccccacaaaacatcccgttgcgtcatacgttttgctgttcggcatttccaccaggccggtgatacgcaactgcatcggcaccgtggattcattaccggtgacagaggcattggcatccgccccttcaatcagcatggctttcgcaaaacttcctga

SEQ ID NO: 18893 - DNA, 156 bp, Escherichia coli
atgagtaataacccacttgaggccgtcactcaggcggttaactccctcgtcacagcactgaaactgcctgacgaatcagcaaaggccaatgaagtgctgggcgaaatgagcttcccgcagttcagccgtctgctgccgtatgtagtggtcaagtaa

SEQ ID NO: 18894 - DNA, 861 bp, Escherichia coli
atgaaaattacggatcacaaactttctgaaggtattactctgacatttcgtgttcctgaaggaaatatgaaacatcctttgattatcttatgccatggattttgcggtatccggaatgttctgctcccttgctttgcgaatgctttcacagaagcagggttcgcaacgattacttttgattatcgtggattcggtgagagtgaaggagaacggggccgtctggttccagcaatgcagatcgaagatattatttcagttatcaattgggcagaaaagcaggcatgtattgataatcagcgtatcgggttatggggaacatcgctgggtggttgtcatgtgttcagtgcagctgcgcaagatcaaagagtgaaatgtattgtcagccagctggcttttgctgatggtgatgctctgattaccggagagatgaatgaattggagagagcttcttttctgtccacactgaataaaatggcagagaaaaagaaaaacacagggaaggagatgtttgtaggggttacacgggtactaaatgatgatgagtcgaaggtattcttcgagaaagtcaaagctcagcatcccgaaatggatataaaaatacctttccttactgtcatggaaacgttgcaatataaaccggccgagagcgcagccagagtccggtgtccagtattggttgttattgctggccaggatagtgttaatccaccggaacagggaagagcattatatgatgctgttgcttctggtactaaagaattatatgaggaagctgacgcatgccattatgatatttatgagggcgcattttttgagcgtgtagccgctgtgcagacacaatggtttaaaaaatatatttaa

SEQ ID NO: 18895 - DNA, 222 bp, Escherichia coli
atgtggcgctaccggataacacggttgctgtcacggaaataccctgacctggtgatgccggatgcgctggcagcagaaggaagcagtaaacgggaatggaatcgcttcccggacacgcattaccgccgtggctggaatgtcaacgtatcccggatgatggataatgccacccatgtggcggtgtactctggctcttacctgaaaaactgccggtgccgatga

SEQ ID NO: 18896 - DNA, 408 bp, Escherichia coli
atgagccgtctggagcactatgctggtcaggatgaaattggtctgcgttacaacagtcaccggacaaaacgggaagaatacctggtgatgagtggtgatgagttcatggaaaggttctcctggcatgtggcggataaggggttccgtatggtgaggtactacggtttcctgagtccggtgaagcgccggttactggaagaagtggtgtacatcataacggagacggtgagaaagatggcgatgcaaatcaggtggagagggatgtatcagcggttactgaaggttgacccgctgaagtgcatcctgtgcggaggtcagatgcgttttacggggctgaagcgggactaccgtctgacagagctggtcctgatgcatgagccactggcgcaacagcgggtgtgcggctga

SEQ ID NO: 18897 - DNA, 291 bp, Escherichia coli
atgtataactacatccgtaataatcagatgatgatcccaaactacggagaaatgcgccggtatggtgagccggtttcaacagcgtttgtagagtcaacaatcaacgaagtgatcgcccgacgaatggtcaaaaagcagcagatgcagtggagtagaaagggcgggcattatttgttacagaccagaactgcagtcctgaataacgaactacaggacaaatttgccagttggtataccggttgtacgatagacgctcagagtagagggacgttatccgcgatggcagcatag

SEQ ID NO: 18898 - DNA, 582 bp, Escherichia coli
atgctctccttatcgcgcatcctggatctcattggcgatgtgccagcatacgggtatcgccgtgtctgggcgatactcaggcggcagtcccgaaatgaaggactaccgttcgtgaatgcaaagcgtgtttaccggataatgagcgaaaatagtctgttgttgttacatgacaaaccatcacgacagcagcgggaacataaaggccgaatatcggtgaaggaaagcgaccagcgttggtgttccgatggctttgagttcggttgcgatgatggcgaaaaactgcgtgttacgttcgtcctggactgttgcgatcgtgaagccatagactggaccgcaagctcgggaggttacgataaagcgacagtgcaggatgtgatgttaggagcgatagaaaaacgctttggcgataaagtaccggaacagtccatccagtggctgacagataacggttcagcgtacagagcgcatgaaacacggcagttcgccagagagctgaatctgaagccctgcacagcggcaatcagtagccctcagagtaatggaatggcagaacggttcgtgaaaacgatgaatgaagactaa

SEQ ID NO: 18899 - DNA, 351 bp, Escherichia coli
atgaaaaaaattaagtttgttatcttttctggcattttgggtatcagcctgaatgcctttgcgggtggtagcggttggaacgcagataatgtagacccgtcccaatgtataaaactgtctggagtacagtatacttataacagcggtgtctcagtatgtatgcaaggccttaatgaagggaaagtaaggggggtgtctgtctccggagtattttattataaggacggcacaacaagcaacttcgaaggggttgttaccccctccacacctgtaaatacgagccaagacattaacaagacaaataatgttggagtccaaaaatatcgtgctctaactgaatgggttaaataa

SEQ ID NO: 18900 - DNA, 249 bp, Escherichia coli
atgtcgcagacagaaaatgcagtgacttcctcatcaggtacaaagcgagcatacagaaaaggtaatcctctgacgcttgcagaacgtcagcaggcatccctggcaagaaaacgagctacacataaagaactcagagtgttcattcctgctgcgttaaaagcgcaattgcaggtgatgtgtgaagctgagggcgttacccaggctgagatgattgccgaactgataaagcagaagagtgcttttagctaa

SEQ ID NO: 18901 - DNA, 378 bp, Escherichia coli
atgccggatatcctgcccgtggctgaacggcggattcattataatccggctgtaatactgcaccggctgccattccatgaagtcgccacactgtaccctgacaccgttaaaattttcccgcagataccggaccagcccgctgttgctctccaccgcatcacacatggcctccggcgcggtatcccgaatcgcccgcagtatggccccggtgccggcagagggttccagaatgtgatcacggttgctgatttccgccagcgtcaccaggcgatcacagaccggggcaggtgtcacaaaaagctgagattcagcccggatttcagcaaccggcgcggcgttatccagccttgcgcgcagcagccggatacgttctcttaa

SEQ ID NO: 18902 - DNA, 420 bp, Escherichia coli
atgaacgccagaatcagaaacgaaatccaggcattaattcggattaaagagcgtaatagcaatggtggagacttgcgcgaatttatttgcgcgcgcgaagttaaggggtatggcgaaaagacttacctgattgcatttgaccattacagcatttgtgcccgttattgcggggaggcggtattccgcgccattacgtttggcaatgccttcaatgtggatttatgggaatacgtcatggaccgagaatacatcagcgcgtcagacccggacgcacgggagcagtggcagaacatctggcgcgagtaccggcaaatggcgaaaggctggacgcaggggacgtattcttcccttgccctgaaagcggttcagttatcgctgcggcatattccggcatcactgcgcgaacccctgttgtactga

SEQ ID NO: 18903 - DNA, 270 bp, Escherichia coli
atggcaaaggtcatcttcgaatttaattgcgcagaaagtgctgagatgcaaagaaataaccatttttatatcaatatgaatgtgcggctggaagagcaatccccggagggacaggtcgggccgcatgatctgatggcaggcattatcaagagtatggcgtctgaaattattgagaaggcgacccgggcgttgctggaatccgccagggaacgcgggctggaagttgaaggcgagttattccggtgcaacccggatgccgcaacacattaa

SEQ ID NO: 18904 - DNA, 594 bp, Escherichia coli
atgaaagatataaaaaatatatcaactattataaccaataccctaaaacaaaaattaagtttatcaccacaaaaatctttaacaaaaatacaagatgaagtgccagatgaatatatttttactttgcgtagaaatggcccaaataattatataggtatatgcatcggtaagaaaaaaaatataacaccaacaggtgagtggttatttgttgtgacagtggaagacccttgcaatgtaattatgataagccaaagtgatattaatagtttacttttaagctcatcttttattggtatgattggtattggtcactcaagtttaaccagaaaacgaattgatttgaaagaacaaaacagaatgtacataaaagaaagagcaaggatagctaatagatttaacagaaagggaggatgttatgctattgacgtatatgttgctggagaaatattatttaatgactttggacaaatagtttactggaataataattctggacattataaaatatcaaaacaggtatctatggttaatattccatctcctgttaaacacattttaccaatagaattatttacaccatataacattacttaa

SEQ ID NO: 18905 - DNA, 600 bp, Escherichia coli
atgggaaaacatcaggaagaaaggaaaataccagtcattgtggtgaaaaaacgtcgaactttttcggaaccttccctatccgaaaaaacagatattatcgcacctgtatttactgaacagacgacagaatcagtatccgccggaataaattcatctgccgtcgaaaaacatatccctgaagcgccagccaggaagaagaaaaagaaaaaacaccgtttcccacgtccctcccactggacccgagagtatactctcgagtgcgtggaaaaaataaagattctgtttcctcatcttcgtgctgaaggcggtggatttattcccctgaaaattggcataaacaatgatatttcggcatttctggcagaacacccggaggcagaactgaccatggacgaatggctctgtgcagtgtcctgcatcacatcacgccgtgtatatctgcaacggacagctgtcgtcggcgtcccacgttatggtctggatggtcaccccaaagggcaggtctcagaatctgaagcacagagtgccggtcgcagactggcaacattagaacaaaagtggctcagaatgcagacacagcaggagaatatttctgagtaa

SEQ ID NO: 18906 - DNA, 846 bp, Escherichia coli
ttgaacaactggtctctagagcatacaaaagaaatcaaagcttggcttaacatagataactatcgcaagtttgaagatctctcattaatacacttctatcacgagttatgggcccggaatctgttctttaaggagtatcgggaagagtttgagagcagaactcttatgagttacttctcaaagattttcaccggcaacccttttttgattccagaagggcaacttggatacatgactcctgccaacaaactttttcagcctccccatttttttctaacaactcttgatcgccttgctgaaacgagcattattgctatgcaacgcggaggttttgtttggcatgaaggtgacaattattctataaacgcagagcttcgagaggaatcactttcagacattatgcccgatcagtttacacgaacagtcatgttcgagattgatttggcaagtggcacagacgaagagattgcagagtcgcttaaagctgcattaccgcaatggcgtaaagttaagggtattgatgaaaacccattggaatctgttcgttttggatacggaactatcaagaaactcatcagctatcgtgtaatacctatgctggatatcctggtgtgggcagccgttaaaaaaatccgtgtctctgacgacaggttatccagactactgtatacagacgatgacgaagaaagcgaaatgaggcagtccagccaaatcaaagataccgacaggcctttggctcttaaatcctgcacaactgactttatccgacaattccattacttcatgaacaaaaatagccatttgaagcaaatgaaagtctctgatgtaatgaaactatcggattag

SEQ ID NO: 18907 - DNA, 207 bp, Escherichia coli
atgaagaatcaagcaacccgcctcatacgcttaccagaagttctcgaacgaactggctacggaaaagcctggatctatcgtctgatcagtgaaagtcggtttccggcaccagtgaagatcggtgttcgtgccgttgcttttgtcgagagtgaagttgacgagtggattcaatcagttatcgaaacaagtcgaaataatgttgcttag

SEQ ID NO: 18908 - DNA, 300 bp, Escherichia coli
atgaatatcgaagaatttgtgagtgaagataaccatatgtgcaatttaggcgatgatcttttttacaagatcttcgagttgggggcaatctatgatttacctgataatgaatttaacagaaagattgtttactggttaagccagtatttagtagggaatctaaggaaaccgttagatgagatctctgagcttaatgcttccaaacagatatatgtttacgagacctggctctcgttaattaaatgccctgatgaaatgaaacttttggcgaagcggataattctatatctattggattaa

SEQ ID NO: 18909 - DNA, 594 bp, Escherichia coli
atgggaaaaaatcaggaagaaaggaagccccccatcattgtggtgaaaaaacgtcgtactttttcgctgccttccttatccgaaaaaacagatattatcgcgcctgcatttactgaacaggcggcagaattaacccccgtcggaataaattcatctgccgtcgaaaaacatatccccgaagcaccagtccggaagaagaaaaagaaaagacaccgtttcccacgtcccgtccactggacccgtgagtatactcacgagtgcgtggaaaaaataaagaccctgtttcctcatcttcgtgctgaaggcggtggattaattcccctgaaaattggcatcagcaatgatatttcggcatttctggcagaaaacccggatacagaactgtccatggacgaatggttctgtgcagtgtcctgcataacctcccgccgcgtatatctgcagcggacctctgtcgccggcgtccctcgttatgggctggatggtcatcccgatgggcaggtctcagaaacagaagcacagagtgctgttcaaagactggcgataatagaacaacggtggctcaggatgaaggaacggcagactgagcaataa

SEQ ID NO: 18910 - DNA, 645 bp, Escherichia coli
gtggttctttacctgattattaaatgtgctaatcagaaagaggaagtggtgaccaggaaatcagagaagcaacaggtgattgcatttatcgattacgagaactgcagtaatctgacagaagttgccttaaatatatatacggagttaattatatttgccggcgcgaaacagaataatgtggcactgccagtaaacgctttccatgaagcagtaagagtcacactccggcatgtcagagaagtctcccggaacaatgttgattttcatcttgtactggagctggggcagtgtgtatgccactacgggccggagaaggaataccataatgtttctgccgacaagggatatgacggtattgtccggacactgcaggcgcgcgggatttgctgccgtcgtgtctccccggataaggtgtcatcagtaaagatggctgtacccgacatggatatcgttatccggtgggcaaacaaaattcaacaggcagcgcggaaggttcgtaatatgccggtaacagaaggggcatttaataattatttaaaatcacagatgcgtggtgaatggcgtgatgtcctgaccaatgatatccgggatgaactggttcatcgcgggataatgaaaattcaggggaataaaatcatctggtaa

SEQ ID NO: 18911 - DNA, 246 bp, Escherichia coli
gtggggcttgacccggaagaatggcagggtccagtttctgctattgcagggacaacggaaaccaaacgaaaacccaaaggcggtgtgagaaaagcgaaatatatctttgaggatgagaacggcgaaaccaggacgtggtctggtaacggtaaaatgccacttgctttgcggaaacaggttaatggagattgtaccctggaaactttcctcattgaaaaccccaatcaacatgaacaaagtgaataa

SEQ ID NO: 18912 - DNA, 426 bp, Escherichia coli
atggaattacaggactggcgaaaagaacctcgtaaaaactattcgaatgaattcaaacttcgtatggtggaactggcatcacaacctggagcttgtgttgcacagattgcacgtgaaaatggcgtcaatgataatgttattttcaaatggctcaggctctggcagaacgaagggcgtgtttcgcggcgtcttccggtaacgacctcttctgacactggcgttgaattattacctgtagaaataacgccggatgagcagaaagaacctgtggcggccattgcgccgtctttatccacttccactcagaccagagtcagtgccagttcctgcaaggtggaattccgtcacggtaacatgacgctggaaaatccatcgccagagctgctcacggtgttgatccgtgaactgaccgggaggggaagatga

SEQ ID NO: 18913 - DNA, 423 bp, Escherichia coli
atggctgataatcgtaagtgctctttttatatttatccggaacgaaatgcagctgatcgggtagctgacaggtttcttgaaaaattgcctcagaaagaacgtggtcgggcaatgcgggccatgatgttgtgtggtgctgcattgatgaaacaggatgaacgattgccgttcctgatagctgaattcctgacagacagcacgtctatgcaggatattcaacgaattatcagtagtacgctaccacaacaggaaaatggtgaagttgttcgtttgctggaggcatttctgcagtctgccggtaataatgcaaaaacgatcctgcctgcggttgattctgctacgcaagaaatatctgctccagtcgatcagaatctcctggaaacaagaaacaacattaagaacttgtttccggatgatgaataa

SEQ ID NO: 18914 - DNA, 981 bp, Escherichia coli
atgcgtatctttgtagatgacggttctaccaacatcaaactggcctgggttgaagacggtgcagtgaaaacgttaattagtccgaatagttttaaaccggaatggtctatgacgctgcagggactgactgatgccactatacccgcttccgcaaactatgagattgatggagagaaatacagctttgatcaattgagtccggatgcagtgcgcaccacagaaacgcgttatcagtacagcgacgttaatgtggttgctattcatcatgcgttgatgcagtcaggtattgctccgcaacctgttgatattattgttactttacctttaggtgagtatctggatgagaacgatcagccaaatctggctaatatcgaacgtaagaaaaataatgtcagacgagctgtaacagttcaggggcgtgaaaactttaccattcgtaaagtcagtgtcttgcctgagtccgtgcctgccggttttgacgtgctgaaagatctgaatgatctggagtcgctgttgatcgttgatatcggtggaacgacccttgatattgcacatgtccgcagcaaaatgtccggtttcacaaaaacttattgtgaccccaagacaggcgtttccatcattactgaagcagttaagcatgcgatggatgtgaatgtgagtacacgaaccagttcttattttgcagatcgtctaatccagagtcgggatgacaatgaattcctgactcgttatatcccgaatgcagaacagcgtgagcagatcctgacagtattacgtgaccgggaaaaaaaactgcagcatcgtgtggcggattcagtaggacgctttgctggttttactcatgttatggttgttggcggtggtgccagccttgtggctggggcagtaaaaaaagcgacaggagtgggtgataaccgtttctttgtcagtgacaatcctcagttcgatctggtgttgggaatgatggcaatgaagggatga

SEQ ID NO: 18915 - DNA, 591 bp, Escherichia coli
atgcttaacccacccgatggcatgcagcttaagctccggatacatggcgttaacttctggcattttcatcaacgcttcaacgatatgtccgtcgaatgttgccatgtcttcctgcaacaattcctgtgcgctaataaccatatcaacggtgatgttttcacatgtgtcgaacttaaccatgacagcgttctgtacttcaggggccagcttgtcaaaagtgacgttcatcggatcggattcagtctcaaccgggacaaaggaagcagactcctcatcccagcggttttcctgcatatattcagcatcccaggaatcgagggcagggcggggtataccgggtttatcctcgcagacaagaaatttataagcgcagtcctgagcagccggataatgttccaggaattgccagtgaaattttgcgcgggcgcgacgttcatcaccggcttcaatggcagtggctacagcgacggcaccttcttcctttattgcctgttcgtccggaatggcggcgcaaataaagactttactcattttgttttacctcattacagatttcagggtgaacgaatccctgccattgctggcatataa

SEQ ID NO: 18916 - DNA, 129 bp, Escherichia coli
atggcgaccattaacgcacgtattgatgatgatataaagaaccaggcggatgaagtgctgaacctgatgaatatattcttttgcattgatgcttttatatcggaatcgttcatcctcttgggtcattaa

SEQ ID NO: 18917 - DNA, 282 bp, Escherichia coli
atgaaactggtaagccataaagaactgcataacgagtggatgaaggacgaggaatatcgtgctgcatggcaggaagaagaacgcaaggagaagctcagggcgttgcttgcagaatggcgtaagcatgacaacttgacaaaagcgcaggttgctgaacgcatgggggttacacctccggttatttcccgcctggaaaacaacatcactaaagccagcatcgatacactgactcgctatgcccatgcgtgtggtatcaaaaaacctgtaattgccctttattga

SEQ ID NO: 18918 - DNA, 330 bp, Escherichia coli
atgtttagcgtcgtttatcacccggaagccagagaagaagccacagcattacccgtaaaaatcagggtaaagtttgaccgtctcatcggcaaactggagtatgatgcccgattactgcgggaaccggacacaaagcccttgggtgatggactttttgagatccgcacgatggggacagacatagccagaggcatctgggtatatcacaaaggcaataccatcatcatgctccgggttttcatcaagaagtctcagaaaacgccagcaaaagaaatcaatctcgccagaaagcggttagcggaggtacttaatgaaactggtaagccataa

SEQ ID NO: 18919 - DNA, 402 bp, Escherichia coli
atgactgaatccagcgattacgaatccgtccaggtctttatcggcgttgatgtcggtaaagatacgcatcacgctgttgccattaagcgttcaggtaaacgcctgttcgataaagcattacccaacgacgaaaacaaactcaggtcgctaatatctgacctgaaacaacatggtcagatactgctggttgttgatcagccagctaccatcggtgcgttacctgtcgccgttgcccgctcagaaggagtccttgtcggatacctccctggactggccatgcgccgcatagccgacttacacgccggtgaagctaaaactgatgctcgtgacgctgccatcattgccgaagctgcccgtaccctgcctcacgcgctacgcacgctgaaactggctgacgagtaa

SEQ ID NO: 18920 - DNA, 684 bp, Escherichia coli
atgctctgcggcttcgatgatgatcttgccgcacagacaacgcaggccagcaaccgtatccgcggccttctgacccagatacatccggcactggagctcgttctcggtccgagacttgatcacccggcggtactcgatcttctccagcgatatccctcaccagaaaaactcgcttcgctgggtgagaagaagctggcagcccagctctgcaaacttgcgcctcgtctgggtaaacgccttgcagcagacatagctcaggcactggccgaacaaaccgtcgtcgttcccggcacgaatgccgctgccgtagtactgccacgtctggcactccagctcatcacactgcgtaagcaaagagacgaggtggcgcttgaggtagaacagcgagttcttgctcaccctctttacccggtcctgaccagtatgcccggagtcggtgtcaggaccgcagccagactcctcgccgaggtcgcctgccgagccttcgcctctgccgcacatctcgctgcttatgctggccttgcgccggtaactcggcgatccggctcgtcaatacgcggtgagcatccctcgagacggggtaataaagctctcaaacgggcgttgttcctgtcggccttcgccgcgctcagggatccgatctccagggcttactacacccgcaaaatgagtcagggaaaatga

SEQ ID NO: 18921 - DNA, 747 bp, Escherichia coli
atgacaacggataacacgaacacgacacgtaacgattcactggctgcacggaccgatacctggttgcagtcgtttctggtctggtcacccggacagcgggatatcatcaaaacggtggcactggtgctgatggtactggaccacatcaatctgatattccagctgaagcaggaatggatgtttctggccgggcgaggagcctttccgctttttgccctggtgtgggggctgaatctgtcccgtcatgcgcatatccggcaaccagccattaaccggctgtggggatggggaattattgctcagttcgcatattatctggcaggctttccctggtatgaggggaatatcctgtttgcctttgcagtggcggcacaggtgctgacatggtgtgaaacgcgcagcctgtggcgttctgtgggggccatgttattgctggcagtatggttgcctttgtccggcaccagttacagcattgtcgggctgctgatgctggcagtcagccaccggctgtaccgggcggaagacagaacggaacgtctggcgctggtcgcctgcctgctggccgtgattccggggcttaaccttgccaccagtgatgccgcggctgcagccggtcttgtgatgacggtgctgactgttggtctggtgtcgtgtacagggaaatcattaccccgtttctggcccggagactttttcccgacgttctatgcctgtcatctggctgtgctgggcgttctgacgctgtga

SEQ ID NO: 18922 - DNA, 561 bp, Escherichia coli
atgacagagcagaagcgaccggtactgacactgaagcggaaaacggaaggggagacgcctgtccgcagccggaaaaccatcatcaatgtcaccacgccaccaaaatggaaggtgaaaaagcagaagctggcggagaaagcagcccgggaggcagagctggcggcaaaaaaagcgcaggccagacaggcgctgtccatttatctgaacctgcccacactggatgaggccgtgaataccctgaaaccctggtggccgggattgtttgacggtgacacgccccggcttctggcctgcggtatccgggacgtgttactggaagatgtggcgcagcggaatatcccgctctcgcataaaaaactgcgcagggcgctgaaggccatcacccgttcagaaagctatctgtgtgccatgaaagccggtgcctgccggtatgacacggaagggtatgtgacggagcatatttctcaggaggaggaagcgtatgcggcagcgcgtctggataaaatccgccgccagaaccggataaaggcagaacttcaggccgtgcttgatgagaaataa

SEQ ID NO: 18923 - DNA, 546 bp, Escherichia coli
atgcttcatttaaaaaatattactgcgggtaatccgaaaacggcagagcaatatcagatgacaaagcggcatagtattgtctggcttttttcggaagatggcaaaaactggtatgaagaacagaagaattttgccagcgacaccataaaagcagcctataacgacagcgggcgcgtggtgtgggtcggtaaggatgtgacaggtatcgaacccactaacgtcagtatcattgaactcccggatattactgctaaccgccgcatcaccgtaccgggatactggttttaccgcaatgatgaatttgtttttgattacaaattaaaagcagaagacgagcgtgataccctgttacaacagaccagcatcatgaccagcgaatgggaaaaagacctgctgttgggattaatcagcgacgaagacagggaaaagctgaaagcgtaccgtatttacgcaaaggcgttgcaggcgatggatttaagcaccatcaccgataaaaccacatataacgccattaactggccggagcgtcccgatgccgcagcttaa

SEQ ID NO: 18924 - DNA, 1071 bp, Escherichia coli
atgtttcacattgataataatactggcgtgccggttatgccgcccgtcgcggctgaatacagtaaaacgacgctttatttcaccgaaggagggaacggtattccacccacgtatccggggccggactggtttaatatcgtgcagtccgaaatgctggaaattctccggcaggcaaatatcaaaccggacaaaaacacgaccaaccagattatgacggcgctgaaaaagctgtttatcactaacagtggttcagccggggctattgccgaattaaccggtcagaataatacgttcccgtattttacgggcgaagacacaatgtcattaacgccactcagtgcgtttgtgcgcagtattctcggcaaagaaagtgcaacagattttgcagatgcactgaaagtcataaaacaatcaggcgacacgatgacaggagagttgaaaatccgtggtgttaatgcgctgaggattttcgacgaagcctttggcctgatttttcgtcgttcggaagagtgcctgcaccttatccctaccagtgaaggtcagggcgagaatggcgatattggtccacttcgcccgttcgctattaatctgcggacgggtgaaatatccatgtcgcataaagtgtctgttggcggtggttcgcaggtcaatggtgcgctgggtatcggcgttcagaacgcgctgggcggaaactcaattgctttcggggataacgataccggcctgaaacagaatggtgacggcattctggatgtttatgcgaataaccagcatgtgctgcgttttcagagtgacagcattcagagcaataaagcagtaaacgttacagggcgggtaacaccgtcagactacgcaaattttgatgcccgctataagcagaggacggagggcgtggaggatatccggctgggaggccagagggtcgacggacactatgatgatgattttaccgttccttcagggtatgtcgtggttggtggtgatgtgcatccttcaacgtcattaaagctgtactcaagaccccttcagaaattaattaatggcacctggtataacgcggcgagtgtataa

SEQ ID NO: 18925 - DNA, 228 bp, Escherichia coli
atgatgtcacggaatatcaaaatggcaacggaagtaaagacctggttacaggggcgcggcagccacgtcaacgaatcctggctgggcgtggcccgcccggtgcttgaaatcacctgtccgccaccggagcttgtcaggaatgctgtcagaattatggagcataaatccggggttgcccgttcagtatggacggcccgtcttaatggttgtcagattatctggcgttaa

SEQ ID NO: 18926 - DNA, 270 bp, Escherichia coli
atggcaaaagtaatctttgaatttaaccgcatggaagatgttgagtttcagaaaaaaggaggtttctttgtaggaatgagtgtgcaactggaagaacagtctcctaaggggctaatcggaccacatgacgtgatggcaggcattatcaagagcatggctcctgaaattattgaaaaagcaacccaggagttgttgaagtcagccagacaacatgggctggaagccgaaggcgagttattccggtataacccggatgcaaccaaacattaa

SEQ ID NO: 18927 - DNA, 288 bp, Escherichia coli
atgataatccctcgcaaaagatggtcacgcgaagaccgggaatttatcgaagccagtgtcgggaaaatgaccgtcgaggaaatggcgaaaaaactgaacgttgccacaaccgccctccgggcacatgccagaaggcacggaatatcgttgtgtgtttaccgaatcagtgagcatgacaaatatttgtgtcgtgaactttataaagaagggctggctattcatgtgatagccaaaaagatggaattaagcaatcgtgcggtatccagcattgtatacagtgaatattaa

SEQ ID NO: 18928 - DNA, 525 bp, Escherichia coli
atggctaaaccagtaaaacgaatcaggaacgccgcagcggcttatgttccgcaatcccgcgatgccgtggtatgtgatatccgccggattggtgacctgcaacgcgaagcagcacgacttgaaacggaaatgaatgacgctatcgccgagattacagaaaaatacgcctcacagattgcgccacttaaaaccagtattgaaaccctttcaaaaggcattcagggatggtgtgaagcgaaccgtgacgaactgacgaacggcggcaaggtgaagacggcaaacctggtcaccggtgatgtgtcatggcgtcagcgcccaccatcagtaagtattcgcggtgtggatgcggtaatggaaacgctggagcgtcttggcctgcaacgttttattcgcacgaaacaggaaatcaacaaggaggcgattttactggagccgaaagcggtcgcaggtgttgccggaattacagttaaatcgggcattgaagatttttctattattccatttgaacaggaagccggtatttaa

SEQ ID NO: 18929 - DNA, 1203 bp, Escherichia coli
atgataaagttgctttttagttcatctttattaaagatgggtgttgttttattaaatttgcttattcctgcaataataatacgattctattcagagtatgattttggaatttattcttatttactaacatacgcaatcgttatttctgttttacaaaacggcatcactgcaagcttccgtaatctgatatcaaatttagaaaaaaatgatttgcttgattatttattatattcagtgaggaaaataacgtatccattcttattaataatattttgtttattattggctacgctttatgtagttgggtttgatacgttatatggtaaaatatgtttttttattgctgtatcgttaataaatatatattatccagtggttgcttcatattatgatgctacaggtaaaacgctcaattttgtactacttgaaataatatttttactcgtattcattgcaggcgtgggcattttaatttactacaaagtgagtatttacattgtttgcattttaactgctaactacagaggggtttatgcaatattattaataatgaagaagtgtgttatttttaaacaaataaggcttaagaaaaagggggggtataaaattttttgttctgatgatatgatttttattataattcaattaataaatgttagtaatacattattatttatgaacatgtttgcaaaattttacggtgtagtggcgtttggggtattttcagtatattacagatttgttgcttttccccaacaagtgataagcttttcctcgtcgttaatatggattaactttcgtcaagtccatgttaataacagggttgctgccatgcaactattaaagagattattttttatttttactctattgcttattatatggggagggtgcgttcatttttttatagacaaagtcgtatatctttattcatccaaacctttagaatacccaggtgtgttgtgttttctaaatattatggtttgcttgatgttgctaaaagacttttcaagtataatactcaatgcattaactttatataaagaacaaatgataatgaatgctttactttgtttactaaacgttatttttttctttttttataatgaaacgaattttgataccatatatctaatcttcgtttcactgttaacattgatgtttgtatttgtaaatttatcactaattagaagcaggctctga

SEQ ID NO: 18930 - DNA, 552 bp, Escherichia coli
atgaatcgcacatccctgattaaattaattcatgtcgcccgtcgtgatctacaactcgacgatgacacttaccgcgcctttctggtgcagtgcacaggcaaaaccagttgccgcgaactgtccgtcgcacaactggaacaggtgctcgatgccatgaaagagcgcggttttaagaagcagaaaaaacatccccgccgtcgctttaaggggcatgtcacaccacgcgagaagatttacaaaatctggcagcagatgtttcttgatggtttcgtttccgatatcagcgacgccgcgctggacaaatacgttgaacgcctgacggccagacgtaatggcggtcagggtgtttccactctggcctggtgtcacggggaatcgttgcaggttgtgctcgaaacgctcaaacagtggcatatgcgctgcatccgggacgcctttgcccgacatggtgtgcctttacctgtgagcgaaaccgggcgggagctgcgcggctatgatgcactgaccagtgcgtatgcccgcgcacgaaacagcgggagaattgctgtatga

SEQ ID NO: 18931 - DNA, 267 bp, Escherichia coli
atgaaaaacagtgaacagccttatgatgttgcagggtatgtcattgcctcaaggttgctgatactccttgtcagaaaggggctgattaccgcagaggaaggcaaaacgatcctcgaagccgcagcaagcggagcggcagaggctccggcattgagaacaacgaataatcccatcctgcaaatatcacagctaatcactgataccatcagtttgttagaccaagattctgatgaatatcaaaagcctcagccatctgagcatccgtaa

SEQ ID NO: 18932 - DNA, 315 bp, Escherichia coli
atgaataaaccagagaataaagaaatgaaattcacaccagttgatattgatggcgtcatggctaatttaaagatgctggaacgtatgcacgatatcgttaaatatggtattgagcatgacctcaccgccagagaagtccggagcattattaaccgtgaaatgaaccaggtggaagctgccgtggcgctacaaaatgaagcagcccgcgaggaatacattcgtcgcaggctgggactatcaaataaagatattcttacggatgctcagatggctgaggcttttgatattcatcagaatcttggtctaacaaactga

SEQ ID NO: 18933 - DNA, 744 bp, Escherichia coli
atgaccattcgttcaaaaacctataagggcagcgggtttaatgaactgaagtttgacgatgcgacagggaaagaacaggtctacatccacgcgcagaagaacatgaacaccgaggtgctgaataaccgcaccactgatgtgataaacaaccatgccgaaaaaataggtaacaaccaggcgatcaccgttaccaataaccagatccagaacattggcgttaatcagatacagacggttggtgtcaaccaggtggaaacggtaggcagcaaccagattgtcaaagtgggttcaaaccaggttgaaaaggtggggatcattcgtgcgctgacggtgggcgtggcttaccagacgacggtaggcggcatcatgaatacctcggtggcgttgttgcagtcctcacaggtagggctgcataaatcactgatggtgggaatgggctacagcgtcaatgtagggaataacgtcaccttctcggtgggcaagacgatgaaggaaaacaccggacaaacagcagtttattctgccggtgagcatctggaactctgctgcggtaaggcaaggttggtgctgacgaaggacggaagcatatttctcaatggtacgcacattcatctggaaggagagtcggatgtgaacggtgatgcgccggtgattaactggaactgtggtgccacacaacctgtaccggatgcgcctgtgccgaaagatttaccccccggaatgccggatatgcggcaattttga

SEQ ID NO: 18934 - DNA, 261 bp, Escherichia coli
gtgataccgattggtgcgggcaacgaagtgaccgtggtgttccaggacggcttccagctgaaaaccgtggaagagatggcgttggagcgcacgcagaacagagcggaagaagataatccggaaagtccggctcctgttccgccatcagctgaaagtcatcttaacggctttaatactgaccagatgctgaagcagctgggcaacctgaatccgcagcagtttatgtccggcagccagggaggaggcaacgatggcaaataa

SEQ ID NO: 18935 - DNA, 186 bp, Escherichia coli
atggactctgttcgctgtaaaaactgcaataagttactgtttaaaggaggttttaagcatatagaaattaaatgccctcgctgtaaacgttacattgtcatatcgaatgccaaagagcatcccacggagctgtattgtgggaaaagagaagaaatcacgcattctgacaaaaccctgcgttattga

SEQ ID NO: 18936 - DNA, 471 bp, Escherichia coli
atgccgcagcttaaaggtgtgattaaaacgcccacaggagaaccgctgggcggcacaaccatcacgctgacctccctgcacaaccgtgcagggattctgaaaggtgttttcagccacgtcactacacagagcggggagtacgacttccccgttctgccgggcgtgtacagtgttcgcctgacacagagcgcacagcgcctttcagaaatcggcatcattcgcgtttatgaagattcacaggacggttcgcttaacgattttttgtcggtgacagatgcagatttgcgccctgaatctcttaaaaagttcgaagagattgcaatgcagatacaaaaaagtgcggaaagtgtcagattatatgcagaggaggtgaaacgggattgcgcaattaccctcgaaaacagaaaacagacagagagactgctgtccctgatagcagagcctctttctcagagtgccgcagaaagctga

SEQ ID NO: 18937 - DNA, 498 bp, Escherichia coli
atggttgcagtgacagtactggttccggcggtctggctggtgactgagatctccaccgtcccgtccggctctgtgattaccgtcggggcagtcgttgcgctgttgtccgccaacacgctgaccgtctgcccggcaagcgtattaccgttagcatcggtaaccttcacttgcagcgtgttcgccattgcgccgtcagccactgagttatcccgggtgaccaccagatccgcgatcttcgccgtcctgacatcggcgataaacatcacgttctggctcgcggtgctgttgttgatggttgcagtgactgcactgactcccgccgtctggctggtgacactgatttccaccgtgccgtccggccctgtgatgaccgtcggagacaccgttgcgccgttgcctgccgtcacgctgaccgtctgcccggcaagtgcattcccgaacgcatcggtcaccctcgcccgcagcgtgttcgccgtcgaaccatctgccacggcgtaa

SEQ ID NO: 18938 - DNA, 1260 bp, Escherichia coli
ttgatcgtattacttgaatccgctggtcatgttgtcctgaaagatatgatcatcgaatcagtatggaaaaatattattgtaagtgacgagtccctgacaagatgtatctattctttgcgctgcatttttgaaaaaattggctatgatcgttgcatagaaacaatctaccggaaaggttatcgtttcagtggacaggttttcaaaactaaaataaatgaagataacacttcagactattccatagctatatttcctttcaccacttcattgaatactctggatccattaatacttaatcaggaattagtgcaaaacatttcgaataaaaaaatcgatggcctttatacctatccgatggctgcgacaaatttttgtaatgatcacatatcgcaaaattcatttttgagaagattcaagccagattatttcgttacaggaagaataaaccagaataacgcggtgaaaactttatacattgaactgatcgacgctaaaaatcttttcctcatcgccagtaatcatcttcctgttgatgaactacataacacatcacaatttattatagataatatccttcaaacggtacataatccagagcgttctgtaagattagctaaaccggaccaaggttataagaatcattatttatcagatgaactgttggctggtaagaaagaactttacgagtttactcctgaaagcatttacagggctatggctatatttgatggattacaaaataaaagtgatatacagacgctaaaaatagaatgttattgtctgctagcggaatgccatatgtctttggcacttcatggaaagtatgaacttgaacttgctgctcaaaaagcattagagcttttacattatgtatcagacataaccaatgtcgatggaaaaattttagctattatgggactgataactggtctgtctggacaagcaaaagtatctcatatcttatttgaacaggctaagatacacacaactgatatagcctctctctactactatagagcacttgtcaattttcataatgaaagaattgaagaggcaaggatttgtatagacaaatcactacaactcgaacccagaagacgaaaagcagttgtgataaaagagtgtgtagatatgtatgtgcctaacccgctcaaaagcaacatgaaactctactataaagaaacttcgagtgaaagccatcgagttataattgacaacattttgaaactaaagcaactgacgagaatttgtatgcgataa

SEQ ID NO: 18939 - DNA, 336 bp, Escherichia coli
atgaaaatacagatgattactgatgctgatttaatggctgcaaccttaatttccagtggtatgtcagaacaagatgtaaattattttctggataatgttgtataccagcactttgagcaggccagagaaaatttaatttcagaaaagcgcatgatgattgctgaatcattaagtcctgcatggattatcgaagagttgcggggaatcattgccagccaggataaagtggcggcagttgccgcccttgatgtgctacagcgaatgagtaaagagctattcaacactgaattaatttttaaatccgggggacataatgagccgcacatccctgattaa

SEQ ID NO: 18940 - DNA, 552 bp, Escherichia coli
atgagccgcacatccctgattaaattaattcatgttgcccgccgggagttgcacctcgacgatgacacttaccgcgcctttctggtgcagtgcacgggcaagaccagttgccgcgagctgtccgttacacaactggaacaggtgctcaatgccatgaaagagcgcggttttaagaagcagaaaaaacatccccgccgtcgctttaaggggtatgtcacaccgcgcgagaagatttataaaatctggcagcagatgtttcttgatggtttcgtctccgatatcagcgacgccgcgctggacaaatacgttgaacgcctgacggccagacgtaatggtggtcagggggtttccacgctgacctggtgttatggggaatcgttgcagattgtgctcgaaacgctcaaacagtggcatatgcgctgcattcgggaagcttttgcccgacatggtgtgcctttacctgtgagcgaaaccgggcgggaactgcgtggatatgatgcactgaccagtgcgtatgcccgcgccagaaacagcgggagaatagttctatga

SEQ ID NO: 18941 - DNA, 363 bp, Escherichia coli
atgtgtttacagacagttccgtttagtataatacttgaaaacattgcgcttcgcgatgaagaaaacaatattctaacaattataattgtgattgccattttatactctttctttattttaacaattacacccggtatttattacatcaaaatgaatgactataagagtttatgcaataatataggggtattcgcctttatgtttctgacaataccattattatcttcaatgataattacttcattaccagtaatgtttacccattctgttattacattaacaggtataagtgacttccgtacacacaactacattataaaaacaaatgaatatccggaagagtttttttctaatgcaatatag

SEQ ID NO: 18942 - DNA, 189 bp, Escherichia coli
atgaatcagaagtggattgcattaataatatctgtattaacgccgacaagtatcatatcaggagttgcttcgattattctctggagttatttcagtcgccttgaccgattagatgttttctttgatgtgatgaacattgaaaacgtcttaacactgatttattttgcatccgtttttcattatttttga

SEQ ID NO: 18943 - DNA, 474 bp, Escherichia coli
atggccctgatggctctgtttgttttatggaaggacaacaccacgccggggaaattactggttaaggagattaacttcgtaagacaaacagcacctgccggacagttcccggtcagtgaatgctggttttcttcctctgattcttcaggcagatcagaaatacaggatatctgccattaccgcgcggctgatgctgcagattatgtcagagagactgaccggtcactgatgcaactggtcaccgcattctgggcaacgctggcacttatgtatatgtcgtttgcggcaggcaccgggaaatatccggtgcgacccggaaaaatgaaatgtatccgggtggtaaccgcagatgaacgtctgaaggacgtttatacggaagacgcttccctgccgggaaaaatcagtaaatgtcctgtttatcttcctgatgacagaacaaacagaaacaacggagataaaaatgaacatgcgtaa

SEQ ID NO: 18944 - DNA, 306 bp, Escherichia coli
atggcactctgtacacgacaagtatcagccagtgaaatcgccaggcgtattggtgtcagtcgtacggtattatataaatggaaagatgaaattatcagcaacagtgcttaccagactatgcgtaaacataacgaaccttccctggaggcagaacgcgatgcgttgcggaaggaagtcgcccgactgaatcaggaaatacgccgtcggcagatggaactggatattctgaaaaaagcggaggaaatcataaaaaaagacccggacatcagtatcagtcatctgaacatgctggcgaacgaccggtga

SEQ ID NO: 18945 - DNA, 489 bp, Escherichia coli
gtggatgatcttcgcgccgggatttttttcgaggaacgcttctgccagcaggccgacaatgtagtagccctcgataaactgccctttttcgtcaaacaggaaacagcggtcaaaatcgccatcaaaagcaatgcccatatccgcgccatgtttgatgaccgcattgcgggtgtcgtcgcggcattccggcagcagcgggttaggaataccgttggggaaatttccgtccggcgtgttgtgcactttgatcaattccacgggtgcgccgagggctttaaagcgggcttcgatggcgtcaactaccggacccgctgcgccgttcccggagttgatcaccagcttgagcggcatgaggtttttgacgttgatataaccgaacaggtgatcaacgtaagcgtcacgcagggtaatttgctgatagcgaccgcgtttggtttcatcgacgggaggaaagtcgttggcttctgccagacgctggacatcgcgtag

SEQ ID NO: 18946 - DNA, 549 bp, Escherichia coli; identical to SEQ ID NO: 18758

SEQ ID NO: 18947 - DNA, 597 bp, Escherichia coli
atggaaaatcaaaaattctccccggcctttgaacatgcgctgaattttattctgcgtcccgatatcgaaggcgtctatgtcaatgaccccacagacagcggcggtgaaaccaaatacggcatttctgaccgccgcgacggtgtgattgacggcaaaaccgatgtcagcggcgacggtaaaccggatacccgcatcagggatttaacccgcgaacaggtcgcgcagatttactggcgcgattactggctgcctgccggatgtgaccagtggcctgatggcgtggcgatgtttgtgttcgatgcagccgttcagcatggcgttaaaaaagctatcaggattttgcaggaagccgctgatgtggatgctgacggcatcatcggcccgcgtacccgtaaggccgtgagtctgtccaccccggactggttgctggcccgctgcattgtccgtcgttcccgcttttatgccgacatcatcaagtcaaaacccgcccagggtaaatacctgaacggctggtttaaccgcatggaaaagctgaccgacgcctgtctggaaatcatcgatacccctttaggcatcatgtccgccacgcgggggtga

SEQ ID NO: 18948 - DNA, 252 bp, Escherichia coli
atgatgaacatcgaagaactgcgtaaaattttttgtgaagatggcctctatgctgtgtgcgttgaaaatggaaatattgttagtcattaccgcattgtgtgtttgcaaaaaaatggggctgcgttaattaattttgtggatgcccgagtgacggacggatttatcttgcgcgacggtgagtttgtcacttcattacaggtattgaaagagatcggaataaaagctggcttttctgctttttcagaagaataa

SEQ ID NO: 18949 - DNA, 186 bp, Escherichia coli; identical to SEQ ID NO: 10006

SEQ ID NO: 18950 - DNA, 375 bp, Escherichia coli
gtgtcagacacacaccccgggacaacgcatcccgacaacaacaacgaccgcccctggtgggggctcccctgcaccgtgacgccctgtttcggggcacgtctggtgcaggagggcaatcagttgcattaccttgccgaccgcgccggtatcagggggcagtttagcgacgcggatgcgtatcatctggaccaggcctttccgctgctgatgaaacaactggaactcatgctcaccagcggtgaactgaatccccgccatcagcataccgtcacgctgtatgccagagggctgacctgcgaagccgacaccctcggcagctgtggttacgtttatatggctgtttatccgacactggcacccgcaaccacctcataa

SEQ ID NO: 18951 - DNA, 276 bp, Escherichia coli
gtgacttctgtttctatcagctgtccctcctgttcagctactgacggggtggtgcgtaacggcaaaagcaccgccggacatcagcgctatctctgctctcactgccgtaaaacatggcaactgcagttcacttacaccgcttctcaacccggtacgcaccagaaaatcattgatatggccatgaatggcgttggatgccgggcaactgcccgcattatgggcgttggcctcaacacgattttacgtcacttaaaaaactcaggccgcagtcggtaa

SEQ ID NO: 18952 - DNA, 396 bp, Escherichia coli
atgctgcagggcgtaatcccgcagccggtaataatggaccgtcatggcataacactccgtacgacaggcatgatgactgtacgtcatcagacaggcagcaatgccggcagcttccggactcatttctgcgcggttaccgttcatggcattgaacagtacccatgtttcgtcatcatcgtcatccggttcgggtgccataaatgccccgccgttgttcagggtgtacagattccagataccaccgcagtagtcttcgcacagacggtccatccagccgaagacacggggctccagggtcacccactgtggaatgaggccaaaatgctgcggccagaagctgatgcgctgttcatcagggacgagggtggcaaccaactgaggctggtcattccctga

SEQ ID NO: 18953 - DNA, 180 bp, Escherichia coli
atgaaaaacgcattgcagtttttgtttgttgcgttctggttgttcgcatcatgtatgcccatcatcttcacagcaaggtatatggaaaaaattgatgttttgatattaatgtttggacatataaatgccctttttttaggggtgttcatggcggtcatgtgcattgaatactggcggtaa

SEQ ID NO: 18954 - DNA, 261 bp, Escherichia coli
gtgctgtttgatggcagtagcgatatcactatcagcagcaccgattctggtgcagtacgtgatttcaggtataccagcgaagtgtttcacaatcccggtggtaacgaaatttcctgggtatttcgcgcgccttcaggttgtattttgtcaggtattaacgttcaggaaactggcaagagctctgcggataacatcggcggcgtgtattacaaacaaactcagatttatatcaatggcggatggcgcacggtatccggctaa

SEQ ID NO: 18955 - DNA, 234 bp, Escherichia coli
atgttgaccacaacaagccacgacagcgtgttgctgcgtgccgacgatcccctgatcgacatgaactacatcaccagtttcaccggtatgactgacaaatggttttacaggctgatcagtgaaggccattttcctaaacccatcaaactgggtcgcagcagccgctggtacagaagcgaagtggagcagtggatgcagcagcgtatcgaagcatcacggggaaccgcagtatga

SEQ ID NO: 18956 - DNA, 498 bp, Escherichia coli
atgaaatatcttccccttattcttttactaactgttactactgtacaagcggcggatacattccagcaaaaagtcaaagatgtttttcagaaaaaaacatccgttgactataccgactggtacggtaaaggtgatgctgccattgctgagtttaaaggatttaacttaggtgtatatcaggatttaaagacgtctgtgcgagataacgaaatcaacataaaaatgcagtatgttacaggaccggttcgtcccgatagcgacgactttgctcaaatgacgtctgctttatgtgaaactgtttttgaaccttttgttgtccctgattatgttcgcccgacatcatgggacgatgatactccatccccgctgaattttatgtatgtggataatttaaagcagacggaagatgatcctgtcgaaaaaacagtaaatggctggaagataaaaattgaacgttcagtaatgaagactacatgttctgcccgtaaagttaactga

SEQ ID NO: 18957 - DNA, 510 bp, Escherichia coli
atgtcagttttgcaagtgttacatattccggacgagcgacttcgcaaagttgctaaaccggtagaagaagtgaatacagaaattcagcgtatcgtcgatgatatgttcgagacgatgtacgcagaagaaggtattggcctggcggcaacccaggttgatatccatcaacgtattattgttattgatgtttcggaaaaccgtgacgaacggctggtgttaatcaatccggagcttttagaaaaaagcggcgaaacaggcattgaagaaggttgcctgtcgatccctgaacaacgtgctttagtgccacgcgcagagaaagttaaaattcgcgccctggaccgcgacggtaaaccatttgaactggaagcagagggtctgttagccatctgtattcagcatgagatggatcacctggtcggcaaactgtttatggattatctgtcaccgctgaaacaacaacgtattcgtcagaaagttgaaaaactggatcgtctgaaagcccgggcttaa

SEQ ID NO: 18958 - DNA, 480 bp, Escherichia coli
atgaaatactttcctcttatgtttttactgagcgtattttgcgctaatgcggcaaagctgccctctgaagaggtaatcaaaaaacgcctggccgaaaaagacctcattgcactaaatagctggaagcctcttaaagggggcgattcaattaagaacggtggaaccgaaactgctcacagcaagtttggattgtttatgattaataataaggtcgttagttcaacgacgactgtaaaagattttgatgataatcctgtaggcgctctgccctcctttgctgcatgttcgcgggttgttgaatctgtaattggtcaattaactgaagaacagcaggaacgagttattgacatggtggcttccgcagcaaaagttaaaggttacggactaacgtataagattctgggctttcacattcagacaaagtttctccctatggggaaaaatatgatgatagattgctccatcaaaggtgatgagtag

SEQ ID NO: 18959 - DNA, 186 bp, Escherichia coli; identical to SEQ ID NO: 10006

SEQ ID NO: 18960 - DNA, 258 bp, Escherichia coli
ttgcgcctgagcgttctgctgtggtgcactccccagcatctgcatggtgcccgtggtcttaacaagaatttcagtgacgtaacgggtgataccgttatcttcccagctacgggtacggagttgcccctcgatgtagacctgctcgcccttgtgcagatattcaccggccacttccgcgagcttgccgaacagcaccacgcgatgccattctgtctgctcccgtatctcccccgtctgtttgtcacgccagctttctga

SEQ ID NO: 18961 - DNA, 327 bp, Escherichia coli
atggcaggactggagcgtgaagaattccgggtgctgtatctgaataaccagaatcaactgattgccggtgaaaccctctttaccggcaccatcaaccgcacggaagtccatccccgggaagtgattaaacgcgccctgtaccacaatgccgctgctgtggtactggcacacaatcacccgtccggtgaagtcacacccagcaaggcagaccggcttattacggaacgtctggtacaggcactggccatggtggatatccggatgccggaccatctgatagtcggtggcagccaggttttctcctttgccgaacacggtctgctttaa

SEQ ID NO: 18962 - DNA, 321 bp, Escherichia coli
atgaacatgcgtaatattaatgttattacagcccgcgctgtgccggataaaaacgtatcagatgattttatgcatgctgttctcagtaactgcaccacaaaaatagttcttcctgcaccggagaaattcagtcctgaatcattgccgcacaattttaatatggctgctgtcggtgtgatgaagaagggaatgccgatgagcttattttcttctccgggaaatacagtggtctccggacatccctgtgcagggaaaacaaatctgacagcagagttaatttctgctgttgtggggagtaataaaaaaggagaagggcaatga

SEQ ID NO: 18963 - DNA, 411 bp, Escherichia coli
atgaacaaaattttaaaaccgtgtgactggctgatttgttcccgactgatgagaacgccatggccgctggccggactgacactctgcatgttcatcatcagcatgttatgtggctggcgatcgttcgtgttgatgttgttgtcctttgccggggtggtgttgttttcatacagcgcaagcctcgggaatgcgtcatttcgcctgctgcctgaggtccgttaccgggcttttggtcgccacatcatcgtgtggtcatgggtggtctgggcgctgggatatttctgctgcgtcttcggctcgctgatgatgatgtcaccggtgcatccggtgttctggctgtgtggtggcagttgcggcggtctgctctgtcttcagcgttatctgtatggaggtttcccgtggatccgttaa

SEQ ID NO: 18964 - DNA, 411 bp, Escherichia coli
atgcacagaatgaatagtctttttgttcgcgttatttactcccgctttatgttgtaccagtggtcgtttctggggctgtcggcagtactttttctggcgagctgttttgccggatggcgggcgtttgcggtcatggtgctggcatacggcgcgacactctgcctgattcacagtttctcgctgggcaacgtacctaatcgcctgcaacccaaaaggcgtttccgggccgcctcccttcgaattgtcgtgtggtcatgggtggtctgggccgttggtcttttcatgctgacattcggccttctttatctgaaggagccttatcagctggcgttctggctgggcggtatcttttgcgcggcactttataaacatcagcgcagttttcataagggggattcatggatccgttaa

SEQ ID NO: 18965 - DNA, 285 bp, Escherichia coli
gtgataccgattggtgcgggcaatgaagtgacggtggtgttccaggatggcttccagctgaaaagcgtggaggaaatggcgctggagcagtcacagagtacagcggaagagggtaacccggaaagccctgtgccgaatcttccctcggcagaaagccacctgaacggttttaacaccgaccagatgctgaaacagctgggcaatctgaatccgcagcagtttatgtccggagacaagaacccgcagggcggggatgccggcagggagggcggaaatggcgggtga

SEQ ID NO: 18966 - DNA, 459 bp, Escherichia coli; identical to SEQ ID NO: 17231

SEQ ID NO: 18967 - DNA, 435 bp, Escherichia coli
atggtgtatttcctgcgtgatgcggttgatgccggaatgctgacagaatgcaacggattttatgacgttccgcgccctcgtccgacgccgccagtaagacgaaacacaacggagcaccccgctgttgatgatgctcaatggtgcgcgttccgccgctctttgccctggctggaaggcaatgccattccggcactggcaaaagaatttgcgacaggcgtactgacctgcgagtcggtttacatcgttgcagaagtgggcgatgaaatgtgcaaacagggaatgccccgttttgtgatggcgtatatcgatatccggctgggacgttttatttgtggctccagtggctggaatatcaccgaccacgtcatgcgctatctcattcttgattattcaccggttccggcggcaacacaggaagccagtgagcatgattaa

SEQ ID NO: 18968 - DNA, 342 bp, Escherichia coli
ttgcccctaagtattcttggttttatgggaaaattcacgggtgtcttaatggaaaataaaaataaatccctgaataaaggggcaaagaacagaatgctaattccaggatttgtatctgaagttgcttttgatttattaattgaactctcttctgtgcacagtattaaaattattaatgctcttcatgattatctcgttttaggagatgacaggaaaattgcttgtgaacgatatggtgcaaacagtagttattttagtattgcgctgggccgtctttttcggacgaaccagatagtatcacagctcgcttcatattatggggagcaggaaaggtttttctaa

SEQ ID NO: 18969 - DNA, 354 bp, Escherichia coli
atgattgccaaccctacgcacattgccatagggatatactttaagccacatctttcacctataccattgatttctgtgagagaaactaatgaggtagcattagccgtaaggaaatatgcaaaggaaatcggaataccaattattacagataaaaaattagcacgaaaaatttatgctacccatcgtcgctacgattatgttagcttcgaaaatatagatgagatcttgcgtcttctgctgtggcttgaagatgtggagaatgctggacaacctgttccagatgaactgctcccctcagaagataaattcaaagaaggtgaagacacaaaaagcgagaataaagacaataattaa

SEQ ID NO: 18970 - DNA, 300 bp, Escherichia coli
atgccggtgcagaccgtcaccgcgaccactccgtccggcagcagacctgcggtgacggcacttccggagcagaaattgctggcaccacgcccgctgtttaccgctgcccgggaagtgaaaacggttgttccggtcagttcagttacgccggtaacgcctccccgtccactgagaacaggcgagcagacggcagcattatggatagcgccttatattgataatcaggatgtttatcatcagccatccagcgtgttctttgttattaaaccgtctgcgtggggaaaaccacgtattaattaa

SEQ ID NO: 18971 - DNA, 174 bp, Escherichia coli
atgccaatccgtgatcgaatagagcggaatacgcatctgattactgctgccctgattattgtctgttttgttgttctcctgcttatgccttttccgggcgtccccctggcggggcgggctgtcgtgaacggagccagcgaagctgtctccgccctgacgggcttccatccctga

SEQ ID NO: 18972 - DNA, 129 bp, Escherichia coli
atgcagatccacgaccagcgcgaacggcagcatgatacaaaacagataaacggtacgatgcaaaatcagggtgtaggcaaagggaattggcgtgtaggcaatgcgctcgcagcctgccagaactgctga

SEQ ID NO: 18973 - DNA, 645 bp, Escherichia coli
gtggcagatctcgacgatggttatacgcgcattgcaaatgagttgctggaagctgtgatgctggccggattaacacagcaccagtttctggtcttcctggctgtcatgcgcaaaacatatggctttaataaaagactggattgggtgagcaacgagcaactttccgaattgaccgggatattgccgcacaagtgttctgctgcaaaaagcgttctggtaaagcgtgggatttttattcagagcgggcggaatatcggcattaataatgtggtcagtgaatggtcaacattacccgaatcaggtaagaaaaataaagtttacctgaaagaggtaaatttacctgaatcaggtaagaaaagtttacccaaatcaggtaaaggcgtttacccgaatcaggtaaacacaaaagacaaactaacaaaagacaatataaaacctttttcgtccgagaattctgacgaatcctctgaccagccagaaaacgatcttcctgtggtgaaaccggatgctgcaattcagagcggcagcaagtgggggacagcagaagacctgatcgccgcagagtggatgtttgacatggtgaagaccatcgcgccatcagccagaaaaccgaatttgcagggtgggctaacgatatccgcctga

SEQ ID NO: 18974 - DNA, 480 bp, Escherichia coli; identical to SEQ ID NO: 3493

SEQ ID NO: 18975 - DNA, 1518 bp, Escherichia coli
atggatatcattattgtaccccgagaccaacgtattcctgcctcaggcattagtacggcttacttgcatgtggatcattggaatgacttttcattcattacaatgttttacatgtatctgtttgatcagaaaggtgaacgccatgaaattgggaatgtcaagattggttttcaaggacaaacaactcaacaatcaacttactccacattaggggacaggtttaaaattctcccagaaggatatttttccgttggtcaggatgtcgactattatcagaggatttcaaatttaccagaatccgtcaaagtttcgttacttgaggcgctcaaagatattgcttatacgccagaacttatagatttcgttaagaatgaagcggtctttaaaacgtctttgcttcggtatgttagcctgtctgttattaaaggacagtttgcgcgagtgcttgagggaaagagtccactgactaattttgagtttaagttcattcgccctgcacaagacaaaatttccgatattgaattatcatttaaggtaaaagtaggagaaaaaccaagtaccaatattcatgcgatcataggtcgtaatggtgtggggaaaacgacgattctaaatggaatgattgaaactgttaccagtaaaggtacgtcgaacgcaaaattttatgatctggaggggtggagagaagacccgattgataatgattactttagtagtttagtctctgtgtcatttagcgcattcgatccattcgagccaccaagtgaacaacctgatccatcaaagggaacttgctacttctatataggtttgaaaaaaaaaggagagtcgctgaaagggctaaatgatattcatgaagactttctagaagctttgacgctatgctttagccagcatcctaagcgtgaaagatggctgaaggccattgatactttggagtctgatgaaaattttgcaagcatggagctgaaaaatctagcggaatacaatgatgagatgctcgttagtaatgcacggaaatgtataaaaaggatgagttccggtcatgcggttgtgttattaacactcacacgtttagtcgcaacggtagaagaaaaaacgttagtgctaattgatgaaccagagagccatcttcatcctccgttgctgtctgcttttattcgtgcgctgtctgatttgctacttgacagaaatggtctttctattattgctactcactcacctgtggtacttcaagaggtccctaaacgatgtgtttggaaaattaatcgttctagattatctaccgaatctcgcaggccagacattgaaacatttggtgagaatgtaggaatcttaacaagagaggtgtttggtcttgaagttgtcaaatctggttttcacgatttattagtccaatcagttaagtcaggtggaacatatgaggagatagttgatgagtatcgtaaccagcttggtgttgaagctcgagctctattaaaagcgcttgtcacacacagagatcggagtgttaagtaa

SEQ ID NO: 18976 - DNA, 1749 bp, Escherichia coli
gtggactggcttcttgatgtttttgctacctggctctacggcttaaaagtaatcgcgataacgttagcggtcattatgttcatcagcgggctggacgatttttttattgatgtcgtctactgggtacgccgcattaaacgcaagttgagtgtttatcgccgctacccgcgaatgagttaccgcgaactgtataaaccagatgaaaaaccgttagcgattatggttccggcgtggaatgaaacgggcgtcatcggcaatatggccgagctggcggcgaccacgctcgactacgaaaactatcatatctttgttggcacctaccccaacgaccccgatactcagcgtgatgttgacgaagtgtgcgctcgcttcccgaacgtgcataaggtaatctgcgcgcgtcctggccccaccagcaaagccgactgtctgaacaacgtgctggacgccatcacccagtttgaacgtagcgccaatttcgcttttgctggttttattctgcatgacgccgaagatgtgatttcaccgatggaattgcgtctgttcaactatctggtcgagcgtaaagatctgattcagatcccagtgtatccgttcgaacgcgaatggacgcacttcaccagcatgacctacattgatgagttttcagaactgcatggcaaagatgttccggtgcgtgaagccctcgccggacaggtgcccagcgcaggcgtcggtacctgtttcagccgccgcgccgtgaccgcactgttagctgacggtgacggtattgctttcgacgtgcagagtctgactgaagattacgacattggcttccgcctgaaagagaaaggtatgacggaaatttttgtccgttttccggtggtggacgaagccaaagaacgcgagcagcgtaaatttttacagcatgcgcggacgtcaaacatgatctgcgtgcgcaaatatttccccgataccttttcgactgcggttcggcaaaaatctcgctggatcatcggcattgttttccagggctttaaaacccacaaatggacctccagcctgacgctgaactactttctctggcgcgaccgcaaaggggcaatcagtaactttgtcagcttcctcgcgatgctggtgatgatacagcttttgctgttgctggcatatgaaagtttgtggcccgatgcctggcatttcctttctattttcagcggcagcgcatggttaatgactctgctgtggctaaactttggcttgatgattaaccgcatcgtgcagcgggtgattttcgttactggctactacggcctgacgcaggggctgctatctgtcctgcgtcttttctggggcaacctgattaacttcatggccaactggcgcgcgttaaaacaggtacttcaacacggcgatccacgtcgcgtcgcgtgggataaaacaacgcatgacttccccagcgtgactggcgatacccgctcgttgcgtccgttaggtcaaatcctgctggaaaatcaggtcatcactgaagaacaactcgatacagcactgcgtaatcgcgtcgaaggtctacgcctgggcggttcaatgctgatgcaggggctgattagcgccgagcaactggcacaggcgctggcagagcaaaacggcgtggcgtgggaatccatcgatgcctggcagatcccttcctcgctgattgccgaaatgccggcctccgtggcgttgcattatgcggtactgccgctgggtgatgctgccaacttactgatttag

SEQ ID NO: 18977 - DNA, 825 bp, Escherichia coli
atgatgagaaaatatttcccgcttgaggcgagcgagcgtttatttgttgcagttgaagaagatgatgtcgttgatgcacaggtcagtttgccgccgactatcgcactaagttgtaccaccgaaatcatccatgataattacgcgttatgcctgcaattctggctcaatggcgtcaatcgccaggagttactgcgtttaatatgcaaacaggccaaaggcgatgagctgactgctgatgagcgcaaacaatttaaatacatgcgagcgcgctacaagcacctgcgttttgcgcaacggctgtatttaaagaagcatcaggccggatttttattcggcaaaacgaccgtttttttggggcgttttcaggacggttttcgtaacggtaagaaaaatattgtgtcgtattacggcaacttgttacgggtttatttaagctctccggtctggtcgttggtgaactattcattacgccatagccagttagaaagcgtaagcggttttattgcctatcggcaaaagcaaatgcataccctgaaagagataattgccaaaccgcgactcaccggcagggaatttcatgatgtgcgaaaaatcatcagccagcaggtttcttattacgacaccttaagatcgcttgatcctgaaaataaagaggcgttacagatttcccgcttcctcgccgccattaatggcctgatgggggataaacacgacgacatggtggcggatgatatggaaaaccgccagtcgtatgatgcaccggtggcgctggatagcgatattcgccagcgcttagagctgctgatttcgcgttttccgctataa

SEQ ID NO: 18978 - DNA, 573 bp, Escherichia coli
gtggttccgggattaaaccgtctccggccccgttcggtttcagggcctgccatcgtcatgaccgtggctgttgtggttgcgctttgcacgtttattcaccgtaaaccggcattgctgggcgttgaaccgggtagcccacagcaaatgtactggatggctggcgtgattgccgcaggcgtggtctttctgattatcatgggggtttatcatctgctgaaccgccacgctgccgtgcagaactttgaactccgcagacagcttgccgccggagatgactatcgtgcggtgacgacaaagaaagccgacagccgtcatccggcaatggtggaactcgccgccttcctgcgcgaccgctacggcccattctggcggcgtaaagtccgcctgctgctggtgaccggcgagcctgaagaggcagaggccatcgcgccggggctgaccgggcaacactggctggagggcgaccacacggtgctgatatacggcggcaggccatcagcggagcctgatgtcgcgctactgaccgccttaaaaaaactgcgccgcagccgtccgctggacggcatcatctag

SEQ ID NO: 18979 - DNA, 225 bp, Escherichia coli
atgaaaaaggtattcgtaaaatctcttctggtagccgcaatgttttccgttgcaggttctgcattagcagtacaaaaagatattactgtcactgctaatgttgatgctgctctggatatgactcagaccgataactctgcgctgccgaaagcagtagagatgcaatatctgccgggtcagggtctgcagtcttatcagggtgatgctgccaacttactgatttag

SEQ ID NO: 18980 - DNA, 486 bp, Escherichia coli
gtgagcgaaattaattaccaggcactgcgtgaggtggcggaacgtgcaattccagcaatggaacgcctgttaatgttgccagctgatgatgacttgttaagtgaacaggaacttaaagattacggtgtggatattgatgcgctcaacgccttcaaatttctgaccggaccagaaaccgtgctggcactgctggatgaacgggaaagaaacctgcaatacatcaaaagccgcgatcaggagaacgaggatattgcgctaacggtagggaagctgcgcgttgagcttgaagcagaaaaacagcgggcaaaagttctatttatggaaaatgctcggcttaagtcaggcatagccggtctgatacacctcggtattcgatatgcagatgttgaggtcatgaaaattgctggagatgcccagctttctaccccatgcactgacagcatcataaacagcattgcaacaggcattcgcatcaaaggagagtga

SEQ ID NO: 18981 - DNA, 507 bp, Escherichia coli
atgagcatcagaacctacgcagtgaattgcaatgacgcatggctaaacaccgaaggtgatgacatctccggctcatacgttaagtacaaagaccatcaggaagtggttgccgctcttgaggccaagtgcgcggcgctggcagcggagaatgcgggaataaagtctgcaattccagaatcacgggatattgaggatgacaatgacaatatggatgacgtatctctcgcggaagacttcgggttcaatcatgcaatagaacggatgaggagacagatacctgaaacgccaaccactgatgctttcctggctgaagtccgggcgcagggggtggacgctgctatagaagctgcaaaaaatctggtggcccaagaatatgagtataaggatttcaaagcggcgcagagtgattgctgtatgtaccctggttcagacctggtagggaaggttgaaatgactgagtggttagttgactttgctgcccagcttcgcaaaggaggcaaccagtga

SEQ ID NO: 18982 - DNA, 690 bp, Escherichia coli
atgaataaccagtatttacagtttgttcgtgagcaactcattatcgccaccgccgatttgagtggggcaacaaaaggtcagcttgaagcctggcaggagaatgccatgtttgatacagggcgttacagacgtaaaaaaatccggtaccgcgataaggtcactggaaaaatggtaacgctggataatccaccgatcccgggaaagcaatcgctggcgaaaggttcatcaattgccctagtcagtccggttgagttttcgacatcatcatggcgacgcgccgttctgtctcttgaagagcatcagaaggcgtgggtactgtgggtatacagtgaaaatccgagttgggattatcaggtggtcattgcgaaatgggcgtgggataagtttcaggtgcattttggcaccagaaaaattacagggaaaacgcttgagcgtctgaagaaattaatctggctggcggcgcaggatgtcagggggaggattactgggtgtgacgtctaccagcgacaggaacttgccagactgtgtggagttaagtcagacaactggagccacaattatgcgcactactggcgtgatatgtgcgacatttttaagaacctcgacaacgaatctttgatttataccatgaaaacaagatcgcaacaaaaagcgaccttttcgcggcgggttattgcaaaagtcaattaa

SEQ ID NO: 18983 - DNA, 228 bp, Escherichia coli
atgccgaaatatctaacacttgccgctcgcgcgatcctctcacctgagaagatcatcaaaaaaattgcagatatagcttccatgtgtgatggaaaagaagctaagcatgaaagtgacaagtttttcattgatagtaatggttcgatggttttgaatcgcaacaacgctgatgtgcaaaaggctttcgcagccaatattaagggattgagtactaagaagaagggttag

SEQ ID NO: 18984 - DNA, 798 bp, Escherichia coli
atgtgggctgcgctgattgttattgttttagtttgtggttatcactataccaactgccatttgccgtcacgataccgtcaaagcaaagcgatcggttggaatgcatactttgatgttgcactgaaaggtggtgagtttctcataagtggtattcttatcgctgccttattggttgttgttctgtacgctggaatgtcactttggaacattccagcgtacttgtttggttggtacgctccctttactttcgcccatgactttctcaaaatgcaagtgtttgggttgagcatgttccctgctatgtcgatagctttcactattattgtaagtatcgggaaggcatcagaggcaaccaaaaaccataaagacccacaaaagcgcaaggctatttttgaagaaattgcggctcatagtgccgtggaaaatatccttcttgaatcagttgagcgtggattgttattgttggttacactgaagtctcgcaaggtctatgtggggatgattgatgaggcacgtttcaatcagttagatactaacacattggtgctaatcccttttatgtccgggtacagagataaagatactctgactttttgtgttgagcataattatgtggactactaccttagtcagggtatcacattaacttctgagccattgtcagtttatcagtttaggcatgtgttgcccttcgatcagatcgaatctttttcgctgtttaatgttgaaacattcgagactttcaaggcaggtattgaagggaagaaggccactgaagtacagaatcaaacaagttaa

SEQ ID NO: 18985 - DNA, 1317 bp, Escherichia coli; identical to SEQ ID NO: 3114

SEQ ID NO: 18986 - DNA, 156 bp, Escherichia coli; identical to SEQ ID NO: 7036

SEQ ID NO: 18987 - DNA, 1656 bp, Escherichia coli
atgccatctgctcgtctgcaacaacagttcatccgcctgtggcaatgctgcgagggtaaatctcaggagaccacgctcaacgaactggcagcgttactgagttgctcgcgtcgtcatatgcgcaccctgctcagcaccatgcaggatcgcggctggctgacgtgggaagcggaagtcgggcgcggtaaacgctcgcgtctgacattcctctataccgggctggcgcttcagcaacagcgggcggaagacctgctggagcaggatcgtatcgaccaactagtgcagttggttggcgacaaagcgactgtgcggcaaatgctggtttctcatctgggccgcagcttccgccaggggcggcacatcctgcgcgtgctctactatcgtccgttgcgtaatctgctacctggcagcgcattgcgccgttctgaaacccatatcgcccggcaaatcttcagttcgctaacgcgcataaatgaggaaaatggggaactggaagcagacatcgcccaccactggcagcaaatatcaccgcttcactggcgtttctttttgcgtccaggagtccattttcaccatggtcgtgaactggaaatggacgatgtgatcgcctctttaaaacgaatcaatacgcttccgctctattcgcatattgctgacattgtgtcgccgacgccctggacactggatatccatctcacgcaaccggaccgctggttgccgttactgctggggcaagttccggcaatgatcctgccgcgcgaatgggaaaccctcagtaactttgccagccatcccatcggcaccggtccgtatgcggtgatccgcaacagcaccaatcaactgaaaattcaggcattcgatgacttcttcggttaccgggcattaatcgacgaagttaacgtctgggttctgccggaaattgccgacgagccagccggagggctgatgctaaaaggtccacagggcgaggaaaaagagattgaaagccgcctggaggaaggttgctactatttactgttcgacagccgcacccatcgaggggcgaatcagcaagtcagagactgggtaagctatgtgctttctccgacgaatctggtctatttcgccgaggaacaataccagcaactgtggttcccggcttatggactgctcccccgttggcaccatgcccgcaccataaagagcgaaaaaccggctggtctggaaagcctcaccctgaccttttatcaggatcacagcgagcatcgggtgattgccgggatcatgcagcagattctggcaagtcaccaggtcacgatgaaaatcaaagagatcagctacgatcagtggcatgaaggagagatcgagagcgatatctggcttaacagcgccaactttacgctgccgctggatttttcgctgttcgcgcacttgtgcgaggtgccgctgctccaacactgtattccgatcgactggcaagccgacgccgcccgctggcgcaatggcgaaatgaacctggcgaactggtgccagcaactggtcgccagcaaagcaatggtgccgcttatccaccactggctgatcattcaggggcaacgtagtatgcgcggcctgcgcatgaacaccctcggctggttcgattttaaatcagcgtggtttgcaccaccggatccatga

SEQ ID NO: 18988 - DNA, 1272 bp, Escherichia coli
atgagttggttattgattattccgctaatgatcgtctgtttgtttctcaacattcgggtctatctggcgatgtttattggcatcatcgcttactttttattcttctccagcgtaccgattgaaattgccgtgcaaagactaatcgcgccaacgcaaagcccatcattgctggcaattccgttttttatcttgctcggcacactaatgagctacaccggcattgccgaacgcatcctgcacattgccaacgttctggtggggaaaatgcgcggcggactgggcgtggcaaacattctcgtcagcaccatgatgggcggcgtcagcgcctctaaccttgctgacgcggcgatgctgtcgcgcatgatggtgccggagatggagcgtaaaggctacaatcgcgcgtttgccgccgccattaccgctggtggctcgttagtcaccccgatcataccgcctggaatagccctgattatttacggtctggttgccgacgtctctatcggaaaaatgtttatcgccggactggtacctggtttgctatgcgcagtcgtactgatgtttaccgtctaccttgtcgcccgcaaaactaacgctaaaccctcgcgtgaaagctggcctacgggcaaagaggtggtgttctcgctgggacaggcctggcctgcgctgttcctcatttttgctgtggtgggtggtattcgcgctaacattttcaccccaacagaagcaggtgcagcagcggtgctaatcgtgctggcgattggcttttttatctatcgtgaaatgcggatttctcatgtcgtcaaagcattgggcgaaacggcacgcgcaaccgcatcggtgatgctggtaatcatggccagcgccgcattgggatggattttctcaatggaacatgctggtgtcgcagtggcgaattttgtgacttcgctgaccgaaaacaaatacatgttcctgttgattatcaacatattgctactgacgctggggatgtttctggaaggaaacgccattttgctgatcctggtaccactattaaaaccggtggtcgaacactttggcatcgatccggtgcattttggcatcatcatgatcttcaacctgtcgattggcgcattcacgccaccggtaggtaccgtgatgctgctggtatgtaatatcacgcaagtttcggtgggaaatttctttaaacaatccctgcccctactggcggctctactgttaatgctaatgctggtgacatatatcccggcgatttcactgttcctggtttaa

SEQ ID NO: 18989 - DNA, 1977 bp, Escherichia coli
atgaaaaaaataacttctgatatgacagaactacaatcaatgaatatcactgaagataatatcagcaaacttaactctttgtttcctgaagcatttaatgaaaacggtattgattttgacgttttaaaacagctcttgggtgaaaatgtagacgacaaagaagagcgctatggcctgaactggcatggtaagcgtcaggctcgtcagcttgctcttaccccttcccgtggcacattacgtccatgtaaagatgaaagcgttgattgggataacactaaaaacgtcatgatcgaaggtgataaccttgaagtgttgaagcttcttcaaaaaagctacgctggaaaagttaagcttatttacatcgatccgccttataataccgggaaagattttgtgtatccagataacttccaagataacatgaaaaattatcttgaaatcactggacaaactgaagatggaaatcgcttaagcacaaatacagaaaccagtggacgttatcacactgattggctaaatatgatgtaccctcgcctaaaattagcaagaaacttacttgccaactctggttttatttttatatcgattgatgaaaatgaacttcacaacctatgtggcatatgctttgagatttttggagaagaaaatttcatatcccttattgctaatactaacaatccaaaaggacggtctgacgataaattcatagcaacagctcatgaatatatattagtaatggcgaagaacattaactatgcaaaaacctatggctttgagcctgacgataaaataacaaagagatataataagacagacgaaaacggtgaaatattccgtgacatagatttacgtaaaactggtgatgctgaccgtagagaagatcgaccagatatgttttactatttttactatgatcaaaaaacaaacgaactatttatatctagagaccagaaaaaaaatgatttaattgaaattaaaccaattagagatgatggtactgatggacgatggcgatggggttttgatacagctaaatcgaaaattgatagtgtttatgctaagttcatgcccacaaaaaaaacgtggggaatcatggagaaagactatttatcaaaaagagatgcaataaaggctacctcttcatggacacataaagatgtaaatagtgaaagaggtagtgaacaatttattgagctgggattcgaaaaagaagttttttcaagacctaaacctttgggtactcttttacgtatagtagaaatagctacacacccaaatgaaaaaggtatagcacttgatttttttgggggatcaggtacttttggtcatgccgttttcatggccaatgcaacaaagaatagaaagataaattttatcattacgcaactaccagaaccagttgttccagaaacaaaggagcagattgttgctgcaagcttcttaaataaaaatggaatgccattaaaaatttctgaaataactaaagaacgccttcgccgagcaggtaaaaaagttcgtgaagacaatccagaatggaaaggtgatgttggctttcgtgtgtttaaacttgatacatctaacatccgtccgtgggaagcgactgctgataccctttcacaacagattgatgcctatgtaagtccaatcctcgaaggccgtagtgaagaagatttactcacagagttgatgcttaagcgtggcattgacctgagtgtagacattgaaacccgtcagtttgatggattaaccgtttcttgcgttgacggtggcaaattgtttacctgctttgctaaacaaatccctgcatcttcagtagaagaactgaccaaggggatcatcgactggcataagagtttaaaagttgggaaagatacggtctgctatttccttgatgatgcgtttgaaaataacgtcgctaaaacaaatctttgcgccattctggaacaacacggcctgactaacctgcacagcctgtaa

SEQ ID NO: 18990 - DNA, 222 bp, Escherichia coli
atgaaaattatcactcgtggtgaagccatgcgtattcaccaacaacatccgacatcccgtcttttcccgttctgtaccggcaaataccgctggcacggcagcactgaaacgtataccggtcgtgaagtgcaggatattcccggtgtgttggccgtgtttgctgaacgtcgtaaggacagttttggcccgtatgtccggctgatgagcgtcactctgaactga

SEQ ID NO: 18991 - DNA, 1233 bp, Escherichia coli
atgattacacacaacttcaataccctggacttactcaccagtcctgtctggatcgtttcgccctttgaggaacagttaatttatgccaacagcgcggcgcgactgttgatgcaagacctcacgtttagtcagctacgaaccggtccctattccgtctcctcacaaaaagaactgccgaaatacctctccgatctgcaaaatcaacacgatattatcgaaatcctcaccgttcagcgtaaagaagaggaaacagcattaagctgtcggcttgttttgcgagagctgacagaaacagaaccggtgattattttcgaaggtatcgaagcaccggcaacgctgggtttaaaagccagtcgctcggcaaattatcagcgcaaaaaacaaggtttttatgcgcgcttttttctgactaactctgcaccaatgttgttgattgacccctcacgagatggccaaatcgtcgatgctaacctcgccgcgctcaatttctatggttataaccatgaaacgatgtgccagaaacatacctgggaaattaatatgctcgggcgtcgcgtcatgcctatcatgcatgaaatctcgcatttacccggtggtcataaacctttgaattttgttcataaactggcggatggttcgactcgtcatgtgcagacctatgccgggccgattgaaatttatggcgacaagctcatgttatgtattgtgcatgatattactgagcaaaaacggctggaggagcagctggaacatgctgcccaccatgatgcgatgaccggattactgaatcggcgacagttttatcacattaccgagccaggccaaatgcagcacctcgccatcgctcaggattacagcttgttgctcatcgacaccgatcgttttaaacacattaacgatctctatgggcattctaaaggtgatgaggtgttatgcgcccttgcccgcactctcgaaagttgcgctcgcaaaggcgatttggtgtttcgttggggaggcgaagagtttgtcttattgctaccaagaaccccactggataccgcgctttcgctggctgaaactatccgcgtaagcgtggcaaaagtgagtatttcgggcttaccacgctttactgtcagcattggtgtggcgcatcacgaaggaaatgaaagcatcgatgaactgtttaaacgcgttgatgatactttgtatcgagcgaaaaatgatggacgcaaccgcgtgctggcggcataa

SEQ ID NO: 18992 - DNA, 318 bp, Escherichia coli
atggccataagcatcaagggtgttaataccggtgttattcgcaagagtaataatttcattgcactggcgctgaaaattaaagaacctcgcaataaagaatcgttgttctttatgtctgccatggaattgcgcgaccttctgattgcgctggaaagtcgtctgcatcaaaagcataaactggatgctgctgcacgccttcagtatgaacaagctcgcgataaagtcattaagaaaatgggtaatgactccaacttattgatagtgttttatgttcagataatgcccgatgactttgtcatgcagctccaccgattttga

SEQ ID NO: 18993 - DNA, 426 bp, Escherichia coli
atgaacggtataaaaacggggctggggatcacgccgggtgagcacattatcagtgccgactctgcgctcagcagaaatatccggcagtgtttctgcctttcctgccatggccggttgattctgcagacagatgctcagggggcgtggtttgagcatgatttacatgccctgagtgagcaacagaaggcggactgtgtggtgctgaatccggagaagtcccacccttacattgaggatatggcgatgtttttatcgccattaccggtcgtgctggagtggcattgtgtgatgtgcgggcagcattttcccgggaaaaagttctgtgaagcctgtggcacggggatctattccagagcggtatgtacaaagtatgtttacagctaccagccagacttgttccaggactgtggaagtgcgagcacttaa

SEQ ID NO: 18994 - DNA, 1152 bp, Escherichia coli
atgtatatctgcgaaagtcacattgttgaatcaaatataaaaaaactaattttttcgcaaaatatacgaggtatttgtgctttttgttgtgcagatactgtttgtttagatactgattcttcagaagtacgtaatttgttgaaagctattctgagatatcattatgatgaagtcgattacaatactcattttggaggggagtattacccgagttttctattggaagatgattttattttcaccaaggatatacaggagcatgatgaatcttttggggaactcgatagcgaattgtgggatatggcatttgatagtgagggaataaatatttatgcaggctatggatctgatggtctatataatacgccatatatgtctatcagaaatgcacatcagccatttttagattctctgtcaaaacagctttcagaaaagaattaccatgattttgaaggtgagctaagaagtattataaaaggttatggtgatattttttcgaagataatagaaggaagttctgtggtatatagagccagagttgggactgctggctataaaacagcacttagaggatttagccgtgaaggaaagaaaatatttgttccatttaaagataaggaaataggagccgtgccaccactaaaggctactgctggcagggctaatagagcaggcgtttcttacctttattgtgctacagatagttatactgcaattgcggaagttcgacctcatccaacagatgtggtttcaattggtaaatttagagttgcaaaagcattaaaggtattcgatttttcttatcctaattttttagagtttattgagagtgatgaaagtttattatccatgataccatatgcaaagatggcaggtatttttaatactgcaactccaccttccttagaaggaagatatagtgtgtcccaactaatatctgattgtataaggaaagaggggtatgatggtatacaattttcaagtacagttggtaaaggtaagaacttggttgtttttaatccttcatgtatggaatttatagatggttcatcaaaagtaatagaaattgacaaggttcagtatatttacgaggaaaagcaggttgttggtatgaatgatcaatgggagatttattacgatgaagttgaataa

SEQ ID NO: 18995 - DNA, 549 bp, Escherichia coli
gtgcaaataaccgaagtattaatttcagagccgggagacatccggcgttttattcaacaggctgttgaccactggccgcgtctgctggcagtccacttcatactccattctacagaaggaaacctcaacgggcagcagattcatgcattctgtacttccttttaccgacaggtgcacgaacgtattactgagcgtaatcacacggccagtccatcctcgccggtggtattacgctggttgcgggaacaacatggaggagcaacaatacgatgcctgttgctgttcagccaggagcttttctgccatccgcgagccagtgtgacagttgatgaagaatgttcacaactggtggatttactacaacagacctggcaggtgataagcgctggcggacaatgccgggtggaaaagcgttttcaggtcgtccggggtgatacatctggccagtatgttgcgttaaaaacagtcgcattgtctctggggttaccggttgtgaccgccattacccatcgtccggtacagcgctgtacattgattacagctcagtga

SEQ ID NO: 18996 - DNA, 480 bp, Escherichia coli
atggtaacgctgaccattaaccgtaaaccgcagggtattttcagtaagtcaccggcaacgccgctgcaggataaaacgaacacagtacacaacgagaagcctcttcaggtgaggaatcaaacaccatggcgacatatgacaaaacgccagcgcaaaaaccgtaagcgtataaatcgtcttgtggaactctggcctgagttattcaaccgggaaaaaccaaaaccgcttaaagtggggataactgacgacctgatacaggatatcgccatcagagaactggcgtttggcgcaggtgcattacgcgcggcagtagcgtcttatgtgcagtctccgcgctattaccgtgcgttaatggctggcgacgcccgttatgacctgaaggggcagccgtgcggggaagtgactccacaggaacagaaagaggcagagacccggctaatggtgctgaatgaccgacgaaaagccagaaaacctcgttga

SEQ ID NO: 18997 - DNA, 207 bp, Escherichia coli
atgggcgacatacctggaaggtttcacctcagacagagagccaggaacaaaaacagtgtgccggagcaaaggaccgggagcttaccggcaattcaacagcggcagaataatctttatgccatgtatactccggatgttcacttatcagcggtcatggctgaacatggttgtgcaggtgaatataatcctggtgaaaatgccttctga

SEQ ID NO: 18998 - DNA, 360 bp, Escherichia coli
atgcatcagcctcccgttcgcttcacttaccgcctgctgagttacctggtgagcagtctgcttgcgacgcagcctgtgctgcccgccgttgccgccacgctgacgccagtgggcaatacctccacagataaagcagcaaacggcgtaccggtggtgaacattgccacgccggacggggccgggatttcgcataaccggtttacggattacaacgtcgggaaggaagagcgtgactggctcattcgtgacgggctgtggtacatcagcatgcagtggtggcgcaatatgaacgggaagaacggtcggttcatttgcccggcgttcagcttttgcgacatcctgcggccattcgcgaagtga

SEQ ID NO: 18999 - DNA, 258 bp, Escherichia coli
atgaatccgttttatcaaaaaataaatgcccctagccgcgaagtgctggagctcgttctaaaaatcgcagcaaaaattgaaaaccattcctcaaccatcgcggcgttcgtatgcgccgccaatgatgcgcccgaaaaacgcgtcaatatgagttcaccggaatattacagttcgccggaatattacgcttacaacgtatgtcaacaggccggtgtcgttacggggaagtcatcttcacagcgattttcagtcagttag

SEQ ID NO: 19000 - DNA, 285 bp, Escherichia coli
atggaggtgctcaatgcaccgggtaaatatcaatacgatttgaggaaccatttgctggttgatctctttccgatagcattggatgcagaaataaccacatccaatgtaaataagcatcaattgcacagaagcaatatacctgcgaccctctccggaaattccggtatcactggctacgtaccgttttcagcagaacgaaatgcggcgagggtcatttggcggactgccacagatagccgtccggttgtgtgcaacgatgaggaaggaatcccgggagcgttatga

SEQ ID NO: 19001 - DNA, 705 bp, Escherichia coli
atggcaagatgtacagctcctgtacgtggacatagctcagcagcagctgctgctgcctgtcccgcatgtcgtaatcgcagtggttatcgccgcagtagctacagttatgatagttacccttcttactcatcaggctctagcggtggcggaagttatggaggcagtagcggtggttccagcagcagcgcgaagccacgttggtcaaaatcagggtcttccgtttcttacacaacagcccaagtacaatcactcacaccaattcgacaagcggtagagaaacttgccattgagcaacctgatctgcgtgatgtctttctttgccatgcttgggatgaccgacaaggtattgccaaagagttacacgatttgctcgaagcggcaggtgtcaaagtatggttcagcgaaaaggatcttgcccttggtgttccgatgatgcgtgccattgataaaggattagcaaactctcgaatcggcttggttttagtgacacctgcattgttaaaccgtcttcctaaagaaggcgttgctgataaagaactttccgccttactggcaggcaaccaactcgttcccatcgtgcataacacgacgtatgaagctctccgtaatgtcagtcctttgcttgcatcccgaagcggcctcgacacgggagaagatacattggcagttgttgcaacaaaaattgcagagctgatcactgtttag

SEQ ID NO: 19002 - DNA, 1101 bp, Escherichia coli
atgacccccgaacaccttccaacagaacagtatgaagcgcagttagccgaaaaagtggtacgtttgcaaagtatgatggcaccgttttctgacctggttccggaagtgtttcgctcgccggtcagtcattatcggatgcgtgcggagttccgcatctggcacgatggcgatgacctgtaccacatcattttcgatcaacaaaccaaaagtcgtatccgtgtggatagcttccccgccgccagtgaacttatcaaccagttgatgacggcgatgattgcgggtgtgcgtaataatcccattctgcgccacaagttgttccagattgattacctcactacgctaagcaatcaagcggttgtttccttgctgtaccataaaaagctggatgatgagtggcgtcagcaggcggaagccctgcgcgatgcactgcgcgcgcagaatctgaatgtgcatctgattggtcgggcaacgaaaaccaaaatcgcgctggatcaggattacatcgacgaacgtctgccgatcgcggggaaagagatgatctaccgtcaagtagaaaacagctttacccaaccgaacgcggcgatgaatattcagatgctggaatgggcgctggacgtaaccaaaggctcaaaaggcgatttactggagctatactgcggcaacggtaacttttcattagcgctggcacgcaattttgatcgggtattagccaccgaaatcgccaagccgtcagtcgccgccgcgcaatacaacattgccgctaaccatattgataacgtacaaattattcgtatggcggcagaagaatttactcaggcgatgaatggtgtgcgcgagtttaaccgcctgcaaggaatcgacttaaagagttatcagtgcgaaaccatttttgtcgacccaccgcgcagcggtctggacagtgaaaccgagaaaatggtgcaggcgtatccacgtattctgtatatctcctgcaatccggaaacgttatgcaagaatctggaaacattaagccagacgcacaaggtcgaacgtctggctctatttgatcagttcccctacacgcaccatatggagtgcggcgtattactgaccgcgaagtaa

SEQ ID NO: 19003 - DNA, 576 bp, Escherichia coli
atggcgataaaagggcttgatcaggcgattgataatctgagccgggttcgtaaaaacgccattccggcggcttcagcaatgacgattaaccgcgtggccacaacggcgattaatcagtcttcgtcacaggttgcccgggaaaccagggtgagacggaaactggtaaaggaacggtccagactgaaacgggcgacggtcagaaatccgaatgccagaattatcgttaaccgcggtgatctccctgtgattaagctggggatcagaatgctgggacgtcgtccgaacagcatactcaaagccggtcagcatcgttatcagcgggcatttatccagcgattaaataatgggcgctggcatgttatgcaacgtcttccccaggccagatatgaggagggcaatgacgacaagggaaggaaaaagcgtaatcgccttcccattcaggtggtgaaaatcccgatggcggccccactgaaacaggcatttgatgagaatgttgaccgtatccggcgtgaacgcctgcctaaagaactggcatacgcgctgaaacaacaactgaggattgcaataaaacgatga

SEQ ID NO: 19004 - DNA, 396 bp, Escherichia coli
atgaaacacactgacattcgtgccgcagtgctggatgcactcgagcagcatgaacacggggcgacgctgtttgatggtcgccccgttgtttttgacgaagaggattttcctgcgatcgcggtttatctgacggatgcagagtataccggtgaagagctggatgcagatacctggcgggccacgctgcatattgaggtgtttttaccggcacaggtaccggattcagagcttgatcagtggatggaaagccggatttacccggcgatgactgcgatcccggcactggcaggactgattaccacgatggttacgcagggctatgagtatcgtcgtgatgacgatatggcgttatggagctctgcggatctgacttattccattacatacgagatgtga

SEQ ID NO: 19005 - DNA, 234 bp, Escherichia coli
gtgacggagctggaaagacatttgctgaacgcattagagcaactgcaacaggactatatgcagcggctgaacgaatgggagagcgccttcgtggaattgcagaaaatgttttcgcttacgcaacgggacaacgcgatgctgaacgagcgggtcatgaagttgagtcagcaggtgcagcacttgagcgagcggacagaacgcttgagccagttatacagcgagaacaggagataa

SEQ ID NO: 19006 - DNA, 297 bp, Escherichia coli
atgcagcacaggaaggacgtgttaaagctggcagggaatacgggcatgatgttactggggatggtcattttcctgtttaccgtgagttgcgggacgctctggtatcttggcgggatgatacaggcgaacctggaagatatcaggaagcaggaagagacattgcagaaactgaacgcgaagacatggggcgtggagttcgtacaggacgggaacaggaaatttctggtccttccgtacgggaaatcagcagaggtgattccccatcaggggaaggactgggtacaactgatggagtga

SEQ ID NO: 19007 - DNA, 774 bp, Escherichia coli; identical to SEQ ID NO: 4453

SEQ ID NO: 19008 - DNA, 348 bp, Escherichia coli
ttgatcccattaccatcagggacaaagatctggctggtcgctggcatcaccgatatgagaaacggcttcaacggcctggcggcaaaggtgcagacgacgctgaaagacgatccgatgtcaggtcacgtttttatcttccgtgggcgtaatggcagtcaggtaaagctcctctggtctaccggcgatggactgtgtctgctgaccaaacggctggagcgtggccgcttcgcctggccgtcagcccgggatggcaaagtgttcctcacaccggcacagctggcgatgctccttgaaggtatcgactggcggcagcctaaaagactgcttacgtccctgactatgttgtaa

SEQ ID NO: 19009 - DNA, 357 bp, Escherichia coli
gtggcgttcatcattgatgtgtttgccggatacatcgtggggtggcgggtctcatcgtccatggaaacgacattcgtgctggatgcactggagcaggcgttatgggcccgtcgaccgtccggcacagtccatcacagtgataaaggttctcagtatgtatcgctggcctacacacagcggcttaaggaagccggattactggcatcaacaggaagtactggtgactcgtatgacaacgcgatggcggagagcatcaatggcctttacaaagcggaggtaatacaccgtaagagctggaaaaaccgtaagcgtcgtctcagcaccgtctggcagatcctgaaattcctgagagaatag

SEQ ID NO: 19010 - DNA, 198 bp, Escherichia coli; identical to SEQ ID NO: 8087

SEQ ID NO: 19011 - DNA, 483 bp, Escherichia coli
atgaaaaaattagcgatcatggccacaatgagcatactggtcgtggcaagcaccgcacacgctaccttccagcccagcgggaccacagggggcgtggaactaacggtgactggcgaatgcccagtaactgtaggaaagctcatagcaaataaacgacagagcgaattgcacgaccgggcggttctgggagaagtctccgtcagtggggtgggttgcggtaccgaccagcgcgtggcggtgagtgcgggtaatttttatgacggaaccaatggcttttttatgacccaagacggcgggacagaaaaactgaccgtcgacctagccactaatggcgaccaatggaaaaaggataacggcgtgtattaccgcgccgccggtggggactggactggaaagatcggtattattgtacggggagaacaggtgaacaaaccgaccggtaaatacaccatgaacctagatggtggtttctgggcaaactaa

SEQ ID NO: 19012 - DNA, 456 bp, Escherichia coli
atggtgacacctgataacgtctggctggccgtgaaacccgtcgatatgcgtgccggtatcgacaccctgacccagtacgttcagaacgaacttaacgcagcatggcatgacggggctgattttgtcttcaccaacaaagcccgctcccgcataaaagttctccggtgggacaaacatggcgtatggctgtgtacccgacgactgcaccggggaagcttccgctggccccggaaaggtgatgccacatggcatctcacaccggatgagtttcactggctcgtctgtggcgttgactggcaacaggtgaaagggcatgacctggcaaaatgggttataccgggaaccgcctccggatgtgcagcatatcacagtaaccacatgaaatgtaatgaatatccatgcacaatggtgtataatccaccgcatggatatttcacttctcaccaccaccagtga

SEQ ID NO: 19013 - DNA, 261 bp, Escherichia coli; identical to SEQ ID NO: 9826

SEQ ID NO: 19014 - DNA, 483 bp, Escherichia coli
atgaaaaaattagcgatcatggccgcgagcagcactatcctcgcgatgagctcctcgcatgcagcgttcacaggaagtggtagcaccggtacgacaaaactaaccgttaccgaacagtgccaagtgctggtcaccggatctgacgtcaccaaaacgcgcggagaactcaccgacggggcccatgtgggggtcctgtccgtaaccgcaaaaggctgtaacaccgagcatgcagcgttgcgtgcacagccagacaactaccaccagggcaagatcgtactgatccgcgatgaccatcaggcacggataaatgtccgcttgcaggccaccgacgggcgtgcgtggaataccaacggcgacaccgtataccgcgccgatgctgggaactggggtggcaacttgttcgtagtcgtggacggggacaacgtggacaaaccggccgggtcctacacactgaacctggacgggggctactgggtgagttga

SEQ ID NO: 19015 - DNA, 600 bp, Escherichia coli
atgcaaacttataacaccaatcccgcttacgaaatggctccccagctcctggagcactttaaccagcatctggattcattattcggggtctattcgaaactgttaccgttcagaatggattttgcttaccgaaaaaacaccctcagctacagatgtgcctgcaggtacgccatgtgcgcggagatgctgcaactgattaacgaggtgggagagaaactggtcgggtatgcctgggtgatggaatatacagaacgtaaagggcttcacattcattttgtgggctatctgaacggccagagccacaggagttcgtatctggtatccagattgatgggagatatctggaggcgggttaccgagggtaatggttactaccactggtgccggtttaataaaaattatccggtaaacattaaccacgtcattcactattcagatcacaaagcggtgaatgatttacgctatgccatcagctacctggccaaacgggaacagaaagaatgtggcatcatcctgaaatgcagcgggcttcctgaaaaaagtaaccggggtcgaccacgactggacagccccctgccggggatatgtgctctggtgtaa

SEQ ID NO: 19016 - DNA, 474 bp, Escherichia coli
gtgaacataaaccgaatgctttccgcgtttatcgttattctgctggtggcctgtggtgcgctgtggatggcaacagaccattaccgtgataacgcgattacctacaaagcgcagcgcgataacaaagccagtgaactgaagctggcgaacgcaaccattactgatatgcaggtgcgccagcgcgatgttgctgcgctcgatgcaaaatactcgagggaattagccgatgcgagagctgaaaatgaaactcttcgcgctgacgttgccgctggtcgtaagcgcctgcggatcaacgccacctgtccaggctccgtgcgtgaagcccccaccacctccggcgtggataatgcaaccggcccccaactggcagacaccgttacacgggattatttcaccctcagagagcggctgatgacgatgcagaagcaactggaaggggcacaggactatatccgcactcagtgcctgaaataa

SEQ ID NO: 19017 - DNA, 147 bp, Escherichia coli
atgaaaaatgaccttgaactgaaagcgcctgtaactgatgacatcagcagagcactggcttttgccattaagtgggtggcggtcggtgttgctgtgtccccgatgctgtatgggctggcaaaactggtcattgcgttgaaatcgtga

SEQ ID NO: 19018 - DNA, 435 bp, Escherichia coli; identical to SEQ ID NO: 16170

SEQ ID NO: 19019 - DNA, 966 bp, Escherichia coli; identical to SEQ ID NO: 8922

SEQ ID NO: 19020 - DNA, 1107 bp, Escherichia coli
gtgagggtgtcacaggcgtgggcggggccggggttcggtaacctggcgataccgcgtgtgggtcaggaagtgatagtggacttcctgaacggggacccggaccagccggtggtcatgggcaggacgtaccatgaggacaaccgttcgccggggagcctgccggggacgaagacgcagatgacgatacggtcgaagacctataaaggaagcggctttaatgaactgcggtttgaagacgccacgggcggtgaacaggtctatatccacgcgcagaagaacatggatacggaggtgctgaataatcggacgacggatgtgaaggctgaccacacggagaccattggtaacgaccagaagataacggtggtgaaggggcagacggttcaggtcgggaccagaaaagaagggggccacgaccagagtatcacggtggcgaacgaccggtgcatcacggtacgtaatgaccagacgctgcaggtgacgaatgaccggacggtgagcgtgagtaatgatgacggcctgtacgtcagaaatgaccgtaaagtgacggtggaagggaagcaggagcataagacgacggggaaccatgtcagcctggtggagggaaagcacagcctggtggtgaagggggacctggcgaggaaggtgagtggcgcgctggggataaaggtcgacggggatatcgtgctggagagcagcagccggataagcctgaaggtgggtggctcgtttgtggtcatccattcagggggcgtggacatcgtcgggccgaaaatcagtctcaatagcggcggtagtccggggacgccggtgccggcgctgcaaccggcggtgctgaagacactgggggatgagaagagtggtgatggcagtgattccggagaagaaaatgaagactctggagggaactgcgtgaccggaagtggtggtgatgatcgaggtgacgatgaggatgaacctgaaaaatatactctccagttccattttacagacgatgacgggataccgtattcagaaacccgctacattgccttctttgaggatggcacgcagacccgcggagaaacggatgaagaggggggtgatgctgccaacttactgatttag

SEQ ID NO: 19021 - DNA, 312 bp, Escherichia coli; identical to SEQ ID NO: 15045

SEQ ID NO: 19022 - DNA, 345 bp, Escherichia coli
ttgataatcagcgaaatgcaacgcaagcttgccacatgggcagccaccgatccgtccctacggattcaacggctgctgcgtctgataacacaaccagaatggctggctgaagcggcgcggatcacgctttcatcaaagggggcccatacccccggcgttgatggcgtgaacaaaacaatgctacaggccagactggctgttgagctgcaaatcctcagggatgaattactctcaggccactaccagcccttgcccgccagacgggtttacatccctaaaagcaacggcaaactgcgaccactgggtatccccgcgttgcgggatcgggcactgttgcaaagttag

SEQ ID NO: 19023 - DNA, 618 bp, Escherichia coli
gtgttgataacctacaaaggaaagctaccgggaagaattacttgttctctgaagatgccgccgtcaacactgcggtcagaaaaagatgatgttgaatcacgtattgaaaaactggagagctacgtcgttgagctgaataagaaatggtcgatattggtgccttctggcgatgaaaagcagtttgctgcgtttgacgattattgtcggaaagtgatgagcagaaatctcgcagagtgtttcagtattcataatgataatttcagtgagctggaatgggagtgtaaccggccatcctttgttgtatccggtgatgctgggaaaataaccatctcagaaaatgggaaagtaacacctccatcgcaccagcacagtgaggggctcattgaatttgccattgattacctgaagaacaataaaaagcaggggctgatgaagcgcgttggccgttgcatgggatatcttcaggtagccgctgagattgaagcgctggccagtggtgctgataaggatgcaattgtgcgggaggctcttcttcgtgattttaatactccaccctttaaaaaagtgccggcttactggcttcatccggggctgacttatcttaaagtgcgtatttag

SEQ ID NO: 19024 - DNA, 312 bp, Escherichia coli; identical to SEQ ID NO: 15045

SEQ ID NO: 19025 - DNA, 393 bp, Escherichia coli
  misc_feature (325)..(334): n is a, c, g, or t
atgaatatttttagtctcatcactgatcctgataatgcagtttatttgactttagataaattttataaaaaaacgcatagacattatccctatattcaaaaggttaatggagaaactaaagcatacgctttatgcccaagatgtcacaatccggtccttttggttaatagaataaataatcagacggaatcaaaaactttatatgctaagcatgttaaacatgatgtaatgggtatcgcatcatattctcaacaaggttatgatgattgctcacttgcaaacccaacaaatcttgatgcaaaaatcaagagagatattaataatnnnnnnnnnnaaaagatgctgttaaaaattatttcgatctacttatatactcaattgaatcacatatag

SEQ ID NO: 19026 - DNA, 534 bp, Escherichia coli
gtggcgaccgtcatcacttccggtcagcacatcgtgctttttccccttgttgtcagttacgcggagataatccccggagaaagtcgacacacggctgtaagccacacccaccatcgcatacgcgctgaaccattcattcacgcgtacagacggccccgccatcacgctgaaccagcggttacgcacggaatcttcatgccagcgggtatcgctgtagcgcgttttttgctcatcctcagcattggcataactgaaggacgtaatcagccccagcgcgtccgtaaactcataacggtatttcacgttaatcccgttcagattatcgctgccgggagcgttcgtacgggcatgaagataccctgcgctcagtgtggactgatgttcagacgcccatgcaggcgcactggatacggacagacagatggctgcggacaaaatggctgcacaaactttacgcataattacctctcgcttttctgcaataaaaaaggcgccatttctggcgcccgtatctgggttataaaattcagctaa

SEQ ID NO: 19027 - DNA, 369 bp, Escherichia coli; identical to SEQ ID NO: 4841

SEQ ID NO: 19028 - DNA, 141 bp, Escherichia coli
atgctgaaaggcgggatttccggtcgcagtgccagaggaaaacgtatccataccctggccattcacagcatcgataccgacattaagctcaaccgggcgttgtgggtgatggcagaaacgctgctggagagcatgcgctga

SEQ ID NO: 19029 - DNA, 258 bp, Escherichia coli
gtgacgccgacatccggtacggtggcaaaagggaaaacaaccaccctgacggtttcttttgagccggaaagtgcaaccgacaagacgttcagagcggtttccgccgatccgtcgaaagccaccattagtgtgaaagatatgacaattacggtaaacggcgtggcgacaggtaaggtgcagatccctgtggtgagcggaaatggtcagttcgccgcagtggctgaagtcaccgttactgaagcgggcgctgcagggtaa

SEQ ID NO: 19030 - DNA, 261 bp, Escherichia coli
atgctgatggcggggattcagttcaccgctggtgagcatgagttccagttgtttcatcagcagcggaaaggcctggtccaggtggtacgaatccgcatcgctgaaccgccctctgataccggcgcggtcggcaaggtaatgcaactgattgccctcctgcaccagacgtgccccgaaacagggcgtcacggtgcagggcagcccccaccaggggcggtcgtgattgtcgtcgggaagtgttgtcccggggagtgtgtctga

SEQ ID NO: 19031 - DNA, 1413 bp, Escherichia coli
atgagtattcaacatataaaagttggcagtatatcagaaattattgatctatcatctaattctggcgagcatgctgattctcatccttttatcctctcgaagaactgtgtatggggagaacagggggcagaaatatcaattgagaaattgcgccaaaatattgagccctggctaacagctctcttccaatcagagcatttaaatttattaatcggtgcaggcttaagctcggctattcaaaaatcagctacaggtttatctccagtagggatggggtggattaatgatttaaaagtatgtaaaagcgaaatagatgaattttccactcaggctgcaaaagctgcaggtcgcgatagaggaaatatagaagatcaaattagaactatcaatgaacttattaaaggtctcgaaattttaacggtgttaaatactcctcaaccagaaaatccgccacctccttattctgcttatagaaacttaaaagcagacttgggcgagctcaaaggcgagctttctagatgcttgggggagttttctaaatctataattaaaggagaatatttaatcaaaactgctgaaccagcccggaaagaggaaactttcaactatctagttagttttttgatgagctttgcaagtagaactgccactcgcgataggctacatatctttacaacaaattatgaccgtattattgaagtgggtgctgagcttgctggtttaagacttattgatcgctttgtaggaagtattgctccagtatttcgatcctcaagattagaagttgattatcattataatcctcctggaatccgtggtgaaccaagatacttggagggcgtggcacgttttactaaacttcatggttcccttgattggcatgaacaaaataatgcgattaggcgctttggcttaccctttggagcacgttctgttgagccgtttttggaagccgaaggtcatcaaagcaatggctatgaaaaactgatgatttaccctaattcagtaaaagacagagaaacagccgagtatccttatgttgagctatttcgagatctggcagcagcaactagccgtccaaatagcacattagtcacttatggttatagctttggtgatgagcatatcaatagagtaattgaagacatgcttacggtaccttccactcatatagtaataatagcctttggcgatccacttggcagaattatgcgtttcattagtaatagtggaagaaaagcacagattacccttttgatgggagatcatttaggagacttcaaaactttagttgataactatttacctaaaccagctattgataaagcatcaatcaagatggcagagttgctcaaacaaagaggctttatgcagttcaaagagttaggtaattcagccgaagttgaggtatga

SEQ ID NO: 19032 - DNA, 2034 bp, Escherichia coli
atgagttatttaccaatagaaaaaatagaacaactaagaattggaactgttgagtttgtatcacctaatgaaattagggtgtctttagagattgattctcctgattcagtatcacttcaaggtggggcgcctcgtaattttcctagaataaatagttatattttaatccgtagtgatgacgggtttcttgttgggcaagttgagtggattgcaatagaaaactcgccatatcccaaaagaagaggcttacaagattttgggttgatagaccttcctttcccacttaaaaagcttagtatcaatccagttggtacattgagagttgatagaaaaaacgaaggtttcaggttcacgagaggaactgatgctttcccttcggttggtgactctgtgcttttgcctactgaccgacaattacaatcaataattgaatcaggtgataatagaagggtaaaaataggggatagccccctagctaacaatgctgaaataaaagtagaccccgatagacttttcggacgacatatagctgttttaggtaatacgggtagtggtaaatcatgttcggtggccggcttaattcaatggtctcttgatgctgttttacaacagggaaaatctccaaatgctcgatttataatacttgatccgaacggagaatatagtagagctttagggccagaatcaagatataagggtaaactattacgtgtagaggctaacatcgatgtcggagagatggatcttaaagtaccttcatggttatggaatagttctgagtgggctgctttcactcaagcaagttcaaaggtgcaacttcctttactacgtcgtgctttgagggcaatgaggaataatcttctatcagaagatgatgtgaaaattcaagccaaacgcttttgcggtatccttcttgtatctatgagacagcaggcaagtcaaggtcagatatatgtgaatagtggatctgctaaaggtttggttgaaactttgggttcttggagagatagtatttctatcttaaacgagagaattgttgataaatcgctcgataagctaataaacacaataaatacgtatctttcttcacgaagtggatcttcttggccagcaaagcctgttgtttccgagattgagttgttgattaatggattcagagatgcatatacagctctagggggagatgaacaagaacttcttccaaaaagcgaagatgcgcctatgcgttttaaaggcgatgattttgtcgcatatctcgaagctctggctcaagaaacaggtacagaacaattcgttgagtttcttttgactcgtattcgaacaatgctaggtgacactcgtattagtgcagtaaccaatgattctgtaaagcctataagtttaactaattggttagacacttttctcggtaaaaatgaacaaggatctataactgttatagatttatctctagtaccaaatgaaataattcatttggtaacagctgtaatttctagggtggcttttgaagcactacaacgttatcgaagattaaatggaaggccgctaccaacagttttagttgcagaagaagcgcatacgtttattaaacgttacaaggaagatagtgaaactcagtcagtctctgatatatgttgcaaggtgtttgaaaagattgcacgggaaggaagaaagtttgggctaggccttgttgtttcttcccaaaggccatcagagctatctccgacggttttatctcaatgtaatacttttttgttgcacaggattagtaatgatagagatcaagagcaagtacatagacttgttccagataatatgagagggctgttgagagagctgccatcgttaccatctaggcatgctattttacttggatgggcttcagaacttcctgttttagttagaatgaaagagcttactgaaaaacaacgaccgcaatctgatgatcctgatttttgggatgtgtggtctagcactacaaaagaacctcggaaagttaattggcaacagatagctgatgattggcaaagttga

SEQ ID NO: 19033 - DNA, 132 bp, Escherichia coli
atgaaattacagtgtgcctcatggaacgtccttaccatgtctaaactctaccttcatacaattgatgatttctttcttggttattttttcttctcgctattgcctttgtcctgcaacagactcgccttgtga

SEQ ID NO: 19034 - DNA, 204 bp, Escherichia coli
atggcaattaagcattttcctgtcgttcgtttcacttccagaggacgtgaatacgaagtcgacgaacgcctgattaccacaatcgacaaacaccgctcagaaaaggatgcacaccacatctatctcactgacggtacttacttctgcgccactaatgtggcgcgggtgaatcttatccgacaggtacaggatccacgtaaatga

SEQ ID NO: 19035 - DNA, 810 bp, Escherichia coli
atgactaagcaaccaccaatcgcaaaagccgatctgcaaaaaactcagggaaaccgtgcaccagcagcagttaaaaatagcgacgtgattagttttattaaccagccatcaatgaaagagcaactggcagcagctcttccacgccatatgacggctgaacgtatgatccgtatcgccaccacagaaattcgtaaagttccggcgttaggaaactgtgacactatgagttttgtcagtgcgatcgtacagtgttcacagctcggacttgagccaggtagcgccctcggtcatgcatatttactgccttttggtaataaaaacgaaaagagcggtaaaaagaacgttcagctaatcattggctatcgcggcatgattgatctggctcgccgttctggtcaaatcgccagcctgtcagcccgtgttgtccgtgaaggtgacgagtttagcttcgaatttggccttgatgaaaagttaatacaccgcccgggagaaaacgaagatgccccggttacccacgtctatgctgtcgcaagactgaaagacggaggtactcagtttgaagttatgacgcgcaaacagattgagctggtgcgcagcctgagtaaagctggtaataacgggccgtgggtaactcactgggaagaaatggcaaagaaaacggctattcgtcgcctgttcaaatatctgcccgtatcaattgagatccagcgtgcagtatcaatggatgaaaaggaaccactgacaatcgatcctgcagattcctctgtattaaccggggaatacagtgtaatcgataattcagaggaataa

SEQ ID NO: 19036 - DNA, 423 bp, Escherichia coli; identical to SEQ ID NO: 18214

SEQ ID NO: 19037 - DNA, 603 bp, Escherichia coli
atggataatgccgtattaaatggcgagtttattgccacgaaggcgggggatattactgtctataattataatggtgaaacacgagaatatatttccacatcaactgaatatcttgctgttggtgtcggtattccggcatgttcctgtttagatgcaccaggaacatataaagctggttatgccatctgccgctctgcggatttaaactcatgggaatatgtgccagaccatcgcggtgaaactgtctatagcaccgaaacgggagatgccaaagaaatcacaaatccgggtgattaccctgaaaatacaaccaatatcgccccgttaacgccatatgataaatgggatggtgaaaaatgggtgacggatactgaaatacaacatcgcgccgcagtagaagcggcagaaacacagcgtcggtcactgattgatactgcaatggcttccgttagtttgattcaactgaaattacgggccggacgaaaattaactgatgcagaaacagtaaaacttaatgctgttcttgactacatcgacgcagtgacggcaacagatatcagcactgctcctgatattgcctggcccgaactaccagaattttaa

SEQ ID NO: 19038 - DNA, 708 bp, Escherichia coli
atgcccccaatcccaactaacctcatgactatcgcgggacttccggtggatagctttttctttgcttaccagtatgagtggaacactggcccaaagagtagaaaccgtgtactcacaaaaatgcgccaggcaggcgcggatttctttttttcctatgaagccctgaacgatgcactgcataccgggcgtaaccagattttcctctgctgcagcacagcatctgcgcaggcaatcaaagcctatgtatcagcattcttaagccaggccgcagcttatacgcacactggaaaaataaaatcaggcaaaagtcatctggagctttcgaatggtgcagtaatttattttaccgacctccgcagtctcacctccgcactcagtggaaatgtttacgtgtcagagtatgcctggagtgaatcaccgagaaatatgattgccatcgctaaagggatttctatgcacgcacaccaccacgccacctactacaccactcccagccctaacccagaggcacggcaggaatataaaaagctatgcagaaacaacagcgtaaccagcatggtgttcaccgcagatgacgcagcagcatctggagcaatgttgtttactgataactggctgaacgatatgaaaaaagaattatcagaagaggactggaaaatgctgtttatgtgcgaatggcctctcgctagcaaggaactggcagaatga

SEQ ID NO: 19039 - DNA, 2337 bp, Escherichia coli
atgattgaagaggtagttattgacaaagtaggctcatataatggccctactcagcttttacatgggctttctaaatttaactatttatatggagctaatggtgcaggtaaaacaactataagtaaaattattaatgaccctgaacaatatccaacatgtccgattaaatggaaaaataatatatctttaataagctacgtatataataaagattttgttgaaagaaattttagtcaagataaaattaaaggtgtatttacccttggtagcgatcttaaggaggatgaagagaaactaatatctcttgaagaagaaaaaaataagctaatagaatctattatagcaaaggaaaagctaatagatggtggtgataatatattaggcgttgttaaacaaatcgaagaccatgaaaaatcttttaaagattcatgttggaagcaaaaagtaaaacatgataatgtgttctcaaaggcttttgagggattaaggaatagtagtgaaaaatttaaagctagagtgttggctgagtatgaaaataacacatcagaagtttgctcaatagcagagctaattgagaaagcaaaaattgttttttctactgaattgacatcacatgtatcaattacaattccatccttcaataggatagatgatattttgagtagggagatttggagtgagcgtattctagggaaaaaagacgttagtgtttcagacttaattacaatgctcaataacagtgattgggttaaggaaggtttaacatatttcagtaaatctaatcccaagtgcccattttgccagcaggatgtaaatgataatatattttataatctatcatcatattttgataaaacatatgagttaaaaaaaagagaaatcgatgcattggttttacaatatgaacatcaacttaataatatcttgcaggcgatagatgatataagggcgattaaatctccattcataaattatgaagtatttgaggataaggctaagatagtattatctgaattaaacaagaattttgaattggcaaaaaataaacgcaattttttaagtgaatcagttcattttagtgacttaagtgaagttgttgatgattttatttcttttttgaatgattcaaatctattgatagataataataacaaaatacacagtaatagaaaggtagaggctagtaatctttctaatcagatatgggcatatatcgtaaaggtggagttaaagtctgaaataacttcttaccgtagcgaatctgataaatttaataggaagttacaaggacttaaatctgggttagaggaagacaaaaagaagttaatgttaaatgcttcggctattgaggcaattgagtctaataaaaccagtactcttccaactattacaaaaattaacaagattctggattcttatggcttcaaaaatttttacttaaaaccctccgaagataaaaagcattatatgatagtgagagatagtggagataatgctcgtacaacccttagcgagggagaaaagacatttatcacttttttgtatttttatagccttgttagagggagtgataatgcatcaggtgttttagatgatcgtgttgtagtatttgatgatccaatttcaagtttagatagtgatattctgtttattgtaagttcgttgattaaagatttaatggaggatgttcgtaaggatgaaggaaatattaagcaaattatattccttacgcataatatttattttcataaagagttgacttttaatactaaaagatccggtaatcaagcaatgaaagaggagactttttggattgtaaggaaaaaagggaaggtctcatatcttgaaaagtgcgaatcaaacccaataaaaacgtcttatgatttgctctggtgcgaattgagaagaacagatattaataataatactatacaaaatacaatgcgaaggattttggagaattactttaagatattaggtgggattgatattaggaagcttgagtgtcatttttatggtgatgaaaaaatcatatttaaatctttagtgtcatggattaatgatggttctcattttgcaggtgatgatctttatatgagtttagatacggagtctgtgcaaaaatatttaattgtttttcagaagatatttgagtgtagtgagcatactgcccattacaaaatgatgatgggtgagttttatagaccgttaaatgagtcacttcatctacaagatgagtttgatattgatgatagtgcgaatgatgagtatgcttcgtcaaaaattgagatagaagatggaataaacacatctctacatagcaatacatatttgtaa

SEQ ID NO: 19040 - DNA, 837 bp, Escherichia coli
atgaaattacttattactgatttggataatacactgtacgattgggtgagtttttactcccagtcatttagtgccatggcagagcaattatctaaggatattgatgtgcctttggatacgctcctgtcagaatataaaacaattcatcagaagtttggtaactcagaaaaaccatttgctactttagagctaccatctgtgatatcttactttggaactaatgataaaacgattttgcaggaaaaacttactaatgtttttcaggcgtttagcacaaaacgtaaccagacattaatgttgtatcctactgtaaaagaaacgctggaattattgaagaaacggggggtaaaaattgtagggcatactgaagctttggagtttaattctttatatcgtctgaataagcttggtataattgatttttttgatcatctttatacattagaagatattcataatatccacccgaatcccaaaaatgcaaaaaaaatacctgtgaaggatgactttgtaattagattgtcctgcgctgagtcaaagccaaaccctaaattgcttgagcacatatgttcttttgaaggagttagtgttgaagatgcggtatacattggcgattctataactaaagatatgtccatggctaaagctgtgggggttactgctgtttgggctaattatgggcgacagttttcacctgaattgtggaaagttttagtgaaaatcacacactggaaagatgcagatgtggagagggaggaacaacttagaaaagcattctccaatgttagacctgattatgttgttaatagtttttcagagctgctgaatttgaaatga

SEQ ID NO: 19041 - DNA, 1647 bp, Escherichia coli
atgtgtgaaacctatatttttaggttccgtgacctaggaaaaagtgaaggatttaccatcgagcaacacaataacattgctcgccaagaagggaatgtttggtgggggtggtgggctaaatctggtgagcgtttcccatcactggaactaaaaaatgcggcagaaaaaaataaacaaatatatttttttgattcagggcggcttaaattttataccgctgtattaaaggatacttgctcgtcagctttaggggatataaaaaagcaatctcctaaggatggtcgcagaaccccagcatattataatgagaatgagttgctgggatggttaaatgtttctgagattatagaaattgatgcttgtgatatcctcaaaaaattcacatatattccattggatgcattgtttgcaggtaataaagatttagatgagcaacttttcaacaaaattgtcttttcttcagctgaattaaaaaaacaagatagaactatttggaagattagacctgcaaatgataaagatttacagcatgagtcattagcatctcattatgttccttataatttcagtcggaagtatagccaaaaaaaaggggagtttataatttggctttcggatattcattttgatggcggaaatgggaaacatgcatttccgacacaagataatgatcagctaaaatgtttatcctctcgagtggtggagttggctggaaaatataataatgggagtaaatgtgctgggttggctatttcaggtgatttgacgtggcagtcacagaaagagggattcgagcaagctttgaattttatcaaagatgttagttcttctcttagtctgacaacggatgatataattatttgtcctgggaatcacgatgtaggtctggtttctaaagatgagtactttaaaatcgttggtaagcctgtaacggataaaccatggaaaattctggcggaaaactaccatagcgaaagtaaacttaattatataaaattttatcgagatttttttcaaagggaacctgaagaaaatttatcacaaggaaggaaatttttactaggtggccataaagttgttgaaatagccgcattgaactcatgcgtattacaacaagtaaaagattcatttttgggcatgggatttgtcggtgagcaacaactcagtgatgttgcaaaatctatgggatggatgaatgatagcggaggagatatactcaaaaagaaaggtgttataagaattgctatgcttcaccatcacctaacttctattaatgaagttgaagatgcctatcttgattcaagatatagtgtaacattagatgcagagcgattattacgttgggtagtaaggcataaagttgattatattctgcatggtcatatgcacagaagtagttttattacaataacaaaaaaactatctccgttagaaccagtgacggattcaaatcctgaacatacattccaaattgtttctttgggaagttcaggagttgttagttcggaattgccaagtcaggattgtgctaactatgcatgcgtactggatttttctggcgaaaagctaacttttaattttttcaagcttgataaacagagcggagaaaaagtggcggctacttatattgttgaaggtttattatga

SEQ ID NO: 19042 - DNA, 1023 bp, Escherichia coli
atgaaagataacagacaaaaagtcgttcattataaaaaagcagtaatcccacacagcaaatcatcattacaaaacatactacttagtattataggtgagggcggcgttgcagaaaaagtacttagtagacaagaaaaaataacaccttcagatgaaaattcggggtatcgtttcttaaataaaagcgacacatacaaaactatactttttgggcaactggttttatttgaaaaagacaaaagccagtctctattagagcttagtgataatgttaaattttatgacattaactccatcacgtctaatgatataattattgatggagataaacgtagtgacaaaaaaagagagtttgtagattcaattttatattttggtgtactaaacaaccatgtcatgatcgttcaatccacatcgcttcgagcaagggagcttgaggcgcatttgaattggctaattaatacattcacagatgaaaaagaatctgtgttaatgcttcaagataagccatccgaagaaacgatgaaaaaaatggagaaagcaccagccaagagcataaaaattggtggattacccattacttcagaagttaaaaattcagagaaccaaacaccctccttttcaaatggttcggtgaagacaataaaataccgcccaatagggaaaggaggtgcgctactaaaagcattttttggcgataactgggcaaatgatataaacattaaagattcattagatgaggccaatttacaagtaagcctcgagattacatacttcagaaaaacaaatgatagcggtcaagctgttatagacagtattgctacctcactacgacatctagatgaggatgatattagcatcaaacttcaaggcggtggggaaataacgggaaaagagataaaattatccggaaaaattagcgttgaacataacaatggcattattgatgaaaatgatttattcttaaaaatgcataagtggctgttctcaaaacttgatgccggagaattggttgcaaaataa

SEQ ID NO: 19043 - DNA, 507 bp, Escherichia coli
atgaaatcgaacatcatccaccttattggtatgttggtcttctatgttgctggttactttttgttcaagtcagcattgggctatattacaccgggtgttgtcctaacagctccgtgggctgtggttggactcatgcaattgccattatcatattgtatacaagccatttttaaggcaaatgaggccaatgaccactcgtctttaacccctagtgaggttaggcgattagtgccaatagtcaaatccaagagactgaaattggttttattattagctttctatgtattttcaactttgtttgtaatcttggggttaatagcaagcacaaatgatcaagccctactcttcagggtcttaaaaatttcaggtggattactctttatttctctctataccagtgtattcgttcataaaataatggttgagcttcaagagtttaaagcgttattaaaccgaagagaatcagagaagaaggaaagagagtcactccttgatagattaaaatga

SEQ ID NO: 19044 - DNA, 681 bp, Escherichia coli
atgacaccggacattatcctgcagcgtaccgggatcgacgtgagagctgtcgaacagggggatgatgcgtggcacaaattacggctcggcgtcatcacagcttcagaagttcataacgtaatagcaaaaccccgctccggaaaaaagtggcctgacatgaaaatgtcctacttccacaccctgcttgctgaggtttgcaccggtgtggctccggaagttaacgctaaagcgctggcctggggaaaacagtacgagaacgacgccagagccctgtttgagttcacttccggcgtgaatgttactgaatcaccgatcatctatcgcgacgaaagtatgcgtaccgcctgctctccagatggtttatgcagtgacggcaacggccttgaactgaaatgcccgtttacctcccgggatttcatgaagttccggctcggtggtttcgaggccataaagtcagcttacatggcccaggtgcagtacagcatgtgggtgacgcgaaaagatgcctggtactttgccaactatgacccgcgtatgaagcgtgaaggactgcattatgtcgtggttgagcgggatgaaaagtacatggcgagttttgacgagatggtgccggagttcatcgaaaaaatggacgaggcactggctgaaattggttttgtatttggggagcaatggcgatga

SEQ ID NO: 19045 - DNA, 828 bp, Escherichia coli
atgactactttcaccgacaaagaactaattaaagaaatcagggagcgaatcggcagcctggacgtgcgagacaatattgagcgccgtgcttatgaaattgcgctggcatcgctggaagcagagcctgttggtgagttttatgaatacaaaccgggtgactggtatcagcgttcggtcggggataaagcaccaaagtgggtgccgttatatgctactccgccagttcgggaattgcaggctgatgtcgcgcaagcaattgaaaatctcaagcagaagttagtggaatgcaatcgctataactactgtgcagatgcagttaaaggcgtagaggatgcctgccacgctgccatgcttcagggtatccaacctgtaagccaaacttacaacttgccagaattaatcgaagggatggaagtttccattgatgtaagcacttgtgatgctgatttaggtaatcgctatttcggcaccgtcaccgaggcgttagaacttgatacagccaagaatggttacatcctcctggttcaggacgcagagccaaacttcgatgtaaatggcaactctccgggaactccggatggttgggtcgtggtgccgaagagactaacagccgagaacggcgctaagggtgcgctatccggtgaattttcagaaactacgtttatcagctgcccggaatgctttggcgatgatgattgcgatacctgtgacggtagcgggcggattgaaattaaagtaccagtcacgtggacgaccataaaatccatctgggataaaggtattgcgtattttgcagcagaaccgccgcaggaggttaaccgtggctaa

SEQ ID NO: 19046 - DNA, 483 bp, Escherichia coli
atgaaacaaatgtcactaattgagatggatggatttctgaaaggtaaatgcatcccaagtgatttaaaggttaacgaaacaaacgctgaataccttgtccgtaagttcggtgaacttgaatcaaaactggaaacggcgttgcgggagtgtagttctgctggaatcacgattgataaccttgaggctaaatgcgcgaagatggctgctgaaaatacctcacttaagcaatctgagaaggaatttaatgacttttgtcgtgaggagtttagcgaatgggaagatgatgttactgaaaccccagccaccgatgctttcctggctgaagtacgggcgcagggggtagagatgtacgcagataacctcgacaacggagcagacgacgcagaacgaggtggttttgatgatgccgttaagtttctacgcagtgaagcgtctggtgtacgtttgttcgccgaccagcttcgcaaaggaggcaaccagtga

SEQ ID NO: 19047 - DNA, 159 bp, Escherichia coli
atgaataagaaatacattgttgaagttatagagcgagaaacgaaagaagtaattaaacatttcgaatttgataattatagaaaagctgaccgcgtagaagagggattgttgcgacaaagtaatctcgaaaaatttgatgttgtcatgcgatgcgaataa

SEQ ID NO: 19048 - DNA, 279 bp, Escherichia coli
atgaaagagtttaagggtacgcctggtaaatggaagtacacggttagaaacgtcaacgagatgatgactacgttccatggtgtgacgattggtgacacatacattgaagcagcaacaagaaatgaaagggaggatgcgctactgatagcagcagctcctgatttgcttgaagcactgcaagagcttgtcttcctttacgagcatgacgaagggtgcagagagttaaccgaatacaaacgagccaaggcagccatcagcaaggccctgggggaagaatga

SEQ ID NO: 19049 - DNA, 183 bp, Escherichia coli
atggaaaatttggacaatgaactgaaaagagtagttcaggaactggccaatgaagaaggcatcagttttgccgatgccgtggacgtttcgattaagacgcttcgttacgaaattcagcacagaaagtcttttaattggtcgcctgaccccgatggaggcgcatcaggagtagaggtacgctga

SEQ ID NO: 19050 - DNA, 138 bp, Escherichia coli
atgaaaaaactgtatgaaaaactcccggtcgtagtgcagggggtcattttgggtctgcttatcactgcggccattcttctgtctaccccgccagtcgtcatgtttcttcgttggtggttcagagtttggggtgtctga

SEQ ID NO: 19051 - DNA, 339 bp, Escherichia coli
atggaaaataaaacggctaacgggatgtacgtactgcgtggtgagctgaaaaagggactgatagcggagctggtaaaggcatacgaccagctgactcaggagtcagaaaaattaaagatcctcggactcaggtataacacccctcgacgcattgtttatggctttatgtatgaggttgcagcattaaccgtcaaggaaattatgtttaaaactgagggtggcttttacatcccacaggatgacttcgaatcgagcgacgatatcgattcattagccaaagagatcatcgatgtaattgactgtaatggcgcattccttgagcgccttcttaaggagtag

SEQ ID NO: 19052 - DNA, 165 bp, Escherichia coli
atgaagaacagcatcaagtgcccggtatgcggtcgtgacttcgatccacgcactccggtctgccacatcagcaagtatcaccagtcagcgaagaactgcgagctggagaagatacgcgatgcccggcggcaatatttcaaagtaacagcgagtgaggttcggtga

SEQ ID NO: 19053 - DNA, 297 bp, Escherichia coli
atgtttataccaggtatagtggtcgctgttgtaatcatctgcttcatatgggcaaagttatctcctgtaagctctaagcatacagctgaactcatgaagaagaagcatcttatacatgaggcagaaacgataattaagaagttcaaaggcatgtcatatgacgacatgtcatcagatcagattgctatatataaatgcgccattgagcgtcttgactacttaaacggactcaaacccaaacacaccccggtagaatcaaaattgccgcaatggccaagcaatccaaatagcttctga

SEQ ID NO: 19054 - DNA, 168 bp, Escherichia coli
gtgagtgaaccatctaaacatacgcagtatttcccattctgccagcgtcatattgagcctgagcgagatgatttaggcgatctgtacattacacatgaaggcggatttatttatgtgcacgacgaagtactacacgatgacgattacacatttacgccacttaactaa

SEQ ID NO: 19055 - DNA, 198 bp, Escherichia coli
atgacaacgattggcgttctttacgacgagtggacgaaagagcgattcaggcgtcattacaagatggcaaaggtcatccgcaacaagccctatcgcaatgactaccgcaaggtcatggcaaaaaacatgcagaagaatatcgacaagatattcccacgtggaaaggccgtttggcgcttacttaaaaacgagtggtga

SEQ ID NO: 19056 - DNA, 201 bp, Escherichia coli
atgttaacagtaaaagtaatgtcgccaggtggcggtgaagagattcattgcgggttgagtgtagggttcaatccggggcagcagagcatcgcggtatcgggaatggacaaaaatgtattcctgaaacctggcgaggtcgcctacgtgatgaaccagaacgggaagacggtatctcgttacgagcataatgaccgccagtag

SEQ ID NO: 19057 - DNA, 171 bp, Escherichia coli
atggtttcagtaaacaaagatccgaaggaaggcgttgaatacatcactggtgctgatggtgtgaaaaggccaatggcttattacaaagcggctgaagagagggcaagaatggaaaatccccctaaatgcggatcatttttcgacatgctggaccttcaatggaagttgtga

SEQ ID NO: 19058 - DNA, 486 bp, Escherichia coli
atgaaaaaatcactgttaattatcccgcttctgctggctgggtgcgcaaaagtaagtgactatcaagcaagttgcgaacaacgctatcaaaagcttagcgatatggctaattgccttgatgccagtgtgaagaacgactcacgcatggcatcagcaccaacacctaagctgtatgtccttgctgcaaagatgctcgggcaaggtgtcgatgaaggcaagataagtgacgcacaggcaagacttgagcttcagaatctttatgttcaattacaaagccaagaacaagcccaacaaatagcacaaagccaagcattccagcaggctttattgaattatcaggctgtaaacacaatgcaagcgatcgagcaaaaagcgcgccagcctgttataactcaaccttacccaacacgcgttgacacatatacaaactgcaattcaggatttggaaacgcggtaacatgcaacagtagcagtaacatcagataa

SEQ ID NO: 19059 - DNA, 342 bp, Escherichia coli
atgaataatgtcgtgccactgttgccaggcgataaggtgaaaattcagagcggtcatttgcatggttggggacagccaacgctggcaatgactcatctctatatgatgatgttgaccaatcgtaatgccttgatcgtcaaactgaaccttatcaccatgccggaacagaccattaaagtgagtgagtgccaaccgacaactgttaggcgcattgtcgtactcttcacaaagcagcgtcagcaactgctggcgagccgggagtacgatatttaccgctctggcaaagacctgttcaacctgtccttgcccccgctgcgccagaaaatcagcatccgcagttag

SEQ ID NO: 19060 - DNA, 780 bp, Escherichia coli
atgagaatactcgttgctggcgcaacaggaagtattggtattcatgttgtgaatactgctattgcaatgggccatcagcccgtgactctggtcaggaatcggcggaaaatcaagttactccctcgtggaacagatattttctatggcgatgtttcaatacctgaaacacttaccgatttaccgaaagatattgatgccatcatttttacactcggctctgatggtcagggacgtattggcgccagagcaatagattacggcggtgtacgtaacattttgcgaatattcatggatacacctgttcgcatcgccctgatgacaacgattggcgtaactgagcggctcagtagctggaatcaacgtactgaagttcatgactggaagagacgctctgaacgcctggtcagagccagtgggcatatctacactatcgtcagacccggctggtttgattacaacaatgatgatgagcacagaatcgtcatgcttcagggggacagacgccatgcgggaacgccggaagatggtgttatctcccgggagcaaatcgcccaggttcttgtaacagctctgagcaacgatgcggcaaaaaataaaacgttcgaactggtcgcagagcgaggagaagcacagcaggatctcactcctctgtttgcagagctgcggaatgataatccacaaaaaaatgatggggttttcgatatagacaatatgccccttactgaagaacctgagtgcgttattaacgacctgaatctgtattcgaaagggaggtattag

SEQ ID NO: 19061 - DNA, 630 bp, Escherichia coli
atgcaggggcagacttttgacaaatctgcatacccgaaacttgcagccgcttatccgtcaggcgtgatccctgatatgcgtggctggacgattaagggcaaacctgccagtggtcgggccgtattgtctcaggaacaggacggcattaaatcgcatacccacagcgccagcgcatccagtacggatttggggacgaaaaccacatcgtcgtttgattacggcactaaatccacgaataacactggtgcgcatacccatagtttaagtggcagcacgaatgcagctggtaatcacagccatagagatggccgtcgatttaaccccagtgtttttaaagatacttatcaatatggttatacaagctcaggtcaaaatacctggggtgtacaaggctcagtaggtatgtctacggggtggttagcgaataccagtacagatggtaatcatagccattcactgtccggcacagcagcatctgcaggtgcacacgcgcatactgtcggtattggtgctcatacgcactccgttgcgattggttcacatggacacaccatcaccgttaacgctgctggtaacgcggaaaacaccgtcaaaaacatcgcatttaactatattgtgaggcttgcataa

SEQ ID NO: 19062 - DNA, 1041 bp, Escherichia coli
gtgaacaccgttggcaaatcggcattcgtggaggccgtcggtcgggcgagcgatgatgcggaaggttacctggattttttcaaaggcaagataaccgaatcccatctcggcaaggagctgctggaaaaagtcgagctgacggaggataacgccagcagactggaggagttttcgaaagagtggaaggacgccaacgataagtggaatgccatgtgggctgtcaaaattgagcagaccaaagacggcaaacattatgtcgcgggtattggcctcagcatggaggacacggaggaaggcaaactgagtcagtttctggttgccgctaaccgtatcgcatttattgacccggcaaacgggaatgaaacgccgatgtttgtggcgcagggcaatcagatattcatgaacgacgtgttcctgaagcgcctgacggcccccaccattaccagtggtggcagtcctccggtattttccctgacatcagacggaaagctgaccgctaaaaatgcggatatcagtggcagtgtgaatgcgaactcaggaacgctcaacaatgtcacgattaaccagaactgtacgattaagggcatgctggaggcgacccaggtcagaggggatttcgttaaagctgtatcaaaagccttcccgaaaaaagtcggtacgtggggtaacacggaaacaccagacggtacggttacagtcaccatcagcgatgatcataactttgaccgccagattattattccgcccattatttttaacggtatagcgtatgacgatccggggagcggaaataacccgggaggcacgcgatacacgggttatggttttgaagttcgcaaaaacggcgtattaatcgcatccagagaaactaaaggggccattcccggtagttacagtgcagttattgatatgcctagtggtggtggtagcgtcactctggagtttaagattttccagaaaggcaatcagggggcaggcaatatcaccgactgtacggtgattgtgaccaaaaaagcggcttccggcatcagtattcgttga

SEQ ID NO: 19063 - DNA, 942 bp, Escherichia coli
atggcgatgaacgtattgcaatcaccttcacgtccaggtctgggtaaggtgtccggtttcttctggcgtaatccggggctggggctgtttttgctgctgcttggcccgctaatgtggtttggcattgtctatttcggctcgctgctgacgctgttatggcagggcttttatacctttgacgatttcaccatgtcggtaacgccggaactgacgctggcgaatatccgtgcgctgtttaatccggcgaattacgacatcattgtccgcacgctgaccatggctgtggcagtcactatcgccagcgccattctggcttttccaatggcgtggtatatggcgcgctataccagcggaaaaatgaaagcgtttttttatattgcggtaatgttgccgatgtgggcgagctacattgttaaagcctatgcctggacgttattgctggcaaaagatggcgtggctcagtggtttttacaacatcttgggctggaaccactgctgactgcgttcctcacgctaccggcggtgggaggtaatacgctgtcaacttccgggctggggcgctttctggtgtttctctatatctggctgccgttcatgatcctgcccgtgcaggcggcgcttgagcgtttgccgccgtcattgttgcaggcgtcggctgatcttggcgcacgtccacgacaaacctttcgctatgtggtgttgccgctggcaatcccgggtattgccgctggctctatctttaccttctcactcacgctgggcgattttattgtcccgcagctggttggccctccaggatattttatcggcaatatggtttattcccagcagggggcgattggcaatatgccgatggcggcggcattcaccctggtgccgattgttctcatcgcactttacctggcgttcgtgaaacgtctgggagcgttcgatgcactctga

SEQ ID NO: 19064 - DNA, 201 bp, Escherichia coli
atggggtttagaaaaacaataatcacttcggtaggtttgatatttatttcattctcttttgtggcaaagtgctctcaactcaaaaatttgaataattactcagtgatgctttgtggaaaagtgtcaaataatatcctggatgatattggtggttataaagaaagaaatatattaatgctgcgagctataaaaaaatcataa

SEQ ID NO: 19065 - DNA, 1548 bp, Escherichia coli
atgtcagttaaaatagtcattaaaccgaatacctattttgattctgtctcgctgatgtctatctccacgcgtgcaaataaactcgacggcgtcgagcaggcatttgtggcgatggcgaccgaaatgaacaaaggcgtgttgaagaatttaggactgctgacgccggagctggagcaggcgaaaaacggcgacctgatgattgtcatcaatggtaaatcgggtgtggacaacgagcagttgctggcggagattgaagaactgttcaacaccaaagcgcaaagcggctcgcacgaggcgcgttacgccactattgccagcgccaaaaagtatatcccggaaagtaacctggcagtgatttcggtcaacggtctgtttgccgctcgcgaagcgcgtcaggcgctgcaaaatgacctcaacgtgatgctgttttccgataatgtctcagttgaagatgaactggcgctcaaacagttggcccatgaaaaagggctgctgatgatggggccagactgcggcacggcgattatcaacggcgcggcgctctgctttggtaacgccgtgcgtcgcggcaacatcggtattgttggcgcatctggcaccggcagccaggaattgagcgtccgtatctatgaatttggtggcggcgtttcacaactgatcggcaccggcgggcgcgacctgagcgagaaaatcggtggcctgatgatgctcgatgccatcgggatgctggaaaacgatccgcaaactgaaatcattgtgcttatctccaaaccgcctgcgcctgcggtggcccgcaaagtgctggaacgcgcacgcgcctgccgcaagccagtggtggcctgcttcctcggtcgtggcgaaacgccagtggatgagcaggggctacagtttgctcgcggcagcaaagaggcggcattgaaagcggtgatgctctccggcgtgaaacaagaacatctcgacctgcatacgcttaaccagccgttgattgcggatgtgcgtgcgcgtctgcaaccgcagcagaaatacattcgtggtctgttctgcggcggtacgctgtgtgacgaaaccctgttcgcggtgatggaaaaacatggcgatgtctacagcaatatccagcccgatcctgaattccgcctgcaagatatcaaccgcagcatcaaacacaccttcctcgattttggcgatgatgacttcaccaacggcaagccgcatccaatgattgacccgaccaaccgtatcagccgcttgatcgaagaagcgcgcgatccagaagtggcggtgatcgtgatggattttgtgctcggatttggatcgcatgaagatccggtcggttccaccatcgaggcgatcaaagaagcgaaagcgatcgccgctgccgaaggacgcgagttgatcattctcgcctatgtgctgggcaccgatctcgatacgccatcattagaacaacaaagccagatgctgcttgatgccggagtgattctggcgagcagcagcaccaataccggattgctggcgcgtgaatttatctgcaaaggggaggaagcctga

SEQ ID NO: 19066 - DNA, 1023 bp, Escherichia coli
atgttaaagcttgaagaattattagagtatgctgagcaacttaaggatgatgatgcggcgaaaatatcgttgtatttcattactagacatcttaaagcgggtatgagtagaaccgcaagagttgttgataaattcgattttaaaatcattaaagctccaatcgctccagatattgctaaattttttaagtatactttatcaaaccagattatttctcatgcttcgaaagatgatattgtgatgaaaaagtatactgttattgatgatgatattgataataagatttatgcctatgctatgaataacgcgatatcgttttcaaaagttattaataacgatataaagaatgataaaccagttgtacttacctctcttgctgaggttcagaatgatttgtgggcctattgtattaaagtccaaaagggggctgacgtcacttattctttccgaaaaatcagcagggggaaagtcacaacaaatgaaccacaaaatatgactcagcgcgtattcgctttgtttgataaaacagataaagagttaagatcatttgatggcagcgcagtcaattttgatgacaaaatcgattgtatttatataaaagatcaattttatgtatttcataagaaaagttttgaggctattgtaggcttggaggttgagtttacagaagctgcacaaaaaacattaaatacaattaaagaacttgatcttattgaaggtttagatgttattgaacaagctattcttcataagccatcactgagaaaaattctcactcatatcgctgagaaaggtaaccatacggttctggaaaagaatgatgttcaagctatgaatgatgtgctaaaaatgtttcagaacgaagagtttaagaccaatgagcatggtaaattagtcatagaagatgagaggcaaggaagaaactttctcaaactgttaaatgattattataaacaaggcatgactacaaaaaaatactatggtacggatagcggaaatgtgattaatcctattaaggcgtaa

SEQ ID NO: 19067 - DNA, 615 bp, Escherichia coli
atgagagtaaataaactacatttaggtgctagagtttcgctatttatagtgtcataccttcccctattctttatcatgtgttttgtgcaattgtatacttatagaagctatttaaattggaaaggtataagtgttgaatcattaactattttctttaaatactttggcgcggtcagtgtcattggtgtattatcattatttggtattgtaggattaacaatttttttaaaaaatataaaacgtcgatgcgccactagtggtagaactgtaagagttatagatattgaaaataaaaacaatgaatcaataagctatctttttacatatataattccgtttgtatttcaggatctatccactttaactaatgttatacctatagcaatattgttaacggtaacggctttaatatatattaattcaagcatgatacttataaatcctacaataagtattaattatactttatatcaagttacatatttggatttagaaagcgacaaaaaacgcactggtatggttttgactaaatcaaagtatttggaggaagatgatcttcttgatgttgaggacgtgggcccaaaacttttttatgctgaatcccataaggaatga

SEQ ID NO: 19068 - DNA, 678 bp, Escherichia coli; identical to SEQ ID NO: 9016

SEQ ID NO: 19069 - DNA, 315 bp, Escherichia coli
atgggagttgagcagaataatttcagggacatgttgtccggttatctctccggcccgccgcagacgcagcatgtgtttggtgtattcccggcggtccgggtcacgtacgcgggtctggcaggcgaagaatggctgaaagccttcccgctgcagactttccagtacggtgatggtggggatgtacgtatagttctggcttcgggacgtgtgtttatcttccccgaaaatccccggcacatggtgcatcagctcttcatgtgtcagtggacggtcacggcgtatctggtttgcagcataaccaaaacgactggctaa

SEQ ID NO: 19070 - DNA, 696 bp, Escherichia coli
atgatgaagcacatgcgtatatgggccgttctggcatcatttttagtctttttttatattccgcagagctatgccggggttgctctgggggccacccgtgtgatttaccctgaagggcaaaaacaggtacaactggcggtaacaaataatgatgataaaagtagttaccttattcagtcatggattgaaaatgctgaaggaaaaaaggatgccaggtttgtaattactcctccgttattttccatgcaggggaagaaagagaataccctgagaattattgatgccacaaacggacagatgccggaagacagggaaagtttgttctgggtgaatgtcaaggccatcccggccatggataaggcgaaaaccggcgagaattatctgcagtttgcaattgtcagcagaattaaactgctctaccgtccacagggactggttattccgccagaacaggcaccgggtaaattagagttcactcgtgaaaacggagggctgactctgcttaatccgacgccgtattatctgacagtgactgacttaaaggccggaaataaaagtcttgaaaacaccatggtacccccacagggaaaggtcactgttaatatccctggaggatacaccggaggagatattacttataaaacaattaacgattatggtgctctgactgaacaggtgaggggtgtggtgaagtaa

SEQ ID NO: 19071 - DNA, 537 bp, Escherichia coli
atgataaaaagcacaggcgctcttttactgtttgccgcactgtctgccggacaggcaatagcctcagatgtggcattcaggggtaatctgcttgacagaccctgccatgtgtccggtgacagtctgaataaacatgtcgtcttcaaaacccgggcgtccagggatttctggtatccgcccggacgttcgccgacagagtcgtttgtcatcaggctggaaaactgccatgcaacagcagttggcaaaattgtgaccctgacctttaagggaacggaagaggcggccctcccgggccatctgaaggtaaccggagtgaatgccggccggttaggcattgcactgctggacaccgatggcagcagtctgctgaaacccggcgcttcccataacaaagaccagggggaaaaggttaccggaaacagtcttgagcttcctttcggcgcgtatgttgtggcaacgccggaagccctgcggacgaagagtgtggtacccggtgattatgaagcaacagccacgtttgaattaacatatcgttag

SEQ ID NO: 19072 - DNA, 582 bp, Escherichia coli
atggttgtgaataaaacaacagcagtactgtatcttattgcactgtcgctgagtggtttcatccatactttcctgcgggctgaagagcggggtatatacgatgacgtctttactgcagatgagttgcatcattaccggataaatgaacggggggggcgcaccggaagcctggccgtcagtggtgcactgctgtcctcaccctgcacgctggtgagtaatgaagtgccgttaagcctccggccggagaatcactctgcgtcagccggagcacctctgatgctgaggctggcaggatgtggggacggtggtgcacttcagcccggaaaacggggcgttgcgatgacagtctccggctcactggtaaccggtcccggaaccggaagtgctttacttcctgaccgtaagctatccggctgtgaccatcttgttatacacgatggtgatacctttttactgtgccggcctgaccggcggcaggaggagatgctggccgcctggaggaaaagggcgacacaggagggtgagtattctgatgccaggagcaatccggccatgctgcgtctgagcataaaatatgagtaa

SEQ ID NO: 19073 - DNA, 405 bp, Escherichia coli
atggaagacgcctggcagattatcgatatgggggaaaccccggttcgggatttacagaatggtttttccggacctgaaagaaaattcagcctccggctcaggaactgtgaatttaacagtcagggtgggaaccttttctctgattcccggataagggtgactttcgatggcgtccggggtgaaacaccggataagtttaatttatccggtcaggcaaaaggaattaatctgcagatagctgatgccaggggaaatattgcccgggcagggaaagtaatgcctgcaataccattgacgggtaatgaagaagcgctggattacaccctcagaattgtgagaaacggaaaaaaacttgaagccggaaattattttgccgtgctgggattccgggtcgattatgagtga

SEQ ID NO: 19074 - DNA, 192 bp, Escherichia coli; identical to SEQ ID NO: 12354

SEQ ID NO: 19075 - DNA, 690 bp, Escherichia coli; identical to SEQ ID NO: 10368

SEQ ID NO: 19076 - DNA, 903 bp, Escherichia coli
gtgcctcctgaccaaacggctggagcgtgggcgcttcgcctggccgaacaggaagcgctgatccacgccctgcaggaaaagctgagcaaccgggagcgcgaaatagaccatctgcaggcgcagctggataaactccgccggatgaacttcggcagtcgttccgaaaaagtctcccgccgtatcgcacaaatggaagccgatctgaaccggcttcagaaagagagcgatacgctgactggtagagtgtatgacccggcagtacagcgtccgttgcgtcagacccgcacccgtaagccgttccctgaatcactaccccgtgacgaaaagcgactgttgcctgcggcgccgtgctgcccgaactgcggcggttcactgagctatctgggcgaggataccgccgaacagctggagttgatgcgtagcgccttccgggttatccggacggtacgggaaaaacatgcctgtactcagtgcgatgccatcgtgcaggcacctgcaccttcgcggcccatcgagcggggtatcgccggaccggggctgctggcccgcgtgctgacctcgaagtatgcagagcacaccccgctgtattgccagtcagaaatatacggccggcaaggtgtggagctgagccgttcactgctgtcgggctgggtggatgcatgctgccggctgctgtctccgctggaagaggcgcttcatggctatgtcatgactgacggcaaactccatgccgatgataccccggtccaggtactgctgccgggtaataagaagacgaagaccgggcggttgtgggcgtatgttcgtgatgaccgcaatgccgggtcagcgttggcacctgcagtgtggttcgcttacagcccggacagaaaaggcatccatctgtcacgaacggtgcaatag

SEQ ID NO: 19077 - DNA, 267 bp, Escherichia coli
atgctgcggtgtctcaccaatgccgggcatatcgaccagcgtcattctgcgttcaccgagctgcagggtaagacgatgagcctggcgggtgcagccgttcaggggatgcgtggcgcagatacgggactgaaaaatggcattacacagactgcttttgccggtgccggatttacccataatgccaattacgggctcgtaatgaataacaccgtggagatgttcaaggattttctggcgaatttcttcaggaagaaacgtcagatatga

SEQ ID NO: 19078 - DNA, 1008 bp, Escherichia coli
atgaaaaaatggctccctgcttttttatttttatccctgtcaggctgtaatgatgctctggctgcaaaccagagtacaatgttttactcgtttaatgataacatttatcgtcctcaacttagtgttaaagtaaccgatattgttcaattcatagtggatataaactccgcatcaagtacggcaactttaagctatgtggcctgcaatggatttacctggactcatggtctttactggtctgagtattttgcatggctggttgttcctaaacatgtttcctataatggatataatatatatcttgaacttcagtccagaggaagtttttcacttgatgcagaagataatgataattactatcttaccaagggatttgcatgggatgaagcaaacacatctggacagacatgtttcaatatcggagaaaaaagaagtctggcatggtcatttggtggtgttaccctgaacgccagattgcctgttgaccttcctaagggggattatacgtttccagttaagttcttacgtggcattcagcgtaataattatgattatattggtggacgctacaaaatcccttcttcgttaatgaaaacatttccttttaatggtacattgaatttctcaattaaaaataccggaggatgccgtccttctgcacagtctctggaaataaatcatggtgatctgtcgattaatagcgctaataatcattatgcggctcagactctttctgtgtcttgcgatgtgcctacaaatattcgttttttcctgttaagcaatacagctccggcatacagccatggtcagcaattttcggttggtctgggtcatggctgggactccattgtttcggttaatggcgtggacaaaggagagacaacgatgagatggtacagagcaggtacacaaaacctgaccatcggcagtcgcctctatggtgaatcttcaaagatacaaccaggagtactatctggttcagcaacgctgctcatgatattgccataa

SEQ ID NO: 19079 - DNA, 375 bp, Escherichia coli
gtggccttcacctccacccgtgcggcacgggaatggctgattctgaacatggcgggactggagcgtgaagaattccgggtgctgtatctgaacaaccagaatcagctgattgccggtgaaaccctcttcaccggcaccatcaaccgcacggaagtccatccccgggaagtgattaaacgcgccctgtaccacaatgccgctgccgtggtactggcgcacaatcacccgtccggtgaagtcacacccagcaaggcagaccgccttatcacggaacgtctggtacaggcactgggcctggtggatatccgggtgccggaccatctgatagtcggtggcagccaggttttctcctttgccgaacatggtctgctttaa

SEQ ID NO: 19080 - DNA, 315 bp, Escherichia coli
atggcgcatcatgaagtcatcagtcggtcaggaaatgcgtttttgctgaatatacgcgagagcgtactgttgcccggctctatgtctgaaatgcatttttttttactgataggtatttcttctattcacagtgacagggtcattctggctatgaaggactatctggtaggtgggcactcccgtaaggaggtctgcgagaaataccagatgaataatgggtatttcagtacaacacttgggagacttatacggctgaatgctcttgcagcaaggcttgcaccttattatacagatgagtcgtcggcatttgactga

SEQ ID NO: 19081 - DNA, 237 bp, Escherichia coli; identical to SEQ ID NO: 4905

SEQ ID NO: 19082 - DNA, 1113 bp, Escherichia coli
gtggattttgtactacgaaataattgcccttattatactataaaaggcaacactaaaaaagaaaacatttcatcttctgctgttttaacaacagccctgcatacttctcttctaaaaatcacaacggtaattaatgaaattaattctatttatccctttgatgtctcagttgttattccggttcacaaccgagaaacccttattctcgaatgcattaaatctttaaacaatcagactatagataaaaattgttttgaagttattttcattgatgactgttccactgacaggagcattgccgccattgaatataacatttcgagagaaataaattatcgtattatccgtagagcagttggttcagggaatgcatcagcgccgcgaaatgagggaataaaatccgcaaaaggtcgctatgtgtttttcttagactctgatgattccattcactctgacttactgtccgatggtattcagatagcttataaaaacaatagtgacattgtatatttcaagcaggtttcctctacagggagaggggttcctgtacgcccatttaaggcagacacgaataaagcagatattataaaaaaccatctttttagatcattaaaaatcttcaagttctttaaaagagagttgctaatcaataacaacatcttatttaacccatcaatttcagtctatgaggatatgcttttttcttgccagagcctaactgtagctaatacgatatctatactggcaagaaagggctactactctctgaatcgccatgaagaaccacatctatctaaaacatctttctccattaaacaaagagccttggtattacaaacaggtttgatttatatcttatcaagcaataaaaatgaagcagaaatagtaaaaatgtttaatgcatggctggttatttgcgttgagcacttggcatccatattatccaaaaaaagtttaacaactaatgagaagtctcacgtttttaacttgatacataaatcactcttaccatatacagggcttgtaaatgagtcccaaatatatcccgcacaaagagagcttgtcagttgcttaatctgtggagattattcttctttttgcgaaaaaatataa

SEQ ID NO: 19083 - DNA, 1140 bp, Escherichia coli
atgtccaataatagcctatattatatatatatagatacaaagataaaaggtgcatttgagcaacttattcgttactttcaatcacaagtatttaataacaaggattgtattagtgttttttgtaaatattataaggaaatagaacatttagctgtcgaggtatttaataaacataatataacgtttaagtttattaaaaaaaattcagatctatcctttatcaagggaaagattgtattttatttgtttaatgcacagtccaattgtcgtgtcgtagccaatagagatcttatccatgtttttgtaactcacggcgagagtcataagctagcctctgttaaaccaattattagaatctacgactatgtaattacatcaggtgatgttggagttgatagatatttgaaatcaggtatattcactcagtacgatatcaacaatgggaaagtgctaaaattaggcgatacttttatcggtagcaatatttttaaatacgaatcaaattcgcatagtcttgtctatgcccctacatgggagggtggagttccggaagaaaattattgctcgattagtatgtctatcgcaaaaaacatagataaattctgtaaaaaaaataacattaaaaaaatttttatacaacctcatcctaatttaggacatagagatgcaaagtatcgatattatttgaatgaatgcattgatttttttttgagatcaaatttaactgttttcttggtagaggatggatttgtacgacaatattattattttgttttttggaaaggcagaaaaaaaaaggtagaaaatatcggcgtttcatttgcaattactgatatttctgctatggaggtacagtttcactctcgaagaattccatgtagcgtagtgctaaaagaaaacaaggcggaaagaatacatatccccaaaagaatgctgccgttttataagaatattttatttgataaggtggtgtgtaattcaagtattccatcatgccctaatgatataattgattacatgatatcttattccctgcctacgttaaaacataaaacatattctgagagaatacaatggctatgtaattatgtgtgtgaagataagaaaataaagacaaaactcctagagtcaatatattaa

SEQ ID NO: 19084 - DNA, 1443 bp, Escherichia coli
atgtccagaaggcttcgcagaactaaaatcgttaccacgttaggcccggcaacagatcgcgataataaccttgaaaaagttatcgcggcgggtgccaacgttgtacgtatgaatttttctcacggctcgcctgaagatcacaaaatgcgcgcggataaagttcgtgagattgccgcaaaactggggcgtcatgtggctattctgggtgacctccaggggcccaaaatccgtgtatccacctttaaagaaggcaaagttttcctcaatattggggataaattcctgctcgacgccaacctgggtaaaggtgaaggcgacaaagaaaaagtcggtatcgactacaaaggcctgcctgctgacgttgtgcctggtgacatcctgctgctggacgatggtcgcgtccagttaaaagtactggaagtccagggcatgaaagtgttcaccgaagtgaccgtcggtggtcccctctccaacaataaaggtatcaacaaacttggcggcggtttgtcagctgaagcgctgaccgaaaaagacaaagcagacattaagactgcggcgttgattggcgtagattacctggctgtctccttcccacgctgcggcgaagatctgaactatgcccgtcgcctggcacgcgatgcaggatgtgatgcgaaaattgttgccaaggttgaacgtgcggaagccgtttgcagccaggaggcaatggatgacatcatcctcgcctctgacgtggtaatggttgctcgcggcgacctcggtgtggaaattggcgatccggaactggtcggcattcagaaagcgttgatccgtcgtgcgcgtcagcttaaccgcgcagtaatcactgcgacccagatgatggagtcaatgattactaacccgatgccgacgcgtgcagaagtcatggacgtagcaaacgccgttctggatggtactgacgctgtaatgctgtcggcagaaactgctgctggtcaatacccgtcagaaactgttgcagccatggcgcgcgtttgcctgggggcggaaaaaatcccgagcatcaacgtttctaaacaccgtctggacgttcagttcgacaatgtggaagaagccattgccatgtcagcaatgtacgcggctaaccacctgaaaggcgttacggcgatcatcaccatgaccgaatcgggtcgtaccgcgctgatgacctcccgtatcagctctggtctgccaattttcgccatgtcacgccatgaacgtacgctgaacctgactgctctctatcgcggcgttacgccggtgcactttgatagcgctaatgacggcgtagcagctgccagcgaagcggttaatctgctgcgcgataaaggttacttgatgtctggtgacctggtaattgtcacccagggcgacgtgatgagtaccgtgggttctactaataccacgcgtattttaacggtagagtaa

SEQ ID NO: 19085 - DNA, 606 bp, Escherichia coli
  misc_feature (555)..(564): n is a, c, g, or t
atggctatcgaaatcaaagtaccggacatcggggctgatgaagttgaaatcaccgagatcctggtcaaagtgggcgacaaagttgaagccgaacagtcgctgatcaccgtagaaggcgacaaagcctctatggaagtaccatctccgcaggcgggtatcgttaaagagatcaaagtctctgttggcgataaaacccagaccggcgcactgattatgattttcgattccgccgacggtgcagcagacgctgcacctgctcaggcagaagagaagaaagaagccgctccggcagcagcaccagcggctgcagcggcaaaagacgttaacgttccggatatcggcagcgacgaagttgaagtgaccgaaatcctggtcaaagtgggcgacaaagttgaagctgaacagtcgctgatcaccgtagaaggcgacaaggcttctatggaagttccggctccgtttgcaggtaccgtgaaagagatcaaagtgaacgtgggtgacaaagtgtctaccggctcgctgattatggtcttcgaagtcgcgggtgaagctggctcnnnnnnnnnngtctaccggctcgctgattatggtcttcgaagtcgcgggtga

SEQ ID NO: 19086 - DNA, 258 bp, Escherichia coli
ttgaaaaaatatggaatagtggcagcgctggggcttactttctttcttgccgggtgtgaagaagttaaatctgtagattggtggcaggatcaccctgacgaagcaacaaaaaaagtagctgaatgcaaaaagtctggtagtgatagtgataattgcaaaaatgctaaagacggcttatttagatataagcaattacatcctaaacacgttgactataaagatgcattcaaaaatgttttgggtaaagagggaagttaa

SEQ ID NO: 19087 - DNA, 1056 bp, Escherichia coli
atggcaacttctaggtttttccaagccgcccatgacgttattgttaaaaacattgaccagtctttgactggtcaattggataatttttcttcaatagcgtatcaattgggtaaatatggtatttctatctatgtgttatggtatggatacaccactgtagttgggaagcagaaaaccgcggttcaagattttctatggaatttatgtcgattctggctgattctcatttttgtaagaaatatgggagggtggctagatagtgctaatcaggctatagatggactacgggaaacatttgcaggaggtgatccatggaaatgggttgatgaactttgggagaaagttcagcaagtggcagcgtaccttatgtctaaagatacatctacatatgttaaaactgatggttctattgcggctatattgacatacgctggcggtattttagcgctgttactaacgtcaatagtttatcttgctgctgaagttacgcttaaaatgctaactgttactgcgccgcttttcattatttgcctttcttttggttttttacggcaaatgtttaatagctggctacagttaatatttagttcgtgtttgatttttctattttgcggtttggcaatcagagcgggaatgactttcctaaatggcatcctaaccatatctatagcaaatgcagatgagttaaatcttatctctactggtgctcaagccggggttgcaggtgcattcatggcctggattatctggcaagccaaaacctatgcttcccagctcgcaggggtaggtgttgaaggcgcgatgcagggggcagccgcaatggggattggtgctggcgtgttcggcgcttcccgtatggggcgcaatatgcttggtatgggtaaaaatgcaggtattggcgcatggaaaggtgttcgtcgtcaggataatggttttagccagtcgccaggtgttgctggcaagctggggaatctgaccgggcagggcgttaatattggcgctaagaggcttcgccaggctgcgatagatgcggcgaaaaagaaatatggaggttaa

SEQ ID NO: 19088 - DNA, 324 bp, Escherichia coli
atgaaagttattaatgcatctgctgcaagaagtgtgagaatcgccggagttgaaattatcgatagtgtcaaagcggtcgcttctgtttttactgaaatcctgttgtttatggtctggtttccggcaattgtctatgggctttatcgtgttgttatcgttttgtgggatgattcattaaaaccgcagtcactcatgggatttattggtttcataatggatttatacagttttgtaattccttcgctggcgattatagcagtggctttaatcgttgttttgttttcttttaaagcgttttctaaggtctggagaaaatcatgttaa

SEQ ID NO: 19089 - DNA, 651 bp, Escherichia coli
atggatatcaaacctaactcagtgatccacctggagccaggcgatacattacccggccataccaatctgaaacccgtacctgataagtatctcgatgagttaaaggcactcataaataaactcaatactcaatcaggtaatatttacctcaagttaaaacagatgtacgcctttttggatcgttttaacaaagaatttgtgagcacgtttacctcctgtcaaaaggggtgctcttcgtgctgtaaaatcgatgttcatttaaccgcgcttgaggcaacacatattgcacaagcaagtaaactcactgccagagacaacccgcttacgaccgggcatgagtcaaaatgtccgtttttgtctgagaagggaacatgctcaatctacaattaccgcccgctgttatgcaggacatatcatgtactcactccgccggagatgtgtaacgacccggatgcacaagtcatgcagtatggttctcaaagtgcgaacatgggaaatcacatctacaaaacaatagctgagtggatctattttcagacgtatcactgcactggtaagttagaaaccaaagatatcagagactacttcccttatccccgcgaagatatccaaagatttcttcaccataaccccccgcgccctttttgctaa

SEQ ID NO: 19090 - DNA, 255 bp, Escherichia coli
atgggtcattacacaatcagaacgaatgacgacgaagatcaggccattaaaaaggcgcaggaagcgaccggacaggcatcagccagcaaaacctttatgacggctatccttgagcttcagcgtaacagagacgagatagcgcagctcaggcgcgcactggcgcaggaaaaagcgcggagtcaggagttggtatcatcggtaaaacaattccgttccagcctgaacaatctgtttgatctggctgacgaccgttaa

SEQ ID NO: 19091 - DNA, 276 bp, Escherichia coli
gtgcataccacaaatgcgattatcctgtgcctggtgtcatatccctgcatcgttgcatgggttatctataaaaacagatttgtcgattacttgtttttagctctgcttacttgtttggggagcattttttcagtcgtattgtataaacagcccgactactcattgaccatatatcaggccgttgctgtcggctatgctgccgtgatcatgccaacggtgttagttttgagtgtcgttaatatccttatgggaaaagcagggagaacgtgcaaatga

SEQ ID NO: 19092 - DNA, 285 bp, Escherichia coli
atgaatacactggctgcactggaaaatacgtttcgtgatatgagaaagcatggctgccaaacagtcatggtcacgcagtctttagctgattttggccgctacagctataaaccgcgccctgcgtttcaggactggatcgaacggctgaagactggcgaacgtctgccgcgaggccgttactttgttggcaagaaacctggtggccgcctggtgctcattgatgaattggggggaacatggacagaaaaagtaacagtaacagtgattcataccaacgctggatga

SEQ ID NO: 19093 - DNA, 147 bp, Escherichia coli
atgatagagaaggctgacaaaagggaaaggacgcaaatcagtatgtcgttcgtaaagatgaaggacgtactttttaacgtgctggctatcggtactgttttagcagccctggtggtgatcttttatgaagtgcaaagcagcttataa

SEQ ID NO: 19094 - DNA, 312 bp, Escherichia coli
atgttcataatcagatatataaaagctcttataaatttctacttgttatacatccaacctatattgggggtgttccttataagtacaggcttatgggggttctatgcacctgatgagggaacttgtactaatctcaacattgagttatgcgctgtatcagctattgatgttctgaaacctgccatttttgtatttttaggcattatcaccgttgccggatggtactttaccgaacttcagccgagactaagaggggagggcaaatatatgaaggtaaaaacaggtgtaaaaccagaagattttgttaaataa

SEQ ID NO: 19095 - DNA, 354 bp, Escherichia coli
atgaaatatcaggtcaaagagtttattaacgaaaaatattctaaggctgttaaccttttaaaggataacctcaaagaacactaccatgttttttatggtttgagattaagtgagattctttttcctgccagtgaatacggctctgatgctttctttaatgagttcgaagcaataaacagcattacattgccattaattatttttgaaatgaatgaacgtaagcctgtagctatcattggctttgaacaaattgcaggtgctttttttgttgaacaattagacattaaggttttggttattgatgacctgtctgaattgctgaccaatgaaactctggatttattatacaactga

SEQ ID NO: 19096 - DNA, 237 bp, Escherichia coli
atgaaaaacaagaccataacgggagcggagctgataaacatttttgaaagttacggagcctacattttcccggatgagatcgaaattacagccaaagaatgcaatgaaaatggttcagtcttacaccgtggtctaaacgcagaaggatgggcgcatctttttgcaaaggaagaagcctatcagcaggaatgcgaagcccaggaagctgcaagtgatgatggacactttgacgaatag

SEQ ID NO: 19097 - DNA, 339 bp, Escherichia coli
atgaacacttatgttatcactttccaggctttaaactctaagaaagaaaaaatcacctgctccgcttttgtccattcagaaactctcttcctcgctgttaattctttcgaagataaaaatcgcggtcgtggttatgtgatcacgtctgttaatgagttattgaccgatgaattgacagctaaaaactccctcaaaaaaaatattaacttttggttcaacgaatgtggattaagtaaagaggagattattaaagaaattaataactggaaaaattttgcatacaccattaaagagctggaggaagccaaagaagaagcgataagagaactgcggagttaa

SEQ ID NO: 19098 - DNA, 951 bp, Escherichia coli
atggtatatataattgtattaaattggaataattctgaggacacaatttcttgtatttcgacactgctaaaacaaaactatatatattttagaattgttttagtggataatgattctactgatgattcattaataaaaatattggcattcctaaagaaatcgtgccaaaactatttgcacttaagtgaatctgaatcatatttagatgaggaaattcatacaaataaaataacggtcatttctgcaactagtaataaaggttatgccggtggaaataatattggcattaagtatgcgcttcagtcaaatgattgtaaatatatatgggtattaaataatgacacagaagttgaatcgaattcattatcactgttagtgagtgaaatggaacgagataaagaaattggaattttagggagcaagttagtttattatcataataaaaatgtcattcaaggcttagggggaaaatatcttccatggcgctttttaacacagcatattgcctcgaatcatttaataacttctaagtatgataacgatactatctctaagcaaatagattatattataggtgctgctttatttgttaaggctgaggtatttaagactgtagggctcttagatgaacaatatttcctttatttcgaagagctagatatttgtttgcgagcaagaaaacataactataaactaaaaacaattactgacagcatagtatatcataaagaaggcgcaacaatatctaaagaaaaaaatgccttctcagaatatcactatcttcgtagtaacaagttgtttatacgcaaattttatccacaaacattgtttttatataatatgatgttaatagctaaaattgcaaatagagttcgtagaggtcagtttgatctcgcaaaagctaacttaaaagtccttcttggaataaaatatgttaactcaaaaacatga

SEQ ID NO: 19099 - DNA, 1125 bp, Escherichia coli
atgagtggtggagatggtcgtggccctggtaatacagggcttggacataacggtggtaaacccagtggaaacgtgaatggctcatctggacatggaggaccatcatctggcggtgggtatcattacaatccgggaaaaggtcctgcaagcactgtaggtcctgacggggaggtgcatatcaacattaccggtggtatggaaaaagatcctccaggaaaacatcacggtaatggtggctcaggtaatggtcacggtgctggaaatcataacagcaattcaggcggcaatggaaaaacaacgtctattcctggatggagccctgactctgggaaacctggcagatatttaccgacaaataaagataagttaattaagggacttattcagtcaatagatgaccattctggaacgtacactatccattatactggtggtgcagtagctacagtaactgtaccaaacggtgatgtgaataaaatgaatgttcactataatatcggtagtgggccgtcatcaggtaataaactgactcgtgatactataaaaagctttttagaattcaaggcagaaaatgaagctaatgctgtaaatgatgcaataagcaaagttaatgacttttataaagagttagcatcaaaatacggcgataagttggagaaagaagccaaggcactagccgatgaagctaaagggaaaaaaattcgcaatgctaatgaggcgattaaagcctttgataggtacaaggatgtgcttaataagaaattcagcgtatccgaccgagaagcgattgcaaaagcactggagtctcttaataaagatcaaatggctaaacagttaaaaatttttggtaaggcctttggtgtcgtaggtgaggctattcagtgggggggatttatcagtggcttagttaaaggattcagaactggtgactggaatgaggcttttataagcggggaaaaaatcgcagtcggcaaggtagcatctgttatggttacagtggcatttagtgctatggcagtaaatcctattggtattttagggtttgcagtaattatggcagtgactagtgccttaattacagatgaaaggctgaaacaactaaacagctttattaacggcatttaa

SEQ ID NO: 19100 - DNA, 294 bp, Escherichia coli
atgtccagaatcaataaattcgtacttacagtcagtctgctgatttttatcatgatttcagcagttgcctgcgggatctacactcaaatggtaaaggaacgggtgtatggcctgaaacagtccgttattgatactgcttttgcggtggcaaatattgctgaatatcggcgtagtgtggcaattgatctcatcaacacgctaaatcctacggaggaacagctgttggttggcttacgccgactcggtttcaccctcttatttgtacgatgtcggtccttatctgatttccagtga

SEQ ID NO: 19101 - DNA, 513 bp, Escherichia coli
atgattcataatggaaaattcttaattgatagtaatgtcttcatagaggcaaaaaactttgcatataacttcaattattgcaaaatattttgggattttcttctcgctttacacatgaatggtctgatttatagcattaatgctgtaaaaaaagaactatgtgcaaaagatgatccattgtgtaaatggattaaagaagagttaccatcatcattcttcgaagatgagcatagttcaatagaaaattatgcaaagttaataaattggtcaactaaattagatgttaccgaaaaggcaaagtttgattttgcaagccatgaaaaagcagatgcttttttaatagcccatgcgatgacacatggatatactattattacccatgagaaaccatccggtggcaaacctaaaaaaagaataatgatcccggatgctgctgcttctcacggcgttaagacattaacactatatgaatttcttccaagatacgctagtcataatttttctttgaaataa

SEQ ID NO: 19102 - DNA, 1140 bp, Escherichia coli
atggcagcggttgaatttcaattgtctaggaagatgattgattggatagcaaattctcaaggagtttctatcgaaactcttgctgaccaagtcatgcccaaaaagattaataaatttcttaacggagtggtaagtaaatccgcagcagaaaaactggcaaaaattggaggaatccctttcggttttttatttcttgaaacgccaccaactccagccaaacccaagatccctgacttaaggcaagctataaatagccgtgagttaggaaaagatttttttgatgtttactatgatatagaatataaacttgagtggtacaaagactatttaagagaaaatggtaatgatgatccactcgattttattggtaaatttaaatttaatagaaaattaaattataaggttgttgctacagacatagcaaacacaatacattttgatatacaaaaagagataaaaaatgtcacttttgagagctatttttctaaagtggcaaaactaatagaagacactggcgtattagttttcaagaatggtgttgtgggtaataataataaaagaaaacttgacacgcgagagtttcgtggtttctgtatatctgatagcgttgctccgatcatttttgtaaatagctcggacgcgttatctgcgcaggtatttacattatttcatgaggtggctcatctttggcttggagtcgatggagtctctgggtgggacacagaaaaaaacatagaatctttttgtaataaagttgctgctgaaatcttaatgcctgataatctcttcaaatctttctggcttaatgcatccagcgataataattattatcgagtaaaagaggtttctaagttatttaaggttagtgatttcgcttgtgcaatcaaagcgttacaattagatttgatagaaagaaacactttggagataattaaagatcaagcttacaataagcccaaaaaagaatctaatggtggttctttctttaacacattacctgttcgtaacagtccaaaacttacgaatataataatttccaaagcaatgtctcaacaattaccattaagggaagcaggcgtactgctaaatgtaaaagcagatacagttgttgaattttataaaaaacgagaatctctatga

SEQ ID NO: 19103 - DNA, 1374 bp, Escherichia coli
atgttgcgtcgttctcttatttttctggtgttgttgagtgcgggatgtgtctcgctcgatcctcactacagtacgcctgaatccccaatcccggcgaccttgccgggagcacagggccaggggaaggcaatcagccatgactggcagcaggtgatccacgatccccgattgcagcaggtagtaaccattgcactgaatagtaaccgcgatgtgcaaaaagcgattgctgatattgactcagcacgggcgctctatgggcaaactaatgcgtcgttatttccgacggtgaatgcggccttaagttcgactcgcagtcgttcgctggcgaatggtacgggaacaactgccgaggctgacggcacggtgtccagttatacgctagatctgtttggtcgtaatcagagtttatctcgggcggcgcgggaaacctggcttgccagtgaatttacagcccagaacactcgtttaacgctgattgctgaaatcagcaccgcctggctgacactggcggccgataacagcaacctggccctggcaaaagaaacgatggccagtgcagaaaactcattgaaaattatccagcgccagcaacaggttggcacggcggcagcgacagatgtcagtgaggcgatgagtgtttatcagcaagcgcgcgccagcgttgccagctatcagacacaagtgatgcaggataaaaatgcgctgaacttactggcaggtacaacgcttgcggaaaatctgctaccgggaacactggaaagcctgccggaacaaatgataagtctggttcctgcgggagtatcatctgatgttctgctgcgtcgcccggatatccaggaagctgaacataatttgaagagcgccaatgcagatattggcgcggcgcgggctaactttttcccgacgatttcgctgactgccagtgccggtgttggcagtgacgcattgtcgtcgttgttcagccacggaatgcagatctggtcatttgcgccatcggtcacattaccgctgttcactggcggaagtaatctggcgcagcttcgttacgcagaagcacaaaagcgtgggctcattgccacctatgaaaaaaccgttcagagcgcatttaaagatgtcgctaacgcactggcgcggcggaccacgcttgaagagcaactggatgcacagcgccagtatgttaaagctgagcaacaaacggtcgatgttggcttgcgtcgctatcaggcgggtgttggtgattacctgaccgtgttgacggcgcagcgcagcttgtggagtgcacagcaggagctgctggcactgcaactgactgattttacaaaccgaatcacgctctggcagtcgctgggcggcggcatgtcatcactcaagtaa

SEQ ID NO: 19104 - DNA, 1770 bp, Escherichia coli
atggaacagcaatggtttgaacttaaagatgcaagacgtaaagactggaataaatcagtatggatagttctgagggccataaaaaatattgaagaagttgggaggtatggtttcctcggatataaagccgatttctttggggcgggaacagttgcattttctttagagcaattagataaggtcaaaaatcttggttggtcagatataggcattggccaacaacatgccggttatgttgatgatagtgaatatattccagccgaagttttcagagacacttggcgagaagtcgatggagtaaaccttgttttggagcaaaggtctgaagggggatatccaagacgatggtttttgaatccagatattattctgaccttaggattatttcaggatgggaatgtttgggtttgtccaaaggaagggtatgatgaagtagctagaattgagtatgaagataatgagccagtttctcttgagattaaaagtaagtatttgaaagattatttatgtgctcgtggcatgtttctgtatgtgactagctattatagccgggattgcatacttgagaatgtagaacatcttaaatgggaagaaaaagagctaaaatgtaaggatgatgaattttccgaatgggaagtaagaattactcctattcatgaggggggcgagacctatggaagcaagatggccgttttccatatgtccagaactgacatagatgaagatgacgaacttcctgatatatctcagtttcctacagatgaaaatacaaaaagtagtcattgggagagaggatttgaggggcgtaaattatatagagttatgggggagctatggcgtaattttgttgttaatccttctttagcgagcccaattgttcgaggtgatgaagtagattcaagctcttattttattattgatcttgaagggaataaaatatccggaaaagaactcatcgattcaggtaagtggctttggtttaaaccggatgtaatgaacattttaagtagcagaagaggtggagggttaaggttttattctcgaactacaggttctgtatcttgctatgagggatataatactcattttggggttaatgatttaggtttagttaatgtctatgctaaagacattggccttcttccaacatggcagcagcagatatgggctggattcaattgttcaccagagggtggcatatcaaaagaacttcatgcctctcaagttcttgcagagccagctgatactaaagcccctgagaaatacctgcctatttcattagattatataaataaatcaacattagaattatttgggttttgtctatttagagatcatgagtcgattcctgatatagtgaaaagtattcatagatttagatcagtcacacaggaaacattctatggtttggcaaaggatttagctcgggtaattgttgataacttagatgcagcttctatgcaaaagatcataagcccgggaaagggggagcgttggggatctattaaatctttggagaagcttttaagttcaaaatatgatagtgactttgttagaaagataatggctccactagtgggagtctatgaattgaggcatgccgatgctcatctacctggttctcaaattgaagaggcattttcattaattgatattgatcgcaattccccatttgtgatccagggagagcaaatgctccactatgttgtaaaaagccttttcacgatttttgagctttttagaaaatggcacaatcagccgagcgattga

SEQ ID NO: 19105 - DNA, 498 bp, Escherichia coli
atgacgggatcagactttatattaccgatggctgcgggaaccgtgcttagctgggccagttacagcatggttgctcacgttacatcaaaacggcagatcagcggtctaagagcaatttcatggggagttctgggcactctttcattggtgctgggcgtatgcgccttttccgctctaggtgcaaaacaaccgccaacaaaacaaaatgccttatgttcaggtaacagcccagaatgctatgcgaaaacgcatcacaacccggtcagggagtgcaagcaggtaatggacaagaaagcgacgtttcgccatatgtggcatgaaagtgaagcgcagccagttttcggatcttacttgtggcatgatgagaaaaagaaaacgattcaagcatttggagatcaggctaacactattaacagtctgggaatgctgacaccgcttcaatatttttgcgtttttaatgctaataccggagaggtcatagcggcttcttttgagtaa

SEQ ID NO: 19106 - DNA, 561 bp, Escherichia coli
atggcgattttcggctacgggcgagtctctaccgctcagcaagatacagagaaccagaggttggagcttgagcaatctggctggatgtttgattactggttttcggatatcgttagtgggaaaagtcctgctatgcagcgcaaagaattctcagagttgctgggcaagatcagggacgatgaaacgctggttgtagcaaaattagaccgtttggggcgtgatgctattgatgtgctcaagacagtccgaatgctatctgatcgcggcatcaaggtgatagtccatcagcttgggaatactgatctgacctccgctgccgggaagctgttactgtctatgttggcagcggttgcagagatggagcgtgatttactgattgaacgcactcaagcgggactgtcacgagcaaaagctgaaggcaagaagttggggagaccttctaaaatcgcgtcagaagcccgtagcgcgattgtagagaaaaagaatagcggcgctagtgttagcgcgttagcgcgtgaatacggcgtttccagagcgactatagcaactattgtcggttaa

SEQ ID NO: 19107 - DNA, 810 bp, Escherichia coli
atgttattagctcatatgtcggcagtggaagaacaacttcttgccacttctaaaatccctgcaaactctggtcactctttgcacaaaggaacgccgagagaagctttcatcagagaatttttagaggcccacttaccttcaacacttgccattggcacaggtgaaataatcgacagtgagtcctcgccaaattcggcacgacggcagtttgatattgtgatttataaacgtaaccttcctaagcttgattttggtggtggtgtgagtggctttcttgtggagtcagtgatcgcaacgatagaagttaagtccacccttgataaagctggaatggagcaagctattactgctgcctaccaggcaaagaagcttaaaaaaaatgaacaatggtctttcagtagtggttatatccctcctgccattctcaactttgttgtagcttatgatggacctcagcagatggatacggttcttggttggatcatcgaaatagagaataaattaggttttgctggaaacgatttacctttaggagagcagagaatacgcgtcccaagtgaatcgattgatggagtatttttactagatagaggctttgttacattcgataattttccaatcggatttttgaatgatgaagctcgaggaaagatgccgaaagctaagtgggtcgctgcaactgtgcagagaggaagcttgctatggcttttccaaatgttgactcaagcttctatgaacatcagtggaacttttttgaatttagttccgtatatggaaaagctgaaagttgatatccgcactggtgggtaa

SEQ ID NO: 19108 - DNA, 333 bp, Escherichia coli
ttgagaaccgtcgaaatactgcaatacaccttacgcaaaggcagcggtgccgcttttcacgccataatgcaggaaatcagtgttcccctacaccaaagccacgggatcgatgttgtttcgtttggcaactcgcttcatgacctggattgctactacttgattcgcgcctttgacagtgctgaaagcatgactgcggttctcgatgctttttacgcaagcgcagactggcgaagcggcccacgcgaagacatcgttggcagcatagagaactgcattaagacagtgattaacctaccatcagaaagtgtgaaagggctgcgggtgcaatcgtag

SEQ ID NO: 19109 - DNA, 837 bp, Escherichia coli
ttgaaatatttagaagaaaacatcattgacttgctaagtaaagcttatgagttattaccgttagttataaaacatcagacagatgaaagtaagtggtctaattccccagatttatatcctgattatcaagaatgggttagtgaaggtcatgataaatatgagaggccattttttgatattttaaagtcaatttatttaagtgtatctctttatgtggagaaaaataacacccctaactacctatctatttttcataggatttttggagaagactatgaaaaatgcaagtattataatgagtttagttatgatgactattggactggggagttcaataacacgttcttatcaaagacgacccaatttttaagtccttttggatttatcgattctaatagaaaagaaacagggttaatttatcttgaaaatatacttcacggaactgaatcttatcttaacgcattagggataaaccccataaaggaagcagatgtttatcaacctataaaacaggttgtcaatgttatttttccttcctcatctaatgcaggtagtgtttttttgaagcccaataaacaatacaaacctgatattttagtgcctgaactaaaagctgcaattgaatataagtatgcgaatagcaaagatagattgaacaagaacattgaagaggtagtatctgatacacaaggatacaccaatgatttcaattattcatttttctatgctgttttttatgtaactcaagattttatgggtaaaaataggtttatggagacctggaagcaacataacttcccaaagaactggattcctatttacatcgttggacattaa

SEQ ID NO: 19110 - DNA, 1941 bp, Escherichia coli
atggctcaacgtgataatctgtatcgccgtagcagcggtatttatgttgtccgtattgcagttcccgcccgataccgtctctacacgggacagcgtgagattcacgcttcaacagaaacaaacgacatcagaaaagcgcgagcgattgccgcagtcctattggctgtctggcagcgatgtttgggtgagtatcaaaaattggatagagaaaagttggtgagcagtgcgcctgctttggcgggcgaaggaatgatcagccttgctgaattttgcggtttaacgagtgcttccctgcaacaagttgctcagcgcctgcttgatacgaatatcccgctgttttggcttgctgatgggcgtcctgcttactatgtggaagacctttcactcgttgataaagacgatcctgaggtttctggatttatcatcgatagtgccattaacatcgggatcagaggttctctgagcggttatgttcagcctttggtttcatcacgtatattacgtcagatgatcgctggcgagccgctggatgcagaaaccgcatttaaatcctcagaggcttcatccaaagccgcttggttcgttgactttcccggtgtcgaaatctcgcctaattcattgatgattcatcgtgttcaagccgagcgcttacgattattttggctgtcacatagcaccgcagtttctccagtcatgccagagaaaccaaaagcaattacccctgtattattgccctcatcaataccggataatgaatatgtaaatcgtaaatactactcagtgaaaatgagcgagttatgtgaaaaatatattcgctacaagcgcggggggaaattcacggaaaaggcagagaatcgagttcgggaagggtttggtttattccttgaagtcatgggtgattcaaagcttgaaaaagttgaccgtgacttcctccgtaagtatgagagcttactaaggtcgatacctgcaaggcgcgatctggcaaaaataagatataaaatcaatgatgttcatgagttgattgtaaaggccaaagagaatggcgaccctctaatgagcgataatgccgttcgtaaatatatgcgaattctcttcgaggctttccagtgggctgatggagagggcatttttattaagtctcctgcgaataaattctttgcacctgttgaaaatgaaaagatggatcaggatttcaaatctgatttcactgatggggatttaaacgctatttttggtatgccttggtataaacgtggaactgtcgataaaaacagtcaggggcaattccatcattatcgtgcatttcattactggctaccgctaattggcttttttaccggagcgaggataaatgaattatgtcagctttatcttgacgatattaagcaggatactgtcggtttttatttcttcgaaatcagcaatgagcgtgcagatcagtcgctaaaaactattcattcgcgaagaaaaataccgttgcatccaacattgatcaaacttggattagtccgctattgcgaagcattgaagaaagcaggccatgaacgtttatttcccgagcttccttaccaccctgtaaaaggatatggcgataaagcttcggactggtttaaccgctcgttgctcaaagaacggttaggctttgaaaaagagagcaaaaaatctttccattcattccgtcactcgttttctaccaggctcaaacaagcaggaatcgacagcgagacgcgtgcgcagtttgttggacatatccgtggttctggcgagacagagaaccggtatagcaaagatcatccaccagcggctctctatgctgttcttgagagcgttacgctaggtctaccggaagttgctccatttgtttgcgaagatggtgtggttgctgtagctgatgcgctacggattaagcagaacaacaaatcgcgaaaagaaccgcaatag

SEQ ID NO: 19111 - DNA, 1401 bp, Escherichia coli
atgcaatttttgaaagatttaatctctagtatgtataaacacattgacaccagaataaatagtccaatcttaggtacattgagtgctatatttgtaattttatactgggataaattcacattgctattttggggagctggaacaatcgactccagagtcactcaatttaaatcattcttaactgggattaccacttcagaatatttattgatagcatttctgatactagcatatttatttttattacccttattaaattatcttactgggttaattcaaggtgagatagaacacataagatattgttctagcattaatcaaaaagtaaaaaaagagaaagaaagagcaaggcttattaactcaaaatataaggctgagcatgagagtgaaattgcagctcaagaaatcatcgaagaaatagcatttagcaatgaaagaatcgaacaacaaaaaacactaactgaagatataaaggaacgctctaaagcatcctcggtaattattaaagcgatgtacgaaaaatctcagaaaatgaaaattgaactggagacttctatcaaagaaaaacaagcaacagaaatcaaactctcacgagaggctatgagcagagagagagtaaaaatgagctatgacaaactaaaatatcaaatcgaggaaaaaaagaaaatatcacaactttcctcagccttctatttaattaataaacttgacttaatacttactgctgattcaattaaaatctcgctttcgggtttaggcgcagtaatcgctagtgtttttggatacacatcttttacaaaattactcgaagatgaaaatttcaacacagattctttcgaggcgattgattatataatttactcagaaagtttaatagcggatattaaatcaataatcgaagacgaaaatattgatgaggatattgacagctacactttatttgaacatttacagaatatattcgaagaggatctcaatataaaaatccttacaaaagatgaggtcagtgaaaaaatacgtgacaatcttgaggaaaatggtatgtacgacttgattcattgtgatgaagtaagtggtagcatagcagaaactaacgcttactttgactatgtagaaaacctgcaaattatagatagcgaactcactgatgaatcgtttaaagtcaagttcgagtgcatcctttcaggaaccactcatgaagacaagccttattgcggtgaagaaattgatgtctcctttacaaataaaagtaaaatcatactaggcaagtttgctataggagaagcagaaattgaagagattgggagttctgtgaaagactatcatgaagaagatgattacgaacctcaagaaatcagtaataaagttaatgaaaaaaacacgataatgagttttgaataa

SEQ ID NO: 19112 - DNA, 189 bp, Escherichia coli
atgaattcaatatatgataagcgtactaaagctttcaagaaagcggaggcgagtttatatttatcaaacaaagatccgcgagggttaccatactatgaactaataaagagcaaggtcattaatggagaattgacttatgaagaagctagacttgaggtatttaactattacactggaaaatcaaaataa

SEQ ID NO: 19113 - DNA, 213 bp, Escherichia coli
atggttgattataatagcttagttttggaagggctaaaaatcctttttttcgacaaaaataatgaatttgtaaaaaaactctatgatcccttgataaatattctgtgcattgaagactattattttgctaccggaatttatgattcagaagatgcgtccaaacaaattgaaaagctaaagaaaacaataaatgattataagtttaattattag

SEQ ID NO: 19114 - DNA, 1308 bp, Escherichia coli
ttgttttctgtaaatgcttatgctggtcaattagatagtagcggattacttgatacgttattagataagtttcagcaagtagccagcacatggtcattagtaattggtgattatgcaaattggctcttctgggggctggtattaataagtatggtttggacatttggtatgttggcgatgcaaggggaaggtttaatcagtgcacttgcagaaatagttcgtttttttgccgtgattggttttttttattatcttttaatcaacggcccagccatatcacaatctataattaactcaatgagacaacttgcagcaaatgctttaggaacaagtactggtatttcaccctccagcatagttgatatggcttttgtgatattaacaaaggtcagttcagcagcatcaatttggtctccaatgatttcgaccattatgataaccgtcgcgataatagtattagtagtaatggcgcttatcgcgataaatatgctaataatgttagtttctgcatgggtgttgtgttatgcaggagttattttgcttgggtttggtggctcgaaatggacttctgatatagcaataaattacttacgcacagtattatcgattggtattcagttatttacgatgacattaatcattgggattgggcaatcatttattgatcagtatttttctattattaaaaatgatattcctgatcttaatagtcttattgttttacttctggcgtcaattattcttttagtattgacgaataaattaccgttgttgttatcaggcgttgttggaggagcgtccttacaagggatcggtggttttggagcaggtatgattactggcgctgctactactgcaatcagtggcgctgggacaatggcaatgagtgctacagctcaagtcagtggtggtgcttccgctctaaaagcagcatttgaatctgcacaagcggcgatggccgaagaatctggttctggtgataaaggtggttcagatggaggatttggcggaggggaagataccggttccgtagatacttctggaggacaaccatcaggcggttccggtggttcttctgcagggagtaatacaggtagcgtcagcggaggaagccaggggtttgcttcatcattctcacgagctggccgcatggcttctcacatggcgagcgggctgtctaacggagcttcggagtatcagatgatgaagggaagtgctaattctatccgaacacaacagactgttggtggggaaatagcgaatcaaatacgtaaacacacagccgatcgtcagagtaaccacgaatag

SEQ ID NO: 19115 - DNA, 252 bp, Escherichia coli
atgaagacagaaactgcggaaccaacaaccgtgggagaaatgcttttagaagaatttttgaaaccaatgggtatgtcttcacgtgagttggcagatttgatgaagatcacggataaaagaattgaagatattttgatggattataaaaaaataaataaacgcgaaggactattactcgcgaagatttttcagacagataatgacttttggaccaggttacaaagagcacattttaaatggctgagaggataa

SEQ ID NO: 19116 - DNA, 681 bp, Escherichia coli
atgatttctcgttacaaatggctattagttaacacaccatctagattggatgatgttgtggaaattttgcacaaacataaatttagcaataaagagagtaaaggttatatcattaataatattgataatgaatcattaagtgccacctttgtggagcgagtaattcaacatgaaaaaattaatagaccagatggtacagaggatgacattaaaattgagcgctttatctatacgtcatttaagatgaagatttttgataatgatacatatctcatgcgagtggaaaatgcaccgcgggctttaaacgaattctttagtttttggaaaaagattttcaatgaaaatttttatatagaaccaatcaaaatagatgtaatgaatacaatattttctattctaaattctgaatttagaaatgtgaagataaagaaagtaaaagcttctggtattagtattaatattacaacttctgctagcattgaagttgtttcttctcataatgctttggaaaattttctttcagagtttggtaagcgagagtttaaatttgattatgcgaaagtacaagctattttcaatggctcaccctgttcgttagatattaaaactacaagtattttatctgatagtgaggttgcaattgaatttttagaaaggaaattaataagaaacgacgagtga

SEQ ID NO: 19117 - DNA, 1113 bp, Escherichia coli
atgagtaataaaggagattatgggaacagaactggtgctatctatagtgcaacagataaagccatgtttgacgcgctgcagcaatataaagtaacaagggatgatataaaagaactgtattttacgagaggtgttattatttccaataaaacatctaaagaaattttggcagataatttttcaaaatatattcatggctatgaggattatgagtttctctcaaagatattaggcgtttcaacgcaacgagagcgagttaaatccgttgatttaattagcactgatattactagtgaagatatagaagaggcattagataaagttaaagaacatttatcggttaccagcaatgatattgttgattataacatagttggaaaaagctatagtttgaaaattgaatatagtgaacctgattttacgaagtctgagtttagacaagtcgttgataaagacgccgaaattattatagagaaaaatgcgcaaggatttagcttgattgggccacacaataaaaaaatggaagttgttacatcattgatatttgatgcacttgcagaaaaacattcgtcattaatacgtgatgaaataaaccttgaagatgtaatagataaaagcttggttagtaaattatttgataaactaactacatcaatggaagggtacagcctggtaagtgtgaccgatgtttatgtatataatccagataaggatgatggaacaggttctcatattaaaaaagcatctctatcaggaactggtgtaacgttatcaaaagaattgggttcattatataaaaaaggtttttatatttggagaattgtttggacagttacagatgatagatatctcgattcagatatctatgagattgaagctttattttcagaacctgaaacctgttcagattttgcatttttggttaaaggttattatcctgtgaaagttgatagtacagacatcactgatacgcaccataaaaaccgagtaaacctcagtaaaagtgaagagatgaagttcaataaactagtattaaaaactgccaaagatcttttggaggagttttcaaaattagatgaaaacagcaaggatgatgaggagggcgctatatga

SEQ ID NO: 19118 - DNA, 1119 bp, Escherichia coli
atggctgagactatcaatataagtgagttggcccatgaagtgtccaacgatatattttcgtggtttaaatggaaggaaatcaatctctacgatgaaaacttttcgtgccgtaaatctgaagagcattttcccaaaaaaatagcgaatagcagtgaaagtgataatgaagtagaatcggaacaggccaatgaagttgagagtgaaaaaaagtgtactcatccggtagacattgtatttaaatacaatgatccatatagtggcaaagatgtgctttttaatactgatttaaaaagctatgctgctaaaagcattagaccaagcgatgtaagagatatgctcaagtcaatagctaaaactattgactgcgcttcaataagtcccgaatggaaaaataggtatggaatcgactctattaagtatgaaatacgagggatgcttttcatttataatcatgatggaaaatatcatagagatttctacaaagttttcaaaacagaaaaagttaatgaaagaagaaagttaggcatcaatttggcttctataggattaaaaagcaatcaacaaattcatatcgtagagcctttgatgattagctacatgacaacaattattgctgatattgataggcttcatcgagaaggaacatttccacgcgaagaatattcattctactatccagagctgataagaaataaaacaataagtggtgataaatattcaaggccggcgactatagaggctataacagcaccttatttaattattgaacatgatatggtggaaactaaagatagaagtggtcaactaaaaacaactcaggcaggattcgttatttattacaatcgtcctgggaatgatccttatgagtttgtttatctctttgatacattatccagatatcaaattttaaatggagaacataatataaggcttcgtttggcacattatgaacccgatccagatgtgatcagtcattttgaaaaagcaaaagatatttatataagaagttgggggtatgatgataataaaaagaatattcttgacagaatttcaatcaaagaaattaccctaatgcaaacttgttataaaacaaaagaagtggcaaggagaacgaaatga

SEQ ID NO: 19119 - DNA, 996 bp, Escherichia coli
atgatacaacctatttccggccctcctcctgggcaaccaccaggtcagggagataacctgccgtctggcgcgggcaatcagcctttatccagtcagcaacgtacttcgctggaaagcttaatgacgaaagtgacctcactgacgcaacaacaaagagcagaactgtgggcgggtatcaggcacgatattggtctgtcgggagattcaccgctgctttcgcgtcacttccctgccgctgagcataatctggcgcaacgtctgttggccgcgcagaaaagccattctgcccgccagcttttagcgcaattaggggagtatttacgtctggggaataatcgtcaggcggtcacggattatatccgtcataactttggtcagacgccgctgaatcagctctcaccggagcaattaaaaaccattctcaccctgttgcaggaagggaagatggttattccgcaaccacagcagcgcgaggcgaccgaccgtcctttattaccggcggagcacaatgcgctcaaacagctggtgaccaaacttgcggcagcaacgggggaacccagcaaacagatctggcaatcgatgctggaactttccggggtgaaagatggcgagttaattccagcgaaactgtttaaccatctggtgacctggctacaggcgcgtcagacgctaagccagcaaaatacgccgacactggaatcactacagatggcgctaaaacaacctttagatgccagtgaactggcggcgttatcgacatatatccaacaaaaatatggcctttctgcgcaatcatcgctttcttcttcccaggccgaggatattcttaaccagctttatcaacggcgggttaaagggattgaaccgcgtgatatgcaaccgctgcttaatccttttccaccgatgatggacacgttgcaaaatatggcaacgcgtcccgcgctgtggatactgttagtcgcgattatcctgatgctggtctggctggttcgttaa

SEQ ID NO: 19120 - DNA, 2595 bp, Escherichia coli
atgtctgatcgtgatactaccaaggaacaactggttgccaaaaaaagaacagttaaagatttagctgattatataaaaatcaaatcaggtacatcacctaactattcactctttcttggtgctggtgcatccgttacatcaggaataaaaactggtcaagagttagttgcaaaatggagagaagagatatacacaagactatccaatgaagaatatatcgatgccgaagaagctaaaaaatggctatccaaaaaccatccagtctggtacgacccaaacaatgaatactcctctctttttgaaaagaaatttgatctcccatctcaacgcagaagatttgttgagcttcaagtagacaaaaaattaccttcaattggatatgcttatctcgttgaactatttgaatcaaagttttttgatactgtcttcacaacaaattttgacgatttaataaatgaagcattttatcaattttcttctgacagaccattattatgcgcacatgactcatcaattaaaggcgtctcaattacttcttcaagacccaaaataataaaattacatggtgattatctatttgatagcataaaaagctctttaaaagaaaccgagtcattagaaggtaacactcgtgaaaaactaactgaattcactaaagaatacgggattatttttgttggttatgctggcaatgacagctctatcatggatgttttaaaacatttattaaaacaggacgattatctacggaatggggtatattggtgcgtaagacaaaatgacgccatcccaccagaactaattaggcttctaggtcaagagaaagtttattgggtagaaatagaaggctttgatgagttaatggcagaactagcccttgaattaggttgcgcactctcttttggagggaatcaaaaatccacaaaaagagagatgatgatccaaaattttataactgatgagtacaaattatctaaaaatgacattatcaaatccgatctttcaaaattaaaaagatacactctaacacatgacatatcatcattaataaatgagttatcccaaaatgacttagacgatcaaaagatccctgaagaaaatttcaagaatttgttatacattgacaacctcattagaaacaaaaaatatttaagcgctgagacaaaactaaaggaattaatcgataacgctgataatgacaatataaaatccaaatacctgcgcaggctaattgaaataaaagaagaacaaaaagatacaaagtctgcattagaaatcagtgataaacttatcgctcttgatgagtttaatataaattacgccctatcaagaacaaacatattcacagatctaaaggaaaaaatacattaccttaagggattgctagaaaaattcccatatagcataaaccttaagaatcatttaagcagaattgctattcttcatctggaaaatcatgacgagggattaataacctttgatgaaatacataacctaattgataagagcttactccaaagtagcgatctagacaatatcgcttggagaataaaatatgacgcaataatgataaaacatcaatcaagctatgataagaaagattgtaataatttaatacaagaaatgctcgaccaaataaatgaaatcaaccccacccacgatacatatttgtcgttatacactgattttacttgtgcattacaaaaaaaagaaaaaacattattgtgcatagaaacattatccaacatttacaaaacgtcatcgaaaaacaaaaagagaaacatattaaggtatttaacaaaactacacctgtctttatttgaaacagacttcgatgaaaacactcccagtttaatgaaaggcttcattgataaatatgaagaagagggcgacattgcaagaattgctcctttcattatatttaaagctcgatatgagataggctgcaacagagacattaatgcaggcattgaattagctaaagaagccatgaatcatccgtggaagagtaatcatgcggatagtattgtggacatattattaattaataaaaacaacatcaaactggcagaagagtttattgacagcctgccaagaaacaaatcagaaattaccattctgaaattaaaatccgatattgcatctttaaacagtgatttcaaaaaagcgatagaacttcttgatgaagcttatgataaaggttatggattcagtaattatattttaggcaaagcttataccaacctgcttgcaggaaactataaagaaacaattaatatagtcaatgaaaaccttgacaaaattaaagactacagagagagagatgttttaataataaacagagaagttgccaagaaaaaagacaatcaagacattaaagaaaacgacataaattcagttttagcacataacaattcaaaaggtgatgcagccatgtgtgcattctttttacttgacgatgaatttaaagcaaacaaacaactaaaaaacctgatagaaaaagattatatgaactattatagattcttagcttggccagcagttccccaaaacgctctcttaaaatataaaagcaatatggaaattgccgcttaa

SEQ ID NO: 19121 - DNA, 546 bp, Escherichia coli
atgctgaagaaccacatcatcaatgacagtacgatgaaaactggatatggctttatcgacgtaatcctgcgtcgccatcaccgtgctggcatcaatactcagctcaacagacgccacgttactgacaataataaccatgcggcaggtctgcgcacgcccggagccttcagccagttcaggcttatagctttctgccatgttagcgaccgcaatcagtgttccggcatcgtcatacagaccaagttcacgcatccagaagccgcccacttctggcggtacaaccagttcagccacgatatagtttttattcttgttatccacgctgactttattcagggcgtgacgccagacctcatgcaccagtttcgtctgaccagcatccggcaccggcaatttgccattaccgtcacccacggccattgcagacagggttacttttttcccgccggggacagtggcggctgccagctttgcggctccggcagtagtgataacggttttaaatttcgtgctcattgtttctcacttatccgggataaacagtaa

SEQ ID NO: 19122 - DNA, 423 bp, Escherichia coli
atgattaatgtagctcaaattttgaaaaatttagctgccttttgttcagtcaagggagttcaacctgatgaacttgtgaccgctatatttgaaaaagaatataaaaaaattgaaacatacaaggtcaattgtcttatttatttcatcatggattactccgaaaaaattgatgatgatgaaacatttatttctatgcgttatatttatgacgagaataaatcacttataaaaatagaacaaaagctaaacaatggacgttatcatacccagtgggacagaaatgacgcactgaagaaatatataataaatcaactttctgaacttccatatcagaaaagagacgaggtctatcagacaattttagaaaatatacctattgatgcaagttactccttacctccaaggctaaagcttgttagctaa

SEQ ID NO: 19123 - DNA, 1872 bp, Escherichia coli
atgacttattttactaacacagcagtaaatatcgaaggaaacagaaagttaagaactcctcaaatcgaggcctatataaaaataagggagtttttcagcgaccctgagcaccgtgaagctcttgtgattctacctacaggcacaggtaaaagtgggttaatttctattgcaccatacggtgtatctcaaaaaagagttttgattattacaccaggtcttgttaccaaagatagtattagaaagacacaagaagtattagaagataacttttggataaattatgacattgtcttcagcagtaaagatattcctgtagttagtgaatatacaccagatatatcttctgaacacttagaacaaagccacattatattttctaatatacaacgtatatctggaaatagaaaaagcgcactaattaatagagttccagaagatttctttgattttattatcgttgatgaagcacatcatgcaccagcccaaagctggcgtgatgctcttaaatatttctctaaagcaaaagttttacatgtcacaggaaccccttatcgtggtgatgctcaagaaatcccgggagaaataattcatgaaacaccattgtcagaagtgatgagagcaaaatatgtaaaatggttaagaaaagaaactgttaatgctcatgagttgtacttcacaactccagatatacctaacaaaaaactaactaaagaagatattttagaatttaaagataaagaatggattgaaaaaagcattgccctatctccggagtgttcaaatgatgtgattgagcatagtattttaaaactaaatatacttaaagaagcatcacctaaagtcccacataaaattctcgctgtaggatgtagcattactcatgccgaagatctagctaaatggtatgaagcaaaaggtctacgtgtagttataattcatagtgaaatggatgatgaagtaaaagcagacgctttccttaacattgaaaatcataacgccgatgttgttatatcggtaaatatgttaatggagggctatgaccataagtatttaagcattttggcaatcttcagaccttacaggagccttaatgcatttgctcaagttgttggcagaattctacgtgcgattcctgaaaacgagattactgcatttgaaatagataataatggaattgtgatttttcatgaagaaattggattaaatccaatgtgggaaaaattccagagcgaagtagatagagccaaaagaaccatcaatcgagaatatacatttactgatgattattatagagaaagagaaaactttttggctggtgtcgcaagtgatggggcttacgtcagtgatcaagattcttatttagaagatgttgattttaactctttattcgaagaaaaaagagctgaaataaacaaaaaagttgatgaacaattagaaatattcaggaaggcaagtcttgatgcaggattaacgttacctgatgacactctgaaattgtttaaaagagacttaattgaacaagaatctaggaaagctgctggagaaatagatcaagatctagtagaaaaaaggccgcatcttgctcgtaaaaaaatgagagagatcttaaccgctaagattaaagaagaggcttctaaccttctgataataaatggcctcgatgagaaaggacaagaactgcaacctattttttcaccacatcttaggaatctacagacaaccgatgcaaatgatgctattattgtaaaattcattttgggtaaattgtatagacagtttggtcctgtaaaagatcgagacaaccaaactttacagaactcaattaattcaatacctgagatcttagctgaagtgtcgaggatgttaaaatga

SEQ ID NO: 19124 - DNA, 456 bp, Escherichia coli
atgtcgttttgttggaatgaaattaactctggtgtcaagtctttaattctcatattatgtatgttgtctttaatgactttgtctttgtgggatgatgttgcaacaaagtttcttcatgcagctggaattatatctgcattatattttctagcgtcaccaaaaaaaacaataactaataatcctactttgttaattttcatctcattatgtcttttgggtatcgttaatatcatctggtattcacattataaagtttcaggctcggtttataccaatgcatatcgtggcccgatggaaactggaaaaattgccttgtgtagtgcttttattttcttagttctttttgctaaagatgagatgagaaccaaaataaaatttgggaaactaattctgttcgcatccttggcaacgcagttactttttttgcgcatgccatgtggcaacatttctatttaa

SEQ ID NO: 19125 - DNA, 531 bp, Escherichia coli
gtggcatatgctaaaagtgagcatggcataacccttattcgtgaggacattggcaactctttcgatgggggaggcggtgatagtggaggcggaatgtcagataaacttgaaaggcgaattgagcggctcgaaggtgatttatcgctaacaagaaacgaccttgcgacgcttgctgaacgcactacaaacctctcaaccaaagccgatgttggtgaggtgaaaggtgagctcaaagcagacattgctcatctgaaaggtgatcttaaatgcgatattgcgaatctgaaaggtgagcttaaatctgatacagctcacctgaaagagcagctcaaatcagacattaacagcctgaagggtgagcttaccgaagcgatggataaacgctttgacaagattatggatgagatgaatcggcggtttgacaaggttgatgataatacgaagtggcgttggagtggcattattgtgccagtatgcacaaccattttcacggcggcggttgctgtatttgttgctaaatttgttggctga

SEQ ID NO: 19126 - DNA, 399 bp, Escherichia coli
atgaagcctcttaaatttgatgattttccatatgcagacaggtctcttaatgataatgaacgtgggcatttgcaggttctgcaacagatttcgcccaaattatttattcaattcctcaaagatagaggagccagaacctcttgtctctcgtgtgggcgcccagatttgtttattccacatacggttgttcacggcacagaccctgaacttgatgattatgatgattcaaatgattgggaatatgtcactcccatacacaaggagaacgagcccattaacatctacaatactcggtatgaagtgtcatgttcttattgcggcttcacatccacatatacagcccacacagttgtttgttgggcaagagacaaaggatatatagtttgggagggaatctga

SEQ ID NO: 19127 - DNA, 189 bp, Escherichia coli
gtgttatgcaatgaaaaaataaaacagaaagatattggtgatatctatgaacagtttcttgaaaaggacatcctgttacagcgcgcaattcatgaaattgaacggtatctgtatgccacttttaaatatgaattaattttagaagaaaaattatatctctctattcgtaccaaagtattaatggactaa

SEQ ID NO: 19128 - DNA, 1638 bp, Escherichia coli
atgcggaagagtatggggaagacgccgatgagtgaactgttgcaaaagctgacccgtagctgttttgccgaccgggatgcactggatgtggcgcgaacacaggcggcgctgtggcagacatggctgctgccggtgacggcagacacgccggtcggggaagaccccggctaccacgacgatttcctgcgtatacgcgacgaaatgaacaaactttccggcacagataccggccttatctgccagcttgccgaatccctgctgctgacgcaggccaaagacgtgcgcatcgccacttactacatctgggcgcgactgcaccgcgacggtgagcgcggactggcggaaggactggcgctgctgaccggactggtggaacgcttcggtacgcaactgctgccctcgcgtccggccagccggaaaatggcgctggagtggctggcaggggaaaagatgctcgacagccttgcccgctacccggaagtggcaaaagaggattttgcgaacattgttgccgctcttaatcaactgacggtttccttcactgcatggcccgaagaccagcattccccctccctgatgccactgattaacgcgctggaatcacgtctggcgcagtcgggcgggatgaacgcggtggtgccgcaaaacagcagcagcgttactgcaccgtcatccccggtggatgcgccacaggtacagaccatcacctccgggcgtgacctgctcgaccaggcgaaagtgctggcccgttatctgaacgaacagccgcagggctggctttcggcgcaccggctgatgaaaaccctgcgctgggacacggtgcatgaactgccgccggatgtggacggcaaaacccggctggccccgccgcgcaccgagtcacgcaaccagcttaagcggctgtatgcccagcagaactggacggaactgctggagcaggccgacctgatgttcagcactggcgtcagccatttctggctggacattcagtggtatctgcatcaggcactgactaaggcgggcgtaccgtgggacaggtggacagccgttatccgtcaggacctggcgttactgctggaacgcctgccagggctggaaaatctggcatggaacgacggcacaccgttcgccgacgaggtgacgcgcaactggatagcgcagcaggtcatgatgcgggaagacggcgcatggcttgcggggaaagccgctgtaccgacagacgacgccacaaatgacgtactggcgctggagccggaagcactggcgatggcagacagtcagggcgtggaagcggcgctgggctggatacagacccgtccgggcatcaccacggcacgacagcgcctgttattgcggctgctgatggcacgggtggcggaacagtacggtaaaaacgagatggcgctcctgctgctggaagaactggataccgccgcacagggaataacgctgacgcagtgggagccagaactgctgtttgaagtaaaagcccggcaactgaaactgctgcgcctgcgggcacatcgccacgcggacaaggcggcgcttgcccggaaaatggacgctctgctgggttcgctggtggcaatcgatccggcgcggacagcggtactgtgtgatacgcagcataaggactga

SEQ ID NO: 19129 - DNA, 1797 bp, Escherichia coli
atgacatcgacgatgcatatggacagggccgataagaataaagttagcaccgctgaaattgaggatctacgggtcattccggttatttttctacccggaattatgggaactaatctgaaagcaaagtcttccaagaagaatgctaaagctgtctggcgatatgatagtgagacctctttgcttggctggtcacttccctcatcagggccaatagagagaaaaagggtgcttcatcctgagcgggtggatatagacaaccggggaagtattccgctgtcatcagggatacaggagcaggtctcagctatccgcccctacccctcatccaattatgatgaggaaggaaagaaacgttacgctgaagcactggataaggtaatggaaaataacgaaccggagaaaaagctctttggctcacgtagggggcgcggctggggtgaggtggctgcggcaagctatggcgcttttcttgatgtgctacagacagcactgtaccgggataagcccacgaaaaaagacaataccctgagtgcgacctatcagaaattaattgatgaaccactggggctggagtacggcccggattcactggatgaagaatgtcttgaagtcatgaaactgtatcagtttccggttcatgttgtgggctacaactggctgggttccaataggctttcagcaaaaagactaagtgaagaagtcgataagattattaagcggtatcaggagcagaaaatgaagtgccataaggttattctggttacccattcaatgggaggactggtggcacggtattattcagaatgtctgaccgaacctggaccgggccgggataagatttatggtattgttcacggtgtaatgccgtccatcggtgcggcggcaacctatacccgcatgaagcgtggtactgaaaatccggaatcgggtgcggctggcgctgtaggatatatcatcagccatgtacttggccgcaacgcagcagaaatggtggctattggctcccagtcttccggcgcgctggagttgctccctgccaatgattatggtgacgactggcttaaaatagttgatcgtgacggcagtacattaacactccccagagatctcccggtcaaagagggcggcaactccgaagattgtctttatagcggactttatctgaacagggataaatggtggaaactgatggatgagaatctgttgaatcctcttattaccacaccgagtaaaacacagatcgacggtgactggcagatatatgaaaatctgattaaggataatgtcaaaccattccacgaacagatggttaataagtatcatccgaatacctactcattttatggaaaagcacaagaaggggaaattccagaagcgcatcggactcaggaaacggcgatttggagcggcgctctggcaagcagtgaaatgggggagcctccgccagagccaaaaatgaatgacgatcgcctctatttaagtgagatcagtgccgatagaacggtgaaagatgagctttcgccggaagagcaggcatggaaattaaagggcgataacggtgtgatgtacggttgggtaggacagcgttttacactacgggatgcctgtgaaaatggcgacggtacggtgcctctgcgtgccgggcaaatcgttcacgcgaatattcaggagcgtctggcagtaccggctcttcacgaagcggcttaccgtcatgacgttagtcaggcttttgccttacgctctattataaaaatcgctcagcaggtaaataaagatgaaaaaatggcctttatttaa

SEQ ID NO: 19130 - DNA, 1590 bp, Escherichia coli
atgaattttaagaaaaaactcgaagagcattttaagcagttcgaagcatcccctgtgttatttgtcggctccggtgtgtctcgtcgttatcttggtgtgccatgttggcaagaccttttgaagcattttgctgaggcgattggggaaaatcatataaaattaaaaacaaaatctaatggtgacttacccgaatatgcacaattattggtgtcggcatacgctgagaaatggtgggatactgaagaaggacaattagcattaagtgaaaaagaacaggagaaaactttcattaacgaacagtctcctttgaaattgtcaatatctaaatatattgagaatgcacataaaaatattatagataatgatgagttaaaacacgaaatttccctttttgcgaaagcaaatattgatgggattattaccacaaactgggatgtttttctagaaactcttttccctaaatttacaacatttataggccaggatggattgattattggcaggagccacggtattgccgaaatatataaaatacatggttgctgcactgagcctaactcattgattttgacatcaagtgactatgataaatatagaaagaaaaacccttacctatcatctaagttactaactatgtttatagagaggcccgttattttcttaggctactctttaacagatgaacatatagctgaaatcctggaagatatagttagttgttttcctgatgccagtttggattttttacagaataaattattgtttgttgaatggaaacctgaacttgaagaggctgacattagtgattctgtgattcataaaaaaatcccggtaaaatatgttcaggcaccatcctataaagaaatatttgaagtgctaagtgaaactaaaaaaaggattccagcacatttattcagaatgataaaagatgaactttatgaattagtcttaaccgatgatcctaaaggaaaattatatgtgagagactcagagaagattgaagagggcgtcagtacaacagagtttgttgtagggtatggtgctatttcgatggtaaaaaaatcagagtcgatggcggcaaaaggattagttggactggagcgtgtagatcttatccgagaagttgtatttgaaaatggacattatgattgggaatgtgttgttaatgatgttctgccaaatatatgcaaaggcaatgcgcgtatacctgtttttcacttcttcaatcacgctaatttaattaatcccgatgggagtataattaacgaagcgggactctcaggtggagtattatcacgattaaatatcactccagtaagttttcaatcacaaggatgggataaacgacgttctgaaaacattcctgaagttagagttggtgtaaatgagttatatcttgcttatgatttcggattttttttgaggatgatgccctatatggagccagggttaatcaagcgtgacatagatgagcttcttaaaatattgaagaaacatatcgatgaagctatgagtattcaagctttgtcaagcaatttctgtcgattagtctgtgtatatgactacataaaaaatagcaaccgtttatag

SEQ ID NO: 19131 - DNA, 1164 bp, Escherichia coli
gtgagttggccgatggtgaaacttaaagattgctgcgaagttgtgggaggagccacccctaaacgcaatattgcatcttattgggaaggagatattccttggataacgcctaaagatatatcgaaccttaactctccttttatttatgaggctccagaacatatatcttcggcaggatataaagcagctgcaacatatatgttgccagtaggaactgtattacttacctcacgagcaccaataggaaatgtggctattgctggtattgaactttgtacaaaccaaggttttaaaagcttaatcccaggcaaaaatgttcacaataaatacttatatcattgcattaagaaattcgcaccaaaattagagttgcttggtaatggtgcaactttcaaggaagtatctaaaacagttgtagaacatttcgaaatacctttgcctccttttgaagaacagaaacgcatcgcgagcattctcgataaagctgatgttatccgtcagaagagggaagaaacagtcaaactggctaatgattatttgcgtgcaacctttttggagatgtttggggacccagttcgcaatccccaaaattggaaattagaaaaatttggtgatatcgcagattgtcagcttggaaaaatgttgtccaaaaaatcaaaaacagggtttttttcaaaaaaatacttacggaatgctaatgttagatggcgaaaaattgatatccacgatcttcttgaaatggattttaatgaaaaggaaatatctaagtttgaacttagaaggggagatttactggtttgcgaaggtggagaaataggtaggtgtgcgatttggaataaccaaattaaagattgttattatcaaaaagccctgcatagagtacggcctaattatagcttagttacttctgtgtacttacaggaatacttatattcaatggcaaaaaaaaatgccttctcagagtttatatctgaagtaactttcagccatttgactgccgaaaaactaaaaaatttacttgtaccagtaccaccattatcgcttcagaaaaaatttgaactgatatacaataaatttaattcattacttagtgataagtataacaatcatgacctttcgtttactttattatccaacaccattaatgaaaatatttttaaataa

SEQ ID NO: 19132 - DNA, 1635 bp, Escherichia coli
atgattactggcgacttaaaaagtaaaatcgacggactatgggaagatttctgggtgggtggtatcaccaacccgctgaccgtaatcgaacagatcacctatctgatgtattcccgaatgctggatacccaggaacaacgcgacgagaagcgtaaacaaatcgcgggtattgattttaaaccgcgttttacgccagaacagcaggagttccgtttcagtcactatagcaaccttggctcggatgagatgatggaagtggtgcgcgatggcgtattccagcatttccgtcagctcggccaggctgatgcatcgaaggtgacgctgctgggcaactttatgaaagatgctcgtctggagatcgttaagccgtcattgctgaccaaagcggttgaggtgatcaaaaacctgccgctggatcgtggcgacaccaaaggcgacctttacgaatacctgttaagcaagctgaccactgccggaatcaacggtcagttccgcacgccgcgccacattatccgcacgatggttgaaatgatggagccgaacccggcccgcggcgagacgatttgcgatccggcctgtggcaccggtggttttctggcaaccagctatgaatatctgctggagaagtacagctcgctggaatccatccatactgagattggcaccaacgaacgtggcgagctggaagagcaaaaaatctttaccggcgatctgctgacaccgtggcgtaaccatgtagataacaatatgttccacggttacgattttgataccaccatgctgcgtatcgccgctatgaacctgattatgcacggtgtggaagcgccggatattcactatcaggacaccatgagccagagcttcagcactaacttccctcaggccagtaaaaacgctttcaacctgattctggcgaacccgccttttaccggttcactggacgaggaagatatcgactccacgctgtcggcaatggtgaaaaccaaaaaaaccgaactgctgttcctggcgcgtattctgcaaatgctgaaagtgggcgggcgcagtgccactatcgtgccgcagggcgtgctgtttggctccagcaaggcgcaccagtcacttcgcaaaacgctggtggaagataaccaactggaagcggtgatcaatctgccttctggtgtatttaaaccttacgctggcgtggcgacggcgatcctgatctttaccaaaggcggtcaaacggatgaggtctggttctacgatctacaaaatgacggctacagcctggatgataagcgcaacccgataaaagacaacgatctgccgcatctgctggcaagctggaagcattaccgtactttacgcgggctaccggttgataactttatgggtgagaagttagcctcgttgcttaaacagcagtacccggaagggattgatgctggcgttgattttaaagatcgcacgcaggcggcgtttgttgtaccaaaagaagatattgctgcgcagaaatacgatctctctattaatcgttataaagaagtggtgtatcaggcggaggagtatgaagatccgaaggtgatactgaaacgattaaaagatctggaaaaagagattctggcagatctggatgagctggaggggatgctgtga

SEQ ID NO: 19133 - DNA, 3414 bp, Escherichia coli
atggagcagtctctcaattttgaaatgttgcgcagccagtggccggaactggctgaactcgcgtgcatggcggaacgctatgttcactccgatccggaaagctgtctggttaagctgcgcaactacaccgaattgatggtgcgctggttgtatcgtcaggagcggttgccggaaggtattaaggctaatctttacgatttaatgaatgctgatgtctttaccagcatgatgccggaagccatcatcatgaaaatggatgcactgcgtatccatggcaaccgtgccgcgcacggcggacgtatcaaagctaaagatacctactggctgctcaaagaagcgtatttgttaggaatttggctgtatgttcgctacgcccacggtaatgttgatgactgccccaaattcactctccctccattaacacaatcttcaggtcgtgcagatgaaaaacgtctggaagatgcaatcaaggcccaagatgaaagccgtgagcgcgaactggcgctacaacgcgcactacagcaagagcaggaaaaggccgaacacctcacccagcgcctgaatgaagccagagcgcgtaaccagcatgttgccgatattctctctattgatgaagcggaaacccgccgtcgcctgattgactctcgcctgcttgctgctgactggaatgtaggcgaagagcttaataataccgatcaggttacgcaggaacatcccgttaaagaacaacctaccgcgaccggagacggttatgcggactatgtcttgtgggatgaggcacacaaaccgctggcggtggtggaagcaaaaaaaaccagcgtcaatgccgagcaaggacgaattcaggccaggctgtatgcagactggctggaaaaagaatacggccagcgtccggtcatcttttacaccaacggctacgatatctggctgtgggacgaccataaaactcatggttatcccccgcgtcgggtgtttggcttctacagcaaggaaagcctgcaatatcttattcagcagcgtgaaacccgtctgccgctgaacagtgtgccgcacgtaaaagacaacgaaggtaaggccgttgccggacgtttgtaccagcttgaaaccattgcccgcgttagcgaacggtttaccaataaatatcgtcagtcattaatcgttcaggccaccggcaccggtaaaacccgtgtagcgattgcactgagcaaactgatgattgatgcccgttgggtaaaacgcgttctgttcctatgcgaccgtaaagaactgcgcaaacaggcggcgaatgccttcaatcaattcaccaatgagccgctgtatgtggtcgggaaatcgaaaaaagcagacaggcagaacgccaggatctacattgccacctatcccggcatgatgaaaatcatggaccatttcgatgtcggttatttcgatttgatcatcgccgatgaatcccaccgctctatctacaacgtctacggcgatctgtttaagtattttgatgccctccagattggcctgacggccacgccgattgacatggtgagtaaaaccactttcggcctgtttggttgtgaaggacgtattcctaccgccaactacagcctggaagatgccatcgccgataacaatctggttccctatgaggttgtcacgcacaccacagaattcctgcgcgaaggcatcaaacgggagaagttaagcgatgcacaaatccgcgagctggaagaacaaggcatagatcccaatacgctggagtttgatggcaaggcgctggatgaggcgatctacaacaaagacaccaaccgctatatcctgcgtaacctgatggaaaatggcctgaaagatcgggacggccagttaccaggtaaaaccatcattttcgcccgtaaccacaaacacgcgctgctgttgaatgaattattcgacgatatgtacccgcagtttgccgggcgcttctgccaggtcatcgataactacgatccccgcgctgagcaactgattgatgattttaaaggactggatgaaagcaccaacaaagagctgaccatcgctatctccgttgacatgctcgacaccggtattgatgtcccggagattgtgaatctggtctttgccaaaccggtcaaatcaaaagtgaagttctggcagatgattggccgtggtacgcgcctctgtccggggctgtacggttacgacgacaacggcaaaccgctggataaacagaaattccgcattttcgatcactggggcaattttgagtatcacgaactgcataccgaagaggccgaagtcacagcgacaaaatcgctggcgcaaaaacgcttcgaagcgtgggttatgctgggggccgctgcgcaacgtaaattcgacaaacaggcggtggatttagttgctcaccagcttcgcgagcaaatcaacgcactggatgaaaagtcgattgccgtacaggaaaagtggcagcaaaaagcgcagtacagtgatgaaaaggtgctgcgccagctttctccgaaaacacagcaggatctgctatctgttctggccccgctgatgcagtggctggacgtgcgcgggcaaagcgatgccatacgctttgatatggatattctggcggcgcaaactgcccgttataccaacccggaagagctggatgtgctctggccggccatcgtcgaaaaagtggagcgcctgccgccgcatttggctcaggtgcagcaacagggacaacgaatcaatcagcttcgtgatctaggctggtggaagcaagccagcctggaagaacttgaggatatccgcattcatttgcgcggtatcatgcacctgatggaaaaagacgcgacgccgaaatttggttcgatacaggtggatattaccgaagatgctaacctgatccagacggaaacccgcaaaaccaacatccgctcgattgatttcaaactctatcgccagcaagttcagggggcgctggagccgctgttccagcaaaacccggtgctgaagaaaatccgcaacggcgagccagtcacgcaaaacgagctggatgaactggcgaagctggtgctgatccagaaccccaacgttgatattcgtgcgttgaaagagttttatccgcaggcaaccgccagcctggataaacttttgcgtaccatcatcgggatggacagcgacgcggtggaagtgcgctttgctcagttcgccgctgataacagtctgaccagccaacaactgcgcttcctgtcattgctgaaaaaccacattcgcgattatggcaccattgaaatgcggcagctctttgaacagccttttacacatatccacaacgaaggcgttaccggtgtgttccctgatatagagcagatcgcccgcctgcaaaagatagtcgaagagctgggtgttgtgaccgacgcagcgacggtataa

SEQ ID NO: 19134 - DNA, 684 bp, Escherichia coli
atgaaaacacagcatgatcatcatgaccgcctgtctgtcaggctatcagtcattatcagccgcttactggctggtgaatctctggagcttaaagtattagctgatgaatttggtgtctcagaacgcaccctacagcgggattttcagcaacgtctgatccatctggatcttgagcatcacagcggaagttaccgacttatccgccaaacaggccgggagcacttacccaacacatttgcgtttatacgtaattcaggaatttcaggaatcattccggctcagaaccgcaggttaattcgactgattaccagtaactccggaagctcgccgtgccttatagggcatggagggctgccatctccagttacacaaaccgcctgttttctggaactggcggaagctatccgcgactaccgcgccgttacattattagttaacggtaaaagctacgaagcagtagctccccgccgtctgatatttcagtccaaaaactggtttcttgttgctacccgcaccagaaatttacaggtgtttcggatggaagatgttaacgccgtaaccgttctggatacctcttttcgcagaaagcctgaacttgacgctctgactgccagtgaagagtttatttcagccctccctcactttcgtttcataagtgacgtaattcagaccttcagagagtaa

SEQ ID NO: 19135 - DNA, 357 bp, Escherichia coli
atgaaactaatcattatacctgcattgtttgtatctttatttgcattccaccctgcttatgcagtcggggcctatgacctgcaatgtctgctggataacggcgagcaaatgacactcagccacgttagcaataccgtttatatcagtttgaaaatcctggcggtgactccgaagagagcggctctgttattaaactggatattccttccggcgaagcgaaacagactctggcggctaatccggaagcaggaaccgcttttttcacattacgtggagaaaatgaagatatcgaaggcgcggttgcagtcaattactcagaatatgatggtacaggtgatgcttattacactgtcatga

SEQ ID NO: 19136 - DNA, 834 bp, Escherichia coli
atgcaaacagaagctgaagtcttaaccgatcataacgagctaatttgctcgaccagcattgaacgtatcgtgacgggtcgtgatagtgcactgaaccagatagcgacgttaatccaaaaacttcatgatatctccagcctgacatccagtattggcggtgatgtggctggaacctgggcaatgcgaaatggatatgcctttgactgctggctaatgcagtcaacagacaaagcgatgccggtgatcacccgaaatatcgaccgcagtatctggcgcgatctcatgctgaagtccgggatgttgaccctgatggatgccgaagcccgcagtcagtgggcaaagaacctggaggagggcgatctcccggctattagcgaagccaacatcctgagtacctttgaacaactccaccacaataaacgggatgttttcgaacgtgggattatcaatgtatttaaagggttaagctgggactacaaaaccaataatccctgttatttcggtaagaggattatcgttaacaatctggtgaagcatgacagatggggctacagcctgaactggggctggcggcgagatcagcttgccgatctggagcgtatgctctatttgctggatggcaaacctatccccgataaccggcatgatatctccatccggtttatggattttgtgcgcgataatccgcatcagcagattttcgaagatgagttgttcactattcgctactttcagaagggcagtgggcatatcacattcaagcgactggatctggtggataagatgaatgatatcgtggcgaagcactttcccaggatgttgcctgcgaaatga

SEQ ID NO: 19137 - DNA, 273 bp, Escherichia coli
atgttattaaacgaggtaatccctatgggttcgcttactaaacaaaccatcagcgcacagatacctattgaattggccgctgctgttgagaatctggcaattgagttagatcgttctaaaagctggattattaaggaagcgttgaccagtatgctggccgaaagagaacggcgtcaccagagcatccaggccggtcttgcggatgtggatgccggtcgtgtgatgagccactcggacatggtggattttgctaatcgcttaaagaaatcctga

SEQ ID NO: 19138 - DNA, 276 bp, Escherichia coli
atggaaatttactggacgcttaaagctcaggatgaccttgagcgtatctaccgtttcgcccttcagtatagccgccagcacgccgatgacgttttggatcgcctgattactggttgtgctggtcttacagcacatccggcaattggtgtacagcagactcggtatgaacctcgggaagtccgaaaagtgttatttgatgattatgaggtccactacgaacttcgtgacaatgacatttatatcgtggatctctggcataccagagaagaacgatga

SEQ ID NO: 19139 - DNA, 798 bp, Escherichia coli
atgttacagaacaacatcaaacagctccgtacccagctatctatcactcagcgcgagttggcgtttatggtcggcaccagccagcagcaaattcagcgtatcgaaaccgggaaagttgccgcaaagctgggtctcgcacaggcaatatgtaatgctctggataagcctctaaacgtagtgttcccggaaagcgatcggttgataaacgacttccgcaaaaagcgtcgtaaaactgatgaagatcttgaggctatagccacaagcggcattgaaatggatagcggtctctggaccgtaaaactatggctacaggggcagcgggactatttgctgttgcccatttcagcagcggataagcggaggttttattattattttcaggaaaaaaacaccccaaacatagaacgcttcttcgtttttgattcttccgagtatcgttatgcgttaaatatgcgtgaagtggtatttcatcagttcctttctgatggtctgcggccaatcgttgacgaagaggatgatgcctacgaagacgattattttaatgtccatatcacgctggtaaacggcggaccagtgattccactgagtgttgagccagatgcgccgcaaaacgaagagacggatgatatcggccagttgaatgctttttttgacgcgctggattgcgagcctgaaaccacggatcgttttatgataaccgacgaagatggagaagatgctttcattcgtattggttctatcgctatggtgcgagtcgcgcttgacgcgttagaacctgtggaagatgatgaagagtaa

SEQ ID NO: 19140 - DNA, 819 bp, Escherichia coli
atgagcttctcatcaactcatacgaggtggctgaccaagcatgaagaggatctaagaaccgcagatggcaaaaatatcgaagtctgggttttccgtcatgaacaagacgaacaagtgctttcagaatgggcaaagcactttcggaaccactactgctttgacagtgaaatcgattatttccgtaggggatacgggtattctcgcgaagactatctcaacctaataaagtttccagacataaaagatgcgcctggtccaagcattcgtgcaggtgactttggagaagtattggtagctgattttattgaatacttgctcggctactgggttcctcgcactcgctacggtgacaaaactattcgaaacgagtcgactaaaggcagtgacataatcggttttgatatcatcaaggacggtattgtatcttcgaatgataggttagcgatatttgaagcgaaagcacaattctcagggaaaaaagcaaagccgagacttcaagatgcagtagatggctcattaaaagacgttgcacggaaggcagagtctttaaatgctattaaacaaagactgtattgtcgtaatcagcttgatgatgctgaaaaaattgaacgtttccagaacgaagtagattatccatatagggaaatatatggtgctgtagcgctctttgatagcccactttttgacagccaccttatatcattgaccgaaaccatatctcatccacattcaggtgatcttgtgttagttgtgatcacaggagatcaaatgatggcactagtccacgagctctataggagagctgcgcatgaggcctga

SEQ ID NO: 19141 - DNA, 3156 bp, Escherichia coli
atgaggcctgaaaagaaatcgcaactgctgcttggcgtctcccggtcaaaggcaaagatgcttgagttcagcattccggaagagcatcacatcaaaataacccaagatccggccaagcttttcagcatatctattggtctactgggagatctcgcagctgcgataaacagagaggagccagaggctaatttgctcacagagatgaaaaccaatcttttattttctgccagctttttcgactcctacctccagtcaaagttaaatgaaacgcttgatccatatcttatgcttcttggtgcagcatcatactatttatgtgaactcccaggcagttcatcagttttgataaaaaaattgaaaagagatattgatgcatctggaatttatggattgtactgtccaaatctagatggagccgggctggaatttttattgctgtggttgcttgaaggcgattcaagcattcattttgagaatatcgactcagtatttggtaaactcatagaaaacatttccaaagagttaaatatgtttttttcatctggaaatgacttcgcgattcgaagtgaggtgaaaaggctaagagatttagcatactttgctggcactccaaggcagttacttttaagcgatttgatatcttcaataattttgagaaaaatcgataactcaacgtggaagtgtttaccaaaatatagtggcctatcaattagtacctggaaggaagcactgcataacaatagctttattaaagaattttggccagcacagcatttattgggacaagcgaatgttttaagaggaaagtcagccatcgttcaaatgcccaccagtgcaggtaaaacaaaggcaactgagctaattcttcggagcgcgtttttagccaaacgagtgtctcttgctattatcattgccccatttagagcgctatgccatgaaatcaagaacagcctcgtcgaagcattcaacagtgaatcaaccaaggtagatgagttaaccgatgccctacagactgactttgagattgctgaacttttggggcaccaacaggtcctggtcgtaacacctgagaaactactttacgcccttcggcacgctccggagctaggggcacacattggcctattaattcttgatgagggacaccagttcgacagcgggactcggggcatcacatacgagctacttctgacgtcactacgcactatgattcctgaaggaacccaaaaggtcctaatctcagcagtcatcagtaatgccgaggcagttggattatggctaaacggggaaccgaatgtcgtcgaaggcacaaccctaattccaactttcaggtcgattggattcgcgagctggctcgatcaactgggaagaatcgaatacgtcgacagtcgcaacgctgaacaaagtgagtttttcgtcccgagagtgattgaaacatttaatctcggaaggaagtcacgagaacatactgaccgtttttttcctgaaaaaaatgatgggcaggctatcgcactttacctcggtctaaaattggcaccaaagggcagcatagctattttctgcgggcgaaagtcaactgcggcaagcatctgcgaaaaggcagtagatgttatcaagcgaggtgtgccactgcccttaccatccgattattcagatcaccaagaagtggctcggctaacacatctgcatatcaaaaatcttggggctaacgctccagcatctcagagtgcggaacatggaattttttcccatcatggcaatacaccacatggcattcgactggcagtagagcatgctatgcgtgacaatcttgtgcgattcgttgtttgtacatctaccttagcgcagggtgtaaatcttccgatacgatacctcatcgtgaccagtgtctaccagggtatggagcgcatcaaggttcgtgatttccacaatcttattggtagagcgggtcgagccgggatgcataccgaaggcagcatcctgtttgcggatccagtaatctttgataagcggaaggtgcggagcgaaaaatggcgctggaagcaggtgaaaaaactactggaaccacaaaattctgaaccatgtgtcagcaaccttctatcaatatttgaccccatcaaaagcgatgacgagaaaatctcaatccccatgggggcactagactttgccaaggactatatcgacaatcccgacaaaattgcgaatcttgccacaaagataaccgcattgcatggagatagaaacttttctcaaaacaatattgagcgtcaaatagcctggagaatcagtctaatatctgcagtagagagtttcctcctatcccattgggatgaatccgaagacggtttatcgcaagctgacgtgacccgcctagctgaaggtacgctagctttttttctcgcagacactcagaaaaaggagcatatccgcgagttatttcaactgctcgcaaggtacatttcaacaagtattaccgagccgtcccgccgaaaaatctatggtagaacgctttacgggattcaggatgctgaatctattgagaaatgggtccaatccaacactgacaaccttctctctattgttgatgaaaaagaaatcctcaaccatatttggcaattgtttattaagcatatcaacagtggtgtatttaccaagtttgatgaaccagaggtgcttaaagaaatatcgtatgaatggatcagtggcaaacccttctgcgacctcctagaaatcatccgtgaacgaaaagttaagatgatatggggtactaatcggagagagttcaagatcgaccatatcgtagatatctgcgaaggggcgcttgcatatgatgcaacgcttgttgtaggcgcaatatctgagttcatcggaaatcttaataaggatggcacaagggatctgctcaatcgtctgcagctttttcaaaaaagactaaaatatggtctacccacagacaccgctatttccctatatgagcttggtttttcagatcgagtaatagctcaggatctcgccacatccttgaagctagcggcgactcagaagaagtatctcgtgaaagagttgaaaaataatcgaggtaatgcaatgaaggtaatagaaaaatacccaatgtatttccaagagaaaatgtcagagttgatagaagatttctaa

SEQ ID NO: 19142 - DNA, 2043 bp, Escherichia coli
atgtctaaaaaagcattatctataaatttcccaatagagcgagtagttctttccgattttttaccatatgaagttcctattattttttcaaatagacatttctacaattttattgttaaacatcaaataaaacatgatggattgaattttatatggttaaagcgagattgttgtttaaatagtttaattctgcttttgttggggcttgaacagaacaccgtaatagttgaaatagttgataatggcataagttatattattacagatatcgagcatgctaaactgcctagtattgcctttacttttccaatttcgcataagcataaagaatacagatacttgtcactaatgcatcctaaggggcagttattaggcgttgatttttatagaaattataaggatttaataacatactattctaatattagcccatttagcctcagatcagcaaaaagggtcgctggttgtacttacatcgattcgaagtcacttattgaaagttttgacaaagaagatttaagtattgaggttgaaggccaggattatgaaaatttaaaatcgttttttgtgtataaaaaataccgtaatatttttgagttttatgaatctgaagatcatcattggtgtgaaaaacgttttaattttctctctaaattagatgtatctaactgttttgattcaatttacacccattcaatttcatgggctgttttgcaaaaaagctatgcaaaacaacatttaaataaaacaaagtcgacattcccatttaaatttgatcaattaatgcagaggtcgaactacaacgaaacaaatggcataataattgggccagaattatctaggatttttgcagagataataatgcagtccgtagataataatattatcaatgatcttaataaagacggtttagttcttgggggggattaccaagtatatcgctacgtcgatgactatttcatcttttataatgacgaggatgtgtttaataaaattagaataagtacgcagacaaatctaaagacttataagctaagtttaaataaatataaagaagagaggttttcgcgcccaataataacgccaataactattgccaagaaaaaaatagcgaatctgatatcggaaagaatatcctataacattactgataatgattctctagatgaagattcaaagaaaggaagtgtctacatacatcaaaatagtttatctaccgactttaaatcgatactttctgtatcaggcataacatattcggatatattaaactattcattgtctatcattgaaaggaaaatcaagacactttttaaagattataaagagctttcaaaagatggaagtggcgatcgccaattaattaatgctattgtatctgtggtgaatttcacatattttatatatgcagttgcccctaaagtgaatagtaccataaaattatgtaggataattcagcaagtaattatgtttgttaaagatcagaaattaggcgaggaatatcagcatatcgtattcaaatgtgtattcgataactcgtgttctattttagataaatattccgttgataaaacgacacctatcgaaaccttgtatttattagtgctgattaggcagcttggtaaatattattggttaggtgaaaaaagcttgatgaaatattttaatattggctttgatggtggtgtctactcatttgatgataacttaaattacttttctattacttctctaatgttttatatgagtgacaagaaaagatatgatggagtcaggacgcatcttttacttcatattgataatatttatagcatgaaagttgatacacttctaaatgagtctgaattggtgcacttaacgttggacctaattgcttgcccatacatatctgtttcttttaagaaaactctgctttctcgttatggtattgacgaatcgtatgtgaaacgaattatttcattaaatgaatattggtttacaaaatggaatgactttgattttgcgaaggagctggacgcgaaactgagcaacgctgtatactaa

SEQ ID NO: 19143 - DNA, 165 bp, Escherichia coli
atgaatgattcactcaaggcgcaatgcgttgccgagtttttgggcaccggactgttcctcttttttggcattggttgtttgtgcgccctgaaagttgccggggcaagtctgggactgtgggaaatttgtatcatttgggggttagggatttcgcttgctgtttaa

SEQ ID NO: 19144 - DNA, 669 bp, Escherichia coli
atggaaattaacgaaaaattactgcgtcagattatcgaagacgtgctggcagaaatgcaaaccagcgacaagtccgtttcatttcgcgcacctgtctctgcaactgtctcttcagtgccagataccgaaaattttctgaccgaaattggcgaagcccaacaaggcactcagcaagatgaagtcattattgctgtaggcccggcgttcggcctggcgcaaaccgtcaatatcatcggtattccgcataaaaacattttgcgcgaagtgattgccggtatcgaagaagaaggcattaaagcccgtgtgattcgctgctttaaatcgtccgatgtcgcattcgtagcagtagaaggagatcgtcttagtggttcaggtattgctatcggtattcagtcgaaaggtacaacggttatccaccagcaaggtcttccccccttgtctaacctggaacttttcccacaagcgcctttgttgacgctggatacttatcgtcagattggcaaaaacgccgcgcgttatgcgaagcgcgagtctccacaaccggtgccgaccctcaacgatcaaatggcgcgaccgaaataccaggccaaatctgccattttgcatattaaagagacgaagtacgtggtcactggcaaaaaaccgcaagaactgcgcgtgacgttttaa

SEQ ID NO: 19145 - DNA, 1107 bp, Escherichia coli
atgaaaatacttattactggttctaaagggtttattgctcgtaatttaatttatcgcctgcaggaagcaggctttaaagatttaattactatcgaccgtgagtcacctttgcaagagttagagcagggactcaaaattgctgattttatttatcatcttgctggtgtaaataggccaaaggaagaacatgagtttcaggagggaaatactgatcttacaaaattaattgttgactttctgctttgtaatgcaaaaaagactcctattatgcttagttcctccattcaggctgaatgtgataacgcgtatggaaaaagcaaggcatcggcggaaaaaatcattcaacattatggtcatgttagtggcgcagaatattatatctatcgattaccaaatgtgttcggcaagtggtgtcgaccaaattacaactcctttgttgcaactttttgtcataggatagcaaatgatcaagatatcatcattcatgacccaacagcagaggtcgagcttgtttatattgatgatttttgtactgatgctatcaacttattaaataacaagtacgcgtcaggttttaaaaatataaagccgacgtattcaataacagtgggtgaggtggcaaatctaatttataaatttaaagaaagtagacatactcttattacggaaaatgttggtcagggttttacgcgggcattatattcaacttggcttagttacttgcaaccagagcagttcgtgtatgcagtgccttcctatagtgatgaaagaggagtgttctgcgaggtcttaaaaacccattcctctggacaattttcattttttaccgcacttccaggagtaacgcgtggagggcactatcatcatacaaagaatgaaaaatttatcgttattcgtggaacagcatgttttaggtttaaaaatgttttaacaggagaacgatatgagattaatgttgcgtcagatgaatataaaattgtagaaactgtgccaggttggtcccatgatattactaatacaggtcatgatgaattaatcgtaatgttgtgggcgaatgaagtatttaatcgtgatcaaccagatactatagcgagagttttatcgtga

SEQ ID NO: 19146 - DNA, 1248 bp, Escherichia coli
atgaagaatcactacgggcttaaaacatttgttatggacagtggcgagcgctactgcatagtgatgaatcgctcttctggccttcccgtgtattaccctactctttatttaacaacacaactccgcaataggggggatgctttttcaacgatgtcagcggcggctagcaacctaattgttttgctccgctttttagatattcgtggaattgaccttgaacagcgttttttgaccaaaaatttcttaaaaccacatgagctggacgacctgcgagattttgctcagcgtaagcaagcaaagaagtcattaaatacatcctctaccctttggcttgatgagccggagtccgatattgttgataacggaacacagcattctaggctgacaacgtgtgccaactatttacactggtatgcgatgcatattttaaagacggcagaactggaagtggtccaacagatcgacgctatggcgcaacagataaagaagcgcaggccttctaaacagcgcagaagcagtgagctacaagataggtcactgagtgatattcaattggattcactatttgaagttatccttcctggatccaaattaaatcctttttcaattgaagtgcagcgccgaaatcggctgatgatcttgcttctgttttatcttggtattcgggggggggaattattgaatatcagaatacaggatgttgattttagtactaacagaatccgtattgtgaggcgagcagatgagcgggctgactctagaaccaatgagcctaatgccaaaaccagagaacgactcttaccgttgtctgaatctttagttctagaactgcatagttatatcattcaagatcggcgtaaagtccgaaatgctaagaaaaatgattacttgtttgtgacatacaagtctggaccaactgtgggtaatcctatttcgaaggcgggatatcacaaaattttttccgtggtcaggactgtctcgccgcaattgtatgcagcgaccgggcattcgctccgtcatacctggaatcgcaagttttcagaaagaatggatgcaatggatgagaaagtcagcgaggaacgccaagaacaactccgttcgtatttaatgggctggagggatggctcaggaaccgcagctacttacaacaaacgtttcattcggcaaaagggttttgaggccgctctggtattgcaagaaggcagcggtacccgtttaccagaggacatgaagaatgatgacgaataa

SEQ ID NO: 19147 - DNA, 2034 bp, Escherichia coli
atggctgagattttcctgtttaagccaaaggctacgctgacagcagcagaaaaccttgaagcattcatatctcagtgccgagatcaattgactgtattcggctctgatctcaattgggaagatcctgtttggccaaacataactgtatttgctaagttgggcattattacgagaaaacccatactggaagagacgcaagaccctgctttcattgattttgccaaagcctattttcgttaccagcatgggcatagcctcactagggcaaagaatgaaagtaaagccctccgtgcggttgaggcggctttgcttcaagtaaacggaaacgcaaatattgatggcctgtcgatttctgtgctggatgaagcagctgaattggcaaagcattactactccgatggctccgcatatcattgtggccgtgagattgagcggctggctaagtttgtagctgaaaaccagcttgtatcaagtgctgtacaaaattgggtcaatccaattaaacgtgcagaggataagaacaaaacgagcagagaggcgaagaaaaatagggaagataaacttccgagtgatattgctcttaatgcgttggcggaaatttttgccaacgacccaattaatgagcgagacatatttacaacatcggtttttgccatgttgatgtcggcaccttcacgtattactgaggtgttagcactgcctgtggattgcgaggtatttgaaacggatcgtgaagggatagaacgatatggttggcgtttttttgcggggaaaggctatgagggtgatatcaaatggatacccactgtgatggtcggtatagctaagacagccgtagctagagctagagtgctctctgaaaatgcacgacaactggccaagtggatcgagaaacacccgaataagttttaccgccatgctaactgtcccagtgtagctgatgatgagccattgacgatgaagcaggcttgtatggcgctcggttttgcacatcactctaaaaagacgtgcaggtcgtgtcttggtaatcgaggtttagctaaagaggatggtgtacatacgctaaatagcttatggcagcacacaatgtcgcgtttaccggatggctttccgtggtttgataaagacaagggaattaggtacagcaatgccttgtttgtactgaacgcaaatcagttccacgggaacagaggatgcataccagttgaattacataagccaaccaataatttcttcaacagtgatctgacgcctcgtctgtccttgaaaggaaaacatgcctgtatctttgatcgccatggttaccatgctgtaaacggagagccggtgaaattaacctcacatcaggctcgacacctgctcaacaccattacccagcgcggtggcctgtcaaacttggaaattgccaagtggtcggggcgggctgatgtgaaacagaatcgaacttacaaccacatgaccgaatacgagctggttggtatggctgaacgcctcgatccctcaaaagggctacttgggcatattggtgagattgaaaaacatctgcccgtgactattcgagagttcaatacattagagcatgccgcagttcatgtgacggagtatggctactgtgtgcatgactacaccatgagtccctgtgagaagctccgggattgcgtcaattgtactgagcaggtttgtatcaaaggcgatgatacagaaaagttggatcgaattaagaaacgtctggtgaaatcggaacgactgttttgtcttgctgacgcagcggtggaaagtggcgagatgggggctgatcgctggtatcaataccacaagaaaacagtcacccggcttcgtgaactagtcgctattttagagaatccagacattgaaaatggtgcccagattaagctccggggcaatgatttcagccagcttcgccgtgttttcgcaaagacgtctaccgtgaccatcgagcaaaaaggcaaagaaagtgaagaagctgtgatgctagatgatttgacaactttgttaggaggtggccttggctaa

SEQ ID NO: 19148 - DNA, 1050 bp, Escherichia coli
gtgcaaagggaaattgttaatgagcaaaaagacgaaccaaacataataggagctgcgctattatttaaaattccaggaattattttaggacttataattgcttggatatggtctatatggatagatgattcgcggctaagtgcatgtatattaatatttagtggattaattatcgcgcggtcattaacatttttttcatcttcttttattgcaaaagataaatatttaatttttactctaataggaatatgtacatatgtcttatttttctttattaagatgtttgtattatattacgcaccttctcttttttacatagcaattgtcactgttacagaaaatttattcttaattttattatattacatatatggatgtgataaagtaagtttcacaaataaactagtaaaaaaatatattaaagttttttattacgaagggttttatttaatactgtctggggcaatggttgtaatttacacaaagacagaccaactgtatattgcaaagtttatgtcttatactgtattggctaattatgcaatagctctcaaatttttaatgttgtatatagtgcctagttcaatttttacattgagttttgtgccaaagttaaataaaaacaataaagaatacgctaaaaacgtgcgtgttatgctattaggttcattgatttttggtgttgcatttgcttgtatttgtgcaatgactacaccttttttgatagaattaatgtatggagaaaaatataacttggcagagagttatatacttggtctaagtcttgtcattccattttgttttatattaaattcgactggccgctattttgtaaatgaggggttgggaaaaattgtattccaaagaaatttaattgcactattgtataatatcataggagggtattttctgatcaaatatggtggtgcttgggggggagtggttgcaattgtatcaagttacgctatcagtgcgttgattgttgttttttgtggtagaaaatctcgtaaggttttattaagagtgtttatagaaaatgagaataaataa

SEQ ID NO: 19149 - DNA, 1020 bp, Escherichia coli
atgagaataaataattttataatgcgacttggtttgaataaatattttggtgattttgcaagttatgaaaatgttatttgtttatataatacaagtatatcatcattgaatgttggtgatgaaattataaatgcatcgggtttagaacagcttaaaactatattttctactgagcaagtctatcatatgtctacgcatgttggttcaaaatcaatagggatccatcatgcaaatttatgcaaagaaagaattgtttgtggttcaaatcttttatgtgacacgatgttcagaagtgcaaattgggagttaagtcctatcgatatattaaaaatgaaaaaagtagtacttatgggagttggatggaataaatatggatctcgtacatctcggtttaccgctaaatattacaggaagcttctttcagattctgaaagaatacattctgttcgggatgattacacaaggaaaaaattaaatgaaatagggattgataatgtgattaacacaggctgtccgactatgtggatgttcactggagagcattgcgctgctattagaaaagtaaaagcagatagggttatttttactttgacagattatgacaaagattataaaaacgataagttattaattgaaatactaaaaaggaaatatgataaagtatatttttggccacaaggatcaggggatcttgattatttccgtgaaatgaaaatcaataatattgaagtagttccacccaggcttgatgaatatgatgccttgttatcgaataatgatatagattttgtcggtactcgattacatggtggaattagagcgctacagtataaaaaccgagcactaattgtagcttttgataacagagctattgaaaaagcaaaggacttcaatttgcctataataaatcgagattctttggctgaaaacttatcaactatgatagataataattatacaattgatatcaaaattaacgaggaaaacattcacaagtggaagaggcaattccaaaaatga

SEQ ID NO: 19150 - DNA, 1116 bp, Escherichia coli
atgatattttattatatccctcttttcccattatttttggggttgttatataacaataaagatatttttataagcaattattatttatttaaaagtgaacgattatttctttggatattcttactattcgtaatgattttaactggatttaaaggatatattgatccagattatgttaactataaattttattttgatttgattccggagttcagatatttagatagtgcgaatctatctagaataaaattgctaacctcggacgttgaactatcagtcgtatatggtatggcaatcctgaaaagcttaggattagggtttcaatactattacatttttaactcattattttttgtctttttaatagcaagattatcaagttattttaaaggttatgaatgtgttgtgggcttggtgatatattgtttctatatccaacccttatttattcaggtaagatatctcgtaggtgtattgtgtggcttaatttgtttaatggatgtatacaaaaacaataaggtgacattaagatctttgatttatttttttgttggatttttatttcataaagtaataatatttatcgttccattagtattattaaggtttatttggaaatatgtggtgagacatttgttcatcgcgtttttattaccatgtattttcattattatccctattgattctgtattgcaatatacttctttaataagtgatagatatgtaaactacttggtatccagcagtgagcaaaaggaactaggaagtgttttatcatttattgtacgagaagtactggcggtggctatgcttctattattatttatggcaaataactactcatttgataaaatcacccaaacgaagcaatctaatgtattaattatgattctgctggcaatgttgagtacatgggctttagcatggcagtttggtatgttatatagaattgcgctattatttgagtttggttgggtattttttctgattcaaaagaatgaacgatcaataaattttgcgatatttttaatactattcatttatatgattatacgtcttgttactggattatcagaactaaaaccatatgaatttgcagagggttgggcatactaa

SEQ ID NO: 19151 - DNA, 528 bp, Escherichia coli
gtgaccacaaaaaacaccgaaaaaaccgcagtcctgagcctgcggattcccgctgcgttaaaaacaaaactggaagcgcaggcagcgcaaaaaaacatgagcctgagcgattacgtaagggaccgactgaccgcgagtgacggggaaaaaattttgcaggcagcccagcgcgacctgtccgcgctcgaacagcgggcggaaaaagtgcgcaggcaagtggagactgacgcacaccagtacaaccgcaccgtcaacgagatgtgtaccgaactgcgccagttcgcagaccaacacaaacaggtggtaagaatccagcagcaaacgcaggagcaacaactggagcgcgtgaactccaaataccgcgagtgtgccagcgcgttcgacaacgcggcgagacgttacagccgcgacagctgggcgttgttctggggggacgtagccgctatcgcagtgacagcagtgttagccgccgtggtggttgtattcgtgctggacatgaccggatttctacaaaaaccgccgcagtaa

SEQ ID NO: 19152 - DNA, 342 bp, Escherichia coli
atgagcgccgcgcttcaatacttcgaagaaaatttaccccaccgtccctatcacacgaatgatctcgcttttggtcttcgcatctccggcaaagggcgtgcgcttcttgcgcggtacatccagcagaaccagcctcatgcgcagttctggctggtttttgacgttgaccgcgagggggccgcgattgactggagcgaccggaacgccctcgcgccgaacagctcggttaaggcgctgaaatatgccgccgcgattgcacgttcgctgtgtgagaaacttcgtgctgatgtgaactacagcggactgatttgcaaaaacccgttccacctggaatggctgtaa

SEQ ID NO: 19153 - DNA, 198 bp, Escherichia coli
atgcaagaagtacagtcatataacgcaaacatagttttgtttttccgcccccaaaaattgggggttctttttatggcccctcaaatcaattctgacgcaacttttcacttcagtagcaccttcgcattcctgacacaagaaaaacacgacagggagcgttttaggtgccttaaaatcgattttagatcgtcatcttga

SEQ ID NO: 19154 - DNA, 909 bp, Escherichia coli
atggttcttattatgaaagataaagtttttgttccgcctataaaatcgcaagggattaagactaaactggttccgtggataaagagaattgttcctaaaaactttaatggggtatgggtcgagccgtttatggggactggagttgttgcctttaacgttgctcctaaagatgcattattatgtgatacaaaccctcatttgatttctttttataatgcattgaaaaataaagatataacaggggatcttgttaaggattttttatatcgtgaaggtgaaaaactcttattaagtaatggtgagtattattatgaagtcagggaaaggtttaataattacaaggaaccgttagattttttattcttaaataggtcttgttttaatggtatgattaggtttaatggtaaaggagggtttaatgttcctttttgtaaaaaaccaaacagatttgcacaagcatatatcaccaagatttcgaatcaagttgatagaatttctgaaataatatcaaaagggaactatacattcttgtgtcagtcatttgaaaaaactattggcatggtaaatagggatgatgttgtttattgtgatcctccatatattggtaggcatgttgattatttcaattcatggggagagcgtgacgagcgtttattatttgaaacgttatcatctttgaatgctacatttataacgtctacgtggcatcataatgattatagggaaaataagtacgttcgtgatttatggtcatcttttagaatattgacaaaagaacatttttatcatgttggagcgtccgaaaaaaacagatccccgatggtagaggcgctaattacaaatatagccaaggatattattgatcacattgaaaaaagtagtggggatattttggtaattgaagagtga

SEQ ID NO: 19155 - DNA, 738 bp, Escherichia coli
atgagtcttcgttctgatttaattaatgcactatatgatgaaaatcaaaaatatgatgtatgcggaataatatctgcagaaggaaaaatatacccattgggaagtgacacaaaagttctaagcacaatatttgaattattctcaagaccaataataaataaaatagcagaaaaacatgggtatattgtagaagaacctaaacaacaaaatcattatcctgactttactctttacaaaccaagcgaaccaaataaaaaaattgcaatagatataaaaacaacatatacaaataaagaaaacgaaaaaatcaagttcactcttggtgggtataccagctttatacgaaacaacacaaaaaatattgtttatccatttgaccaatatatcgcccattggataatcggatatgtatatacaagagttgccacaagaaaatcatctttaaaaacatataatataaatgaactcaatgaaatccctaaaccatacaaaggcgtacaggttttcttacaagataaatgggttattgctggagatttggcaggatctggaaacacaacaaatataggtagcattcatgcccactataaagactttgtagaaggaaacggaatatttgactcagaggatgagtttttagactattggagaaattatgaaagaaccagtcaactaagaaatgacaagtataataatataagtgaatacagaaactggatataccgaggaagaaaataa

SEQ ID NO: 19156 - DNA, 1224 bp, Escherichia coli
ttggatagtttcctcaatgaatcagaatgtgagccattaaagagacatagggatgtcattaaaaatatctatatacgctcagatgatacaaatctcagaaaaattaagcaaagtattttagattttggatacattgcaaattatatcgatgaagaacaacttaaaaatgacgagtattcatcgcttttaatacgcgttttctttgccttatcattagaaattaaaagtggtgagttaagcgagagtgaattaagaaaaaatgaaccattcaaaaatggaaaaaccaatagcgatggttctaataatgtattttataaatatgacattagctacagaaatttgtatgcaggtgatctatgggctgatattttgttcaagggtgatgcaagtaatttaaagtcagcaactgatgagcttgtttattttaaacgacaaaaaaacaatgaacatcccctctggttcaaattatggaattttagcacactgaatgaagaacagtttatttctcttaccaatcagctagttttggagttcgactctcttcaggaggaagagcatcaggtttacttacataaattagccttaatcatttacttctcaaaaaatgctctaattagcaagggaatcgatgaaataaacaatacagtttatgaatacattaaaacctataaagacggctgggctattttggacaatcgctctaatgaagatatagtatttggaaacaatactggctatagctactacaatgattcagatgaagactttagaaaactatttaatttactcaggtctgaacgcaaatctatctctgacaaattaaagcaccaagcagaaatcatcagagcaaatgaaatatttacatatctttcgcaaggaaacaaggatgagctgatcaatattttatatactgaaaatcaatttgagccatttttcaataaattaaatgctgaagacttaatgaaggtcttattgcaatcaagtaatcacataacatcttactttaatcacattatagaggaacgttatacttcaagagatactctcaatggtctgagagcatataattacttgaaagttgaagaggcgttttggattgagttacaaaatataatctcgcaagaaataccccatctgactatgctaaaaaggcatttcatagaacaacttgatactaccattaaggaaataatagcactcctatcttcagtgcctaatgtttaa

SEQ ID NO: 19157 - DNA, 810 bp, Escherichia coli
atggggcgtgtgcgggagctgctgccggaaaaacgccgtaaagatgcggtactggccgttgaatacgttatgacagcaagccctgagtggtggaaagaggccacaccacggcagcaggcggagtttttcgcccgctctgagcaatggctggagaagaaatacgggaaggatcgtgttgtggcggcggtggttcaccgggacgaggccaccccgcacctgtctgcgttcgtggtgccattgacgcaggatggacggctgtccgcgaaagagtttattggcgggcggtcaaagatgcgtgaagatcagagcacctacgctgaatcagtaaaaaaactgggtcttgagcgcggcatcgagggaagccgcgccacgcatcagacagttcagcactactacgaatcgataaaccgtggcacccgtagccaggtatcgatctcgccggaggcgctggagccgcgtgtattgcggaagggcattttcaccaaagacgtggaagatcaggcagccatagccaaacgtctaagccacgcagtgaacgatggctttgcaggaaccatcgctatggcctctcagagcgcccagaacgcaaaaagagcgcgtgagctacagaagactatggatgcgcagcagaaacgcctacagagcgttacagagccttttaaggggctttccagagagcagatgaccgaaatcctgatgatggctcagcggtttaagcagcaaaaccaggaaaaggaaaaacagcagcgtattgaacgtgaaaaacagcgacagacgcgatcgcgtggcatgggtggtatggagcgttag

SEQ ID NO: 19158 - DNA, 408 bp, Escherichia coli
  misc_feature (351)..(360): n is a, c, g, or t
atgcgaaaaaaatataataatcaaaaaattaaattctacattggggatgttcgtgattatagaagtattctaaatgcatctcgtggggtcgattatatttatcacgcagctgcattaaaacaagttccctcatgtgaatttcaccctatggaggcagtaaaaacaaatgtgttaggtactgagaatgttctggaagctgcgatagctaatgaagttaaacgagtcgtttgtttaagcactgacaaagcagtatatcccatcaatgcaatgggaatctcaaaagcgatgatggaaaaagtaatggtagccaagtcacgtaatttagatagctctaaaaccatcatttgcggnnnnnnnnnnatgttatggcatctcgtggttctgttattcctctttttgttgatttaa

SEQ ID NO: 19159 - DNA, 489 bp, Escherichia coli
gtgcataacaaatggttatgcactacaaaaaattatgaaatgggaagattagtttccaaaaaatatgatgatgaagtcattagtaatgatatagattatataattggcgcatcgatgtttttctctagagaatgtttggaaacagttggattgatgaatgaagaatattttttatactatgaagagttagatatttgcctcagagcaaaagcaaagaactttaaattaggtatttgctcagaaagtttggtttatcataaaataggtgcaagtactgatgggggaaagagcatgatggctgatctttgctcaataaaaaataggctggtcattacagaaaggttttatccccaatattattggacggtatggttgtcactttttgttgtagcatttaaccgtgctagaagaggtgagtttaataagatgaaaagatgtttgaatgttatgtttaacttcaaacgaaacaaaggtagcaaatgccattag

SEQ ID NO: 19160 - DNA, 966 bp, Escherichia coli
atgagtgaagcactactgaacgcgggacgtcagacgttaatgctggagttgcaggaagcaagtcatttaccggaacgtctgggcgatgatttcgttcgcgccgccaatatcatcctgcactgcgaaggcaaagtggtggtttcgggaattggcaaatcgggccacattggtaagaaaatcgccgcaacgcttgccagcaccggcacaccggctttttttgtccatccggcagaagcactgcacggcgatctggggatgattgaaagccgcgatgtgatgctgtttatctcttattccggtggcgcgaaggaactggatctcattattccgcgtctggaagacaaatctatcgcgctgctggcaatgaccggaaaaccgacgtcaccgctgggcctggcggcgaaagcggtgctggatatctccgtagaacgcgaagcctgcccgatgcaccttgcgccgacctccagcaccgtgaataccctgatgatgggcgacgcgctggcgatggcagtcatgcaggcgcgtggttttaatgaagaagattttgcacgctcccacccagccggggcactgggcgctcgcttgctgaacaaagtgcatcatcttatgcgtcgtgacgatgccatcccgcaggtagcgttaaccgccagcgtgatggacgcgatgctggaacttagccgcaccggtttaggtctggtggcagtgtgcgatgatcaacgactggtgaaaggcgtctttaccgacggtgatttacgtcgctggctggttggcggcggcgcactcaccacgccagtcaatgaagcgatgacggtcgacggcaccacgttgcaatcgcaaagccgtgccatcgacgccaaagaaatcctgatgaaacgaaaaatcaccgccgcaccggtagtggatgaaaacggcaaactcaccggcgcaattaacctgcaggatttctatcaggccgggattatttaa

SEQ ID NO: 19161 - DNA, 294 bp, Escherichia coli
atgaaagttcaggccgttggtttattctggtttcgcgatgcgattcagtatcatgagctcaaaaatatttttactgatgctgatgtgctctccgacagttacaccgagtggaaacacgacgctgaaaaattgattaagcgtgtcgaaagaagcgggcaacgagttattaaagttgaagcggatacagccgagttcatcacctggtgtacaagcgaaggcattggaatcaatgccgaaggtagaatgcagttcgcatcctttaaggcttaccaacaacttctcagcgaacgctaa

SEQ ID NO: 19162 - DNA, 273 bp, Escherichia coli
atgaaaggaaatgattacgacaaacttcgtgcattaattgcgcaaaatgccatagcgcgaaatcttggtgtgacgccgcaagcggtgaatcagtggttttcaaaaaacacaattcctgctcgtttcgttttacgcgtatgtgaagtagttgcatggaaggtcacgccacatggcttaaggccagatctttatcctcaccctgaagatggaattcctgattcgttacgcaaaatttcaaatccaagcttagcgcacacagaggacgagaagtga

SEQ ID NO: 19163 - DNA, 408 bp, Escherichia coli
atgatcactattaccaaagggcgactgctgacaatcaagcagtggcgcgaaacatacggaccgggtagcaacgttgtgcttccagcagaagaagcggaagagctggcacggattgcgctggcatcactggcagcagagccggtggcaaagattatagctcattacccattaggagttgacgcaggcaaacaaaaattcgtacaggccattagagagcttcctgactttggcggatatctatttgccgccccgccagcgccggtagtgccggaagaagcaactccggaaaacgtagaaatgctctctggctatgtttccacgtacaaattaaccgatagcgagcgcgatattgctgccgaaatatggaacgcctgccgcgccgctatgcttcatgggaaaggagagtga

SEQ ID NO: 19164 - DNA, 2631 bp, Escherichia coli
atgagtaataacccacttgaggccgtcactcaggcggttaactccctcgtcacagcactgaaactgcctgacgaatccgcaaaggccaatgaagttctgggcgaaatgagcttcccgcagttcagccgtctgctgccgtaccgtgattacaaccaggaatccggtctgttcatgaatgacaccacgatgggctttatgctggaagccattcccatcaatggggcgaataagtccattgtggaggcactcgatcacatgctgcgcaccaaactgccgcgcggtattccgttgtgtatccatctgatgtccagtcagctggttggtgacaggattgagtacgggctgcgtgagttctcctggtcaggtgaacaggctgaacggtttaacgccattacccgggcctattatatgaaagcggcagcgacacagtttccgctgccggaggggatgaatctgcccctgaccctgcgccattaccgggtatttatctcgtactgttctccctcgaagaaaaaaagccgggctgacattctggaaatggaaaacctggtgaaaatcatccgggcgtcgttacagggggccagtatcgccacacagacggtggatgcacaggcctttatcgatattgtcggggagatgattaaccataacccggactccctgtacccgaaaagacgtcagctggacccgtattctgatctgaattatcagtgtgtggaggacagttttgacctgaatgtccgggctgattacctgacgctgggcctgcgtgagaacggcaggaacagcacggcccgtatcctgaatttccatctggcccgtaacccggaaatcgccttcctgtggaatatggccgacaactacagcaacctgctgaacccggaactgtccatctcctgtccgttcatcctgacgctgactctggtggtggaagaccaggtgaaaacccacagcgaagccaacctgaagtacatggacctggagaaaaagtcgaagacctcctatgccaaatggtttccgtccgtggagaaagaggcgaaggagtggggggaactgcgtcagcgtctgggctccggtcagtcttctgtcgtgtcctacttcctcaacatcacagcattctgcaaggacaacaatgaaacggcgctggaagtggagcaggacatcctgaacagcttccgtaaaaacggttttgagctgatttcaccgcgctttaaccacatgcgcaatttcctgacctgtctgccctttatggccgggaaagggttgtttaaacagctgaaagaggccggagtggttcagcgcgcagagagctttaatgttgccaacctgatgccgttagtggcggataaccccctgacaccggcaggtctgctggcacccacctaccgtaaccagctggcgtttatcgatattttcttccgggggatgaataacaccaactacaacatggcggtctgtggcacctccggggccggtaaaaccgggctgatacagccacttatccgcagcgtgctggactccgggggctttgccgtggtgttcgacatgggggatggctacaagtccctgtgtgagaacatgggtggcgtatatctggacggtgaaaccctgcgttttaacccgtttgcgaacatcaccgatattgaccagtcagcggagcgtgtccgtgaccagttgtcagtgatggccagccccaacggtaacctggatgaagtgcatgaaggtctgctgctgcaggcggtcagggcctcctggctggccaaagagaacagggcacgtattgatgacgtggtggatttcctgaaaaacgccagtgacagcgagcagtatgccgggtcaccgaccatccgcagccgtctggatgaaatgattgtgctgcttgaccagtacactgccaacggcacttatggccggtattttaactctgatgagccgtccctgcgggatgatgccagaatggtggtgctggagctgggtggactggaagaccgtccgtcactgctggttgcggtgatgttctccctgattatctacatcgagaacaggatgtaccgcacgccgcgtaacctcaagaaactgaacgttattgatgaaggctggcgtctgctggacttcaaaaatcgcaaggtcggtgagtttattgagaaaggttaccgtaccgcccgccgtcataccggtgcctatatcaccatcacacagaacatcgtcgactttgactctgacaaggcctccagtgcggcccgtgcggcatggggtaactcctcctacaaaattatcctcaaacagagtgcgaaggagttcgcaaaatacaaccagctgtatccggaccagttccagccactgcagcgcgacatgattggtaagtttggtgcggccaaagaccagtggttcagttccttcctgctgcaggtggaaaaccattcctcctggcaccgcctgtttgtggacccgttaagccgcgccatgtacagctctgacggcccggattttgagtttgtgcagcagaaacgtaaagaggggctgagtattcatgaggcggtgtggcagctggcgtggaagaagtcagggccggagatggcttcgctggaagcctggctggaagaacatgagaaatacaggagtgttgcatga

SEQ ID NO: 19165 - DNA, 516 bp, Escherichia coli; identical to SEQ ID NO: 13215

SEQ ID NO: 19166 - DNA, 681 bp, Escherichia coli
atgaagccaactaccccatttaaaaatcccggcgcggtccgggatacctcctcccctcgtcagcagcctgatattacacctgatcttctcgcagagtcggaagccgtaaatatccaggaacaggtacagcaactgcatgacgaacagcagcagttgatcaatgacccttcccatttgcaggattcgcaaactgacgccggtaacattgagcaggaatataaggatgcggtagaggcggcagtagcggataaagaaacgcaggcagaaaaccttgaaaaccggctggaatcgctgatagacaagcaggaggcggttctgcagcagatgatgagtcgtcagcctgggtttttggctctgcccggccagaaggcaaaatggaagtcacaggtacaacaacaacagtcattgctgagtcgcctgcagaaccggctggaaactgtcaaagagattcatgacgggatggggttacatggcccgcgtatacacgaacttgcgacggccaaagtgcggcatgataaaccagagcttgccgaaggatgggatgaaatgcgggctgcacagcgagcgcatgagaatctcatgcggaagcaggcgaaagaacagaaagaaaagctacaaagagagcaggccccatcactaagtaaagggaatggtctgagccttacaagaacaataacttga

SEQ ID NO: 19167 - DNA, 354 bp, Escherichia coli
atgagcaaacagcgtgttcttgtcatgaacggccagcgagtgctgcaaagcgaagaagctggaaaatggaaaaatgacaatgttgatagagcgggcagcataaagccaggcatttacccgctttatctgtccaaggggccggataaagccagctcttataatgggccgattttacacgcagataagcaatcagtatatcagcaggtaggtaagcagattttcaagcatgatcgccaaaatttcgataaactgccagaggtaggtacggaaaaaagtatttcgtatgaccagacttccggtaaagctcaggtagcagcagccacagagaagcagggccggaagttctccagatag

SEQ ID NO: 19168 - DNA, 1014 bp, Escherichia coli
atgactaaaaaaaattcttccggccttggccttgataccgttggtgatctctccgactttcttgatgcgtctgcaggtgctgagggtaaaccactgatgctggacgttgatgcgattgatcccgatcctgaacaaccgcgtaagcaggacaacccagggttctcagaggaatccattaaggagctggctgataccattaaagcgcgtggtgtgaaaatgcctgtctccgttcgcgagaacccggagcaagcggggcgctatattattaaccatggagaacgtcgctggcgagccagtaaagtggccgggaagaaacaaattcccgcttttatcgataatgactatagcgacgatgatcaggtcattgagaacatccagcgtaatgacctgacggcgcgtgaaattgccgtacacattggccgcaaactggctgagggggtatcaaaatctcagattgctaaacggcttggcaagtcgccagcgttcgtaacccaacacgcagcgttgctggacctgccggattgtatagcagatgcttttaataaaggttcaatccgtgatgttaccgtagttaatgagctggtaacggcttacaagcaagacccggaagaagttcaaaaactgcttgaagagaacgagggtgaagacattacccgtagtgcggtgaaagttttccgtgagttcctggacgaaaaagaatccagcaagcgtgatccagacaccattgacgccttcaatggccgtaccgattcggaagctgccgaagatgatacggacggccacgatgataacgatgtgaccgataaggtccgtaagacgccagaaaaggaaaccgatcctgataaattcaaaaaggctattgttatcgttgagtacctgggggagcagggccgccttatcctgaccaagcgcccaagtgaagaagggcttgcctggattaagtttgattcaactggtgtagaagaagagctaaatctcgaaaacgtgaaaataatttgccttattgaaggataa

SEQ ID NO: 19169 - DNA, 765 bp, Escherichia coli
atggctatgaaagtattggttacagcaaatcaaaaaggtggtgttggcaagacttccaccctggttcatctggcatttgatttttcagaacgaggcaagcgggttgctgtaatcgatatggatacccagggcaacgcctcttttaccctgaaacagttctcgtccggcattaaagcgaatgaaatgtggggcgagatcgagccaactcgctttacccaaatgcctgagagcggaatttctctcattgagtcagatattcaactggcaaacgtagaaaaattaaatctgccggaaatggtgaagcagttccgccataacctgcagcagctggcggacagtggctttgacgtctgcctgattgatactgcgcctacggttaacaatgcgcttatagttgcgctggcgagcgctgattttgtggtatgccctattgagcttgaggtgtactcaattcagggtattaaaaaaatgctgaccaccttcacccaggtgaaacgcaaaatgaacagcaagctggaatttattggtatggttccaagtaaggtagatggccgcaatcctcgccatgtaaaccacctgcaggagctgcagacggcctaccctacgttaatggttcctgtgtctgtcgggttgcgaagcagcattgctgatgcactggcttcacatgtccctgtctggaaaatcaagaagacagcagcacgtaaagccagccaggaaatgagagcactggcctatcatgtttttactaagatggagattgcataa

SEQ ID NO: 19170 - DNA, 345 bp, Escherichia coli
atgacgactgttaataataatgatccgcatgttgccaaaacgggcaatgaaaaaaaacgcctgactaatgaggtatttgcaagagttacccgaagcctgaatgttggtaagcaaacgcttgatatcgcttacggcgtactggttgaaggaagaccgcagaaatattttgttgaaacgctggatatttctcgcggggctgtttctcaggcagttaacagagtgtgggatgcctataaacaagaagtacctgacggttttgtgcgtattgaagtagtgttaccggagcggcaggctttcattgttaaaaagtgggctgacgaggcaaaacgtaaacaggaagaatag

SEQ ID NO: 19171 - DNA, 591 bp, Escherichia coli
atgcgtcctcaactctgggttattgctgggcctaatggtgcaggaaaatctaccctagttaagcgacatatccttgggaaaatagaggttgttaaccctgatgatattgcgcgggaacaaggtataagcaatcgaaaggcaggagagcaggcactttttctgcgcatggaaaatatcaaaaatagatgtactttcgctgtagaaacgacactcacaggaatgggggagattaagttaatgcagcttgctgcaactgcaggttacaaaattaatttaatctatgtgggggtgaaagatgtaggaatgtcagtagctcgcgttaaccagcgtgtaagcctcggtggtcataatgtgcctgttgatgatattttcagacgatacgagcgttctgtaaccaacctacctaaagctatggccgtggctgaccgggtatgggtatttgataacagttataacagacggcgattacttttccgcacagaacaagataaaacaaagttcatttctaatgatttgcctgattggtttaaaaaagtcgctgggacagagattgagcaggccagaatgaaaaagaagaaattaagtcgttag

SEQ ID NO: 19172 - DNA, 252 bp, Escherichia coli
atgagtatggatctatctcatctggccgaaatgacaccttctgatgaagcacgattttttaccgtttttgatagacaacttggatatgatgcaggtgaagaagcccgtgccaatcttcttagtggcgtacctatttattacgctgaacgaaatacaccagaagggtgtgttataaaagaatatccagatggccgtaaggaactggtgagtttcatgactggtacagaaaaagtagttgaggttaagctctga

SEQ ID NO: 19173 - DNA, 324 bp, Escherichia coli
atgaccaatgtcgttaaatttcctcgtcaagagggaagtaaaccgcagcaaattcgggcggtcgaggatgtcgctggtccagcatcagaaaacacagtacgtaatatcctgtatggtgtcattggtgcggtatacatggtgctggttattctctggattcctgttcgcttcctgctgatcgcgaacgttgtcatccagttttttaaaatgctgtttaaatggagtgatggcccatttgctgcagcctggccgttcgtgaccagtttccttgtactggctactctcacttacattatggcaacatggaaacccaaactgtcatag

SEQ ID NO: 19174 - DNA, 261 bp, Escherichia coli
atgcaaactaaaccctaccctgtcttaatcaggtcagaatgttttttaccctttggtgcgggatgggattgtcctacgccagaagaaattcgtactttgatgcagatagcagagctaacaggaagcaaagcagccacactgaccggtctgaaagacagccgaaccgtcaggcgctgggttgggggggatacacccattcctttttcggcctgggctattctggttgaatatgcaggattgggtaaaatctggaaggtgtga

SEQ ID NO: 19175 - DNA, 1119 bp, Escherichia coli
atgtccaaacattatcctggcgatgactctcgcgatcagcaaatggaagccattgcgcagcagctgccggacgaccatcgcattctggacgcggcgtactcagcgctaattgatttgaataaagcctgtatgaccggtgatctgcaacagcgtcatgatgctgtgtaccggtttgaagcctgtatctggaaaatgaacggtaaaaccttctttgggtgtaatgccggtgaacatgaagcggctcatgttatcagtgaatattgccgtgctgatgacggtagcgttcctatgtggggtcaacacggtgattttatcatcgaaagtttcagtggtatgcgagcaagggttaaggtcgaagccggatgtatgatggggtatctttccacctcgtttcatgccgttgatttaggcgcaccctttgtatccgaaacagggtatcgttcgcattttgttaggctttcagaagtcagacctggagaaaccgttgatgcacacgtatcccgcgtatttcaaagcctgattgacgccagaaagaaacctgcttttatctctgctgatttccgtgacaggctggcatctgagcctttgcctgattggttaaaatccctttcgcccccccctgatagaacgcctctaacgctccctgacggctttgttagggtcgaggcgttattacccgcctctaaagcatttatcgcccgtaaatgggctgtagcagctcaggaacgcattacagctattatgcagagagagcgggaggctgaaagagaaactatgcgggccgaaagcgaacggcgcaagcaactggcaaaggagcgttccaaagaatacaaagagcggatgattactgttcagcgttataaagaattttacgttggtgctcgatgtgaaatcgtgagtgtgcatcatccggtgtttgctaaaaatattggcactattgtaaaaatcgttacgatatacgattcaggatgtgtggaggcgcatgaagataagcctatacgttatcgaatcaaccgtcgcggaactcaggtagtggattttgaccctacttgcgttcgtactttttacaatattgatcaactgaaattactggaagacaacaaaacaggtgaatcgtga

SEQ ID NO: 19176 - DNA, 468 bp, Escherichia coli
atgaataatgaagttatcgttactgctcgtaaacttacagattatgaagaacgcctgatgtttatgccgaaattcttcggccaatactggcgtttggtggaaaaccacacttataagtggatgcgtaaattaagtcctgaaaataaaagccaatatttaagtagtgcgctggataaaattgaagcccattacgatggtggtgagtgggatttttatgaactttcaaatggtggttattttatggcaccaaacagccgtgaacattaccgtatttctgtccagggtaattactttgacggtttgttaagcgcagaagctgcaggtatggtggcaaccagttttgtgctggcccagcttgctaattctaatctgccattttcagaaagatgcagtgcttattatcatcagctgtttgattacgccagcgggcatcaagaatatgagcagttccgtgcggccatcgattaa

SEQ ID NO: 19177 - DNA, 246 bp, Escherichia coli
atgataataaataaaattggcccaacagtttataagttagtttatgagtattcgaatcaatccgaacaccctcttaacgagagcgacaatgatgcaatggctgaatactttaacgatctcgtcaagcgccttgtcggtggtgatgcgatagatgcagatacaatgctgagacttgctaaggaatacaatattgacgttctacgcgtaccagaaatagcccgtttccttagcaagtgggggggttga

SEQ ID NO: 19178 - DNA, 198 bp, Escherichia coli
atgaaagatgtacttaagaacctccctccccttgtcgatactgtaactgttaaggttgctaacgttactaagtacgacgatcaccaggtagaaattcgcgaggctgataccaatcttcttatctggcgcgcatgggattttgaaccggactttgaatataattttaagcagcagctgcagcgcttcattaaaaactga

SEQ ID NO: 19179 - DNA, 318 bp, Escherichia coli
atgtcctggatcgttttattaattgcaggtttgctcgaagttgtctgggcgattggcctgaaatacacccacggttttacgcgtcttacgccaagcattatcactattgcggcgatgatcgtcagtatcgccatgctctcttgggcaatgcgcacgttgcctgtaggaaccgcttatgcggtctggaccggtattggcgctgttggggcggccattacagggattttgctgctgggtgagtctgccagcccggcacgtttgctgagccttgggctgatcgttgctggcattattggtctgaagctgagcactcactaa

SEQ ID NO: 19180 - DNA, 534 bp, Escherichia coli
atgcgcattttgcccgtcgttgctgcagttacggctgcattcctggttgtcgcgtgtagctccccgacaccgccgaaaggcgttaccgtggtaaataactttgatgccaaacgctatctgggaacctggtatgaaattgcgcgcttcgaccatcgtttcgagcgcggattggataaagtgaccgcaacatacagcttgcgcgacgacggcggcatcaacgttattaacaagggctataaccctgacagggagatgtggcagaaaacggaagggaaagcctatttcaccggcgacccaagcagagccgcgcttaaggtttcttttttcggccccttctatggcgggtataacgtaattgcactcgaccgggaatatcgtcacgcgctggtttgtggtccggatcgcgactacctgtggatcctttcacggacccctactatttcagatgaaatgaaacagcaaatgttagccatcgcgacccgggaagggtttgaagtgaataaactgatttgggtgaaacagcctggcgcttag

SEQ ID NO: 19181 - DNA, 1146 bp, Escherichia coli
atgatgaaaaaatcgttatgctgcgctctgctgctgacagcctctttctccacatttgctgccgcaaaaacagaacaacagattgccgatatcgttaatcgcaccatcaccccgttgatgcaggagcaggctattccgggtatggccgttgccgttatctaccagggaaaaccctattatttcacctggggtaaagccgatatcgccaataaccacccagtcacgcagcaaacgctgtttgagctaggatcggttagtaagacgtttaacggcgtgttgggcggcgatgctatcgcccgcggcgaaattaagctcagcgatccggtcacgaaatactggccagaactgacaggcaaacagtggcagggtatccgcctgctgcacttagccacctatacggcaggcggcctaccgctgcagatccccgatgacgttagggataaagccgcattactgcatttttatcaaaactggcagccgcaatggactccgggcgctaagcgactttacgctaactccagcattggtctgtttggcgcgctggcggtgaaaccctcaggaatgagttacgaagaggcaatgaccagacgcgtcctgcaaccattaaaactggcgcatacctggattacggttccgcagaacgaacaaaaagattatgcctggggctatcgcgaagggaagcccgtacacgtttctccgggacaacttgacgccgaagcctatggcgtgaaatccagcgttattgatatggcccgctgggttcaggccaacatggatgccagccacgttcaggagaaaacgctccagcagggcattgcgcttgcgcagtctcgctactggcgtattggcgatatgtaccagggattaggctgggagatgctgaactggccgctgaaagctgattcgatcatcaacggcagcgacagcaaagtggcattggcagcgcttcccgccgttgaggtaaacccgcccgcccccgcagtgaaagcctcatgggtgcataaaacgggctccactggtggatttggcagctacgtagccttcgttccagaaaaaaaccttggcatcgtgatgctggcaaacaaaagctatcctaaccctgtccgtgtcgaggcggcctggcgcattcttgaaaagctgcaataa

SEQ ID NO: 19182 - DNA, 123 bp, Escherichia coli; identical to SEQ ID NO: 8077

SEQ ID NO: 19183 - DNA, 651 bp, Escherichia coli
gtggcgatagcccacatatgcggccttcgatgtgtaggttttggtaaacaccaggtggccaaccacgctgaatcccgcatttttccaggcggccataaagcgatcgacgcggttccagccgtagaagctgaccatcagcgcatcttttttcagcacgcggtacatttcattacaggccggttgcagccattcatcggttttatcgccggcgatggtgcgcccggaacggtcacggaaaccgacgagatacggcgggtcggtgaggatgaaatcgacagcattgcccggaaacgtggccataacacgcacgcagtcacccaggataaaacgggacataacagcactccttctcttacagaggacaccgggagggcacccctgtggtgcccgttccccgctgcctgtgggctgttcaccgcgtccggtaacgggtcaggccgaccgtggaataccgcagccgtcgtctttttgacggcaaggttatgccgcgaaagcggcttgaagggcgttcatcagaaaagggcgacgggctggcgtacactgtcaccgacgccagccgggagcggtaaaagcgcccgccccgtgcccgccggacgcgggacactgaccacaggcagcgtttatgccgcgccgcgtcagccggcgcagtaa

SEQ ID NO: 19184 - DNA, 927 bp, Escherichia coli
atgccaaactggtgctcgaatcgtatgtatttttctggtgaaccggcacagatcgctgagattaaacgactggccagcggtgcagtcacaccgctttatcgccgcgccacaaatgaaggtattcagctgtttctggccggaagtgccggacttctgcagatcactgaaaatatccgctctgaacagtgccccggagtgacggctgccggacgtggtgctgtatcactggaaaatatcgcgttcacccgctggctgacacacctgcagaacggtgtactgctggatgagcaaaactgcctgatgctgcatgaactctggctgcagagcggtactggacagcgtcgctgggaagggttaccggatgatgtcagggaaactatcactgtgcatttcaccgcaaaaagaggtgactggtgtgacatctggggtaacgaggatgtatcggtgtggtggaaccgtctgtgtgacaacgtactgccggaaaaaaccatgccgtttgacctgctgacggttttgccgacccgcctggatattgaagtgaatggctttaacggcggtgttctgaacggtgttccttctgcatatcactggtatacagaacggtatggcgtgaagtggccttgtgggtatgacctgaatatcagcagtcagggggaaaacttcattcaggtggatttcgacacgccgtggtgtcagccggaaagcgacgttgttgcagaattaagccgccgtttcggctgcacgctggagcactggtacgccgaacagggctgcaatttctgtggctggcagttgtatgagcgcggagagcttgttgatgtgctgtggggggaactggaatggtcttccccgacagatgacgatgagctgccggaagtcaccggacctgcgtggatagtcgacaatgtgacgcattatggcggatga

SEQ ID NO: 19185 - DNA, 744 bp, Escherichia coli
atgacgattgccagaatatttccagcccagcacgtccggcagcgggttttgtggcagacgtggacggccttttgccaggatgtaggcgcattcgtggcgatagcccacatatgcggccttcgatgtgtagtttttggtgaagaccaggtgaccaacaacgctgaatcccgcatttttccaggcggccataaagcgatcgacgcggttccagccgtagaagctcaccatcagcgcgtcttttttgagtacgcggtacatttcattacaggccggttgcagccattcatcggttttatcgccggcgatggtgcgcccggaacggtcacgaaaaccgacgagatatggcgggtcggtgaggatgaaatcgacagcattgcccggaaacgtggccataacacgcacgcagtcacccaggataaaacgggacataacaacgctccttctcttacagagggcaccgggagggcccccctgtggtgcccgttccccgctgcctgtgggctgttcaccgcgtccggtaacgggtcaggccgaccgtggaatatcgcagccgtcgtctttttgacggcgagaatatgccgcgaaagcggcttgaagggcgttcatcagaaaagggcgacaggctggcgtacactgtcaccggtgccagccgggagcagtaaaagcgcccgtcccgtgcccaccggacgcgggacactgaccacaggcagcgttcctgccgcgccgcgtcagccggcgcagtaa

SEQ ID NO: 19186 - DNA, 414 bp, Escherichia coli
atgcacttcgggacgtcgttcaatgccctgttctttcagcgtccggcagtcaatgaagcccctttcaaagccatgctttctcatatgttcgttgtgcttcacctcccagcgttttcgcaattcccgcaactgctctttttgctgagtgagagtcaggcttccggaatcctttttcgcacctccccgctcgggatacctggcgttatagcgccggaaatactgttccggtgtacgttcaatgccatcattcacacgctgactcatcatgatatgcgcatgaggctgttcgccgccgtcaatgctcgctttcggattgtgaatggcaaaactccaggcgtgccgttcgccagcttcctgacgtacaaaatcctgcaccagttcaaggcgctgttccggtgtcagttcacggggtaa

SEQ ID NO: 19187 - DNA, 495 bp, Escherichia coli; identical to SEQ ID NO: 8159

SEQ ID NO: 19188 - DNA, 213 bp, Escherichia coli; identical to SEQ ID NO: 5358

SEQ ID NO: 19189 - DNA, 420 bp, Escherichia coli; identical to SEQ ID NO: 11035

SEQ ID NO: 19190 - DNA, 531 bp, Escherichia coli
atgcgcgcaaggctggataacgccgcgccggttgctgaaatccgggctgaatctcagctttttgtgactcctgccccggtctgtgatcgcctggtgacgctggcggagatcagcaaccgtgatcacattctggaaccctctgccggcaccggggccatactgcgggcgattcgtcatgtcgcgccgggggccatgtgtgatgcggtggagattaacagcgggctggtccggtatctgcgggataattttaacggtgtcagggttcagtgtggcgacttcatggaatggcagccggtgcagtattacagccggattatcatgaatccgccgttcagtcacgggcaggatatccggcatatcctgcgggctttttccctgttgcgtccgggtggtgtgctggttgccgtctgtctgaacgggccgcgccagcaggagaagctgttaccgttttctgatgtccgcgaggtgctgccgtgcggcacatttgcttatacccgtgttccgacgatgattattcgtctgcgtgcctga

SEQ ID NO: 19191 - DNA, 531 bp, Escherichia coli
atgcgcgcaaggctggataacgccgcgccggttgctgaaatccgggctgaatctcagctttttgtgactcctgccccggtctgtgatcgcctggtgacgctggcggagatcagcaaccgtgatcacattctggaaccctctgccggcaccggggccatactgcgggcgattcgggataccgcgccgggggccatgtgtgatgcggtggaaatcaacagcgggctggtccggtatctgcgggaaaattttaacggtgtcagggttcagtgtggcgacttcatggaatggctgccggtgcagtattacagccgggttatcatgaatccgccgttcagccacgggcaggatatccggcatatcctgcgggccttttccctgttgcgtccgggtggcgtgctggtcgccgtctgtctcaacggaccacgccagcaggagaagctgttaccgttttctgacgtccgcgaggagctgccgcgcggcacgtttgcttataccgatgtcccgacgatgattattcgtctgcgtgcctga

SEQ ID NO: 19192 - DNA, 291 bp, Escherichia coli
atggatgaactgatagcgaaagcctggcgttttgtgcgtgagcgtttccgcagttaccagacagagcttaagtcccggggaataaagcgtgcccgtgcgcgtcgtgatgcgaacaggaaacgtcaggatatcgtcaccctggtgaaacgacagctgacgcgtgaaatctcggaagggcgctttactgccagtcgtgaggcggtaaaacgcgaagtggagcgtcgtgtgaaggagcgcgtgattctgtcacgtaaccgcaattacagccgcctggccacagcttccccctga

SEQ ID NO: 19193 - DNA, 156 bp, Escherichia coli
atgaactggctctttctatttgggatttacttacccattgcgattttttaccgtgcctctcataaattaacagtcaaagctgaagaagtgctctgggaaacaagaaacaaaggctttttgaatatcgctgtactcacactcaggatgcttctctaa

SEQ ID NO: 19194 - DNA, 423 bp, Escherichia coli; identical to SEQ ID NO: 4705

SEQ ID NO: 19195 - DNA, 567 bp, Escherichia coli
atgcctacagcattgatgtgtattagaaaaatattgattgctaaaactggttgggaggatgcagggcaatggcaggccgtatggaagatatctgaggtttatcttggtgttgtgacaattgctttgtcaacatatttcttaccaagattgacaattataaaaacaagtttccttataaaaaaagaagtaaatagtactatattatacataatatctattacttcattcatggcgttgagtatctatttattccgcgatttggtaataacagttttatttactgaacagtttcgctcagctcgtgaattatttttattacaacttataggggatgtaataaaaattgctgggtttctttatgcataccctcttcaaagtcaggggcatactaaactattcatcagttcagaagtgattttttctatgctctttatcattaccacttatatttttgttgtaaattatggagtacatggtgctaacataagttatgtcattacatatagtttatattttgtgtttgcatttgtgtttactaattttattaatgttagaagaaataattaa

SEQ ID NO: 19196 - DNA, 339 bp, Escherichia coli
ttggcgggcgctcctacttgtgtcttcagctccgatgacggtaaggcgaaagtaccgttcccggcgacgctttcctttattacccgcaacggagctacaaaaacctacgatgccgggtgcgatgatagctggcgggatatgaccgatgcgctgtggttgaccacaccgtggactgatatctctggcgaagtggggcagatggataagaccacagtcaaattttcgattccaatggataacgccatttctctgcgtacggtagatgataacggctggtttggcgaagtcagcgcttcaggagagattcatgttcaggcgacgtggcgtaacattaactaa

SEQ ID NO: 19197 - DNA, 1347 bp, Escherichia coli
atgccaatgatacttgtaaagaagaatccccggggcaaagtgattcgggagcttagcagtgaggaagagactgcagtaaagacggtctgtggactgaaaaagccagcaaccatggcactacataacctggccaatgatattctccgggaaatgcgtgagtatgatgcatggttacagtgtgactgtattccgggagattcgccggccatgaattttgctgctcttaaaaacaatacgggtactctttatctgtccagttttaatcatgagcatgcacctgaatgccccatgtatcgtcagttatccggaaatgaagaggaaacatattccggagcaagccggcatcccgttagcacccgtataaattacagaaactttttaccacctgatgacagtaattctgttatcagactgcaggcccgctctgcttaccataatggtgagagctcctccgttcgcaagaaacgtccgcgccttgcccgtttactcctgtctcttattgacgatgctgggctgaataaactggattccctggctaatccccgtatccggactaattatcgtgagtgtcttgatgccatacggcaggttacactgcagcaggagtatattcggggaagatccttatctgaaattatccatttccggcctggaatgtctgaaaggtctcaggagcggttaatggaaacgctggagaattcagaacgacactggcctgccagaagaaaacatatgttctttcagatttttatggcgcagcacatctgtcgtgatgctgtggaaattcactgggcgaacggtaatattcaggtcatcagacctgtgcgggggatcagtattaatggtgaagcgcagggcggaatacgtcccccttactgggttattcttgctttttgccggagtgccgatggcagaatcatctgcagtgaagggtatgctcatgctctttatcaactgacatgtccggtgcctgtggacagcaaactggaacgaaacacgctcactgctcttctgaatgtggccagctggcttaaaagaaagccaggtacgccggaattaagtctggaaaggcccctgtttgatacagaagtttatgttaatggtgaaaagaaatatgtcctgccggatttcattgtcacagcaagggctcctgacggaaagacggccagagtggtcatcgaaacgatgggatatgaagacagtgattactgcgcgagaaaatccaggcagcataccggcatgaagcagattggtgttctgcataccgatccaccgaaatggctggataacgatcatcccccttttgagaaacatatgtacggtgtttttatgcatctcaggtactga

SEQ ID NO: 19198 - DNA, 513 bp, Escherichia coli
atgaatctattagaatgttgcgatcaggttcttttctatcaagaacaaccattttctattccatattgttttaaaaacaaatcaaaaaaatactatccagatttactcattgcgacagttgatggtcggtgcctacttatggaagtgaagccaacagaccgaatgaccttgagtctcacgagaataaaaagtaatgcaggtcgcaaatgggcacatactcgaggatggggatggttggtcattagtgataggttctcgttacgtcagctggaagaacatgccatctcaacaaacacatggaaacttatagaggctgaactgaaaacatcaaggattttagcatggcgtgaaatgatggagttacgtacacgatacgagattcatcgtttagatcttattgcatatatcattcagtctggtgctgaagtggataacttttatcgaattaccccgaaaatatctaataatacatctaaccagagacaaccaaatgagagcgactgtcataattga

SEQ ID NO: 19199 - DNA, 384 bp, Escherichia coli
atgatctggcagcctgagttcacagataaaacactctccaggaaacccggggcggttcagaaggccagtctttccagtgtgccggatacataccggtatcatctgtctcaccgtattcgtcgcgtggttgggaatgaaaacacatcattgccatatcagcaggttgcccgggaagtgaaagcgccccgtgaacggctgaagtatgcgctggaggcggggttactggtgaccgcactggacggcctgttctggtctggcagtcagcgtattgcggctgatgtcctgagactaagacagagcggaatgccggtggtgacaacgaccgtggaggtgcacgataacctgacgggaacaacccgcaaaataccggcataccatctctga

SEQ ID NO: 19200 - DNA, 351 bp, Escherichia coli; identical to SEQ ID NO: 5148

SEQ ID NO: 19201 - DNA, 2412 bp, Escherichia coli
atgaccaaccactgggtggatatcaaaaacgctaacgtcgtaatggtgatgggcggtaacgctgctgaagcgcatcccgtcggtttccgctgggcgatggaagcgaaaaacaacaacgatgcaaccttgatcgttgtcgatccccgttttacgcgtaccgcttctgtggcggatatttacgcacctattcgttccggtacggacattacgttcctgtctggcgttttgcgctacctgatcgaaaacaacaaaatcaacgccgaatacgttaagcattacaccaacgccagcctgctggtgcgtgatgattttgctttcgaagacggtctgttcagcggctacgacgctgaaaaacgtcaatacgataagtcgtcctggaactatcagttcgatgaaaacggctatgcgaaacgcgatgacacgctgactcatccgcgctgtgtatggaacctgctgaaagcgcacgtttcccgctacacgccggacgtagtagaaaacatttgcggtacgccaaaagccgacttcctgaaagtgtgtgaagtgctggcctccaccagcgcaccggatcgcacaaccaccttcctgtacgcgctgggctggacgcagcacaccgtgggtgcgcagaacatccgtacgatggcgatgatccagttactgctcggtaacatgggtatggccggtggcggcgtgaacgcattgcgtggtcactccaacattcagggcctgactgacttaggcctgctctctaccagcctgccaggttacctgacgctgccgtcagaaaaacaggttgatttgcagtcgtatctggaagcgaacacgccgaaagcgacgctggctgatcaggtgaactactggagcaactatccgaagtttttcgttagcctgatgaaatctttctacggcgatgccgcgcagaaagagaacaactggggctacgactggctgccgaagtgggaccagacctacgacgtcatcaagtatttcaacatgatggatgaaggtaaagtcaccggttatttctgccagggctttaacccggttgcgtccttcccggacaaaaacaaagtggtgagctgcctgagcaagctgaagtacatggtggttatcgatccgctggtgactgaaacctctaccttctggcagaaccacggcgagtcgaacgatgtcgatccggcatctattcagactgaagtattccgtctgccttcgacctgctttgctgaagaagatggttctatcgctaactccggtcgctggttgcagtggcactggaaaggtcaggacgcgccgggcgaagcgcgtaacgacggcgaaattctggcgggtatctaccatcatctgcgcgagctgtaccaggccgaaggtggtaaaggcgtagaaccgctgatgaagatgagctggaactacaagcagccgcacgaaccgcaatctgacgaagtagctaaagagaacaacggctatgcgctggaagatctctatgatgccaatggcgtgctgattgcgaagaaaggtcagttgctgagtagctttgcgcatctgcgtgatgacggtacaaccgcatcgtcttgctggatctacaccggtagctggacagagcagggcaaccagatggctaaccgcgataactccgacccgtccggtctggggaatacgctgggatgggcctgggcgtggccgctcaaccgtcgcgtactctacaaccgtgcttcggcggatatcaacggtaaaccgtgggatccgaaacggatgctgatccagtggaacggtagcaagtggacgggtaacgatattccggacttcggcaatgccgcaccgggtacgccaaccgggccgtttatcatgcagccggaagggatgggacgcctgtttgccatcaacaaaatggcggaaggtccgttcccggaacactacgagccaattgaaacgccgctgggcactaacccgttgcatccgaacgtggtgtctaacccggttgttcgtctgtatgaacaagacgcgctgcggatgggtaaaaaagagcagttcccgtatgtgggtacgacctatcgtctgacggagcacttccacacctggaccaagcacgcattgctcaacgcaattgctcagccggaacagtttgtggaaatcagcgaaacgctggcggcggcgaaaggcattgccaatggcgatcgtgtcactgtctccagcaagcgtggctttatccgcgcggtggctgtggtaacgcgccgtctgaaaccgctgaatgtaaacggtcagcaggttgaaacggtgggtattccaatccactggggctttgagggtgtcgcgcgtaaaggttatatcgctaacactctgacgccgaatgtcggtgatgcaaactcgcaaacgccggaatataaagcgttcttagtcaacatcgagaaggcgtaa

SEQ ID NO: 19202 - DNA, 2967 bp, Escherichia coli; identical to SEQ ID NO: 5007

SEQ ID NO: 19203 - DNA, 840 bp, Escherichia coli; identical to SEQ ID NO: 6027

SEQ ID NO: 19204 - DNA, 705 bp, Escherichia coli; identical to SEQ ID NO: 8686

SEQ ID NO: 19205 - DNA, 1011 bp, Escherichia coli
atgaaggctgcagttgttacgaaggatcatcatgttgacgttacggataaaacactgcgctcactgaaacatggcgaagccctgctgaaaatggagtgttgtggtgtatgtcataccgatcttcatgttaagaatggcgattttggtgacaaaaccggcgtgattctgggacacgaaggtattggtgtggtggcagaagttggccctggtgttacttcattaaaaccaggcgatcgtgccagcgtggcgtggttctatgaaggatgcggtcattgcgaatactgtaacagtggtaacgaaacgctctgccgttcagttaaaaatgccggatacagcgttgatggcgggatggcggaagagtgcatcgtggtcgccgattacgcggtaaaagtgccagatggtctggactcggcggcggccagcagcattacctgtgcgggggtcactacctacaaagccgttaagctgtcaaaaattcgtccaggacagtggattgctatctacggtcttggcggtctgggtaacctcgccctgcaatacgcgaagaatgtctttaacgccaaagtgatcgccattgatgtcaatgatgaacagttaaaactggcaaccgaaatgggtgcagatttagcgattaactcacgcaccgaagacgccgccagaattgtgcaggagaaagccggtggcgctcacgcagcggtggtgacagcggtagctaaagctgcgtttaactcggcggtggatgctgtccgtgcaggtggtcgtgtcgtggctgtcggtctgccgccggagtctatgagcctggacatcccacggctggtgctggatggtattgaagtggtcggttcgctggtcggcacgcgtcaggatctaaccgaagccttccagtttgccgccgaaggcaaagtggtgccgaaagtcgccctgcgtccgttagcggacatcaacaccatatttaccgagatggaagaaggcaaaatccgtggccgtatggtgattgatttccgtcgctaa

SEQ ID NO: 19206 - DNA, 540 bp, Escherichia coli
atgcctcatgtggcggccaggacggccagccgggatcgggatactggtcgttaccagagccaccgacccgagcaaacccttctctatcagatcgttgacgagtattacccggcattcgctgcgcttatggcagagcagggaaaggaattgccgggctatgtgcaacgggaatttgaagaatttctccaatgcgggcggctggagcatggctttctacgggttcgctgcgagtcttgccacgccgagcacctggtcgctttcagctgtaagcgtcgcggtttctgcccgagctgtggggcgcggcggatggccgaaagtgccgccttgctggttgatgaagtactgcctgaacaacccatgcgtcagtgggtgttgagcttcccgtttcagctgcgtttcctgtttggggtcgtttgcgggaaggggcggaatcctacgctaaggctttggccagcgatattctccggtgagattgatgtgttcccaggggataggagaagtcgcttgatatctagtatgacgtctgtcgcacctgcttga

SEQ ID NO: 19207 - DNA, 432 bp, Escherichia coli
atgttcctgaaaacagaacaatttgaatataacggtgtatccgtcacgctttctgagctgtctgcgctgcagcgtattgagcatcttgccctcctgaaacggcgggcagaagaggctgaagccaccggcaacctgcaggtgagtgtggaagatcttgtcagaaccggcgcgtttctggtggcgatgtccctgtggcataaccatccacagaaaacgcagtcaccgtcaatgaatgaggccgtgatgaagatagagcaggaagtgctcaccacctggcctgccgatgccattgcccgggcggaagacgtggtgttgtgcctgtccgggatgatcgaagctgttcgtccggatactgatattactgaagtggcgaaaaataacacgctgactgatgatgatttttctgcgggaaagtcttcgacggtgagctga

SEQ ID NO: 19208 - DNA, 747 bp, Escherichia coli
atggcaacaccaaatcccctggagccggtaaaaggtgccggtaccactctgtgggtttacaacggcaaggctgatgcttatgcaaacccgttgtcagacgatgactggcagcgactggctaaggtgaaggatctgacgccgggcgagatgacggctgaaccctacgatgataactacctggatgatgaagacgcggactggaccgcgaccgggcagggacagaaatctgcaggtgataccagttttacgctggcctggaaaccgggagaggaaggtcagaaagggcttataggctggtttgaaagcggcgatgtccgggcctataaaatccgttttccgaatggcacggtggatgtgtttcgtggctgggtcagcagtatcggtaaggccgtgacggcgaaagaagtgatcacccgcacggtgaaagtcactaacgtgggtaaaccttctgtagcggaagaacgcagcaaaattacgccggtcactgcgattaaggtaacgccgacaggtacggttgaaaaagggaaaacaaccaccctgaccgttactgtggaaccggaaaatgcaacggataagacattcagggcgatttccgccgatccatcgaaagccaccattagcgtgaaagatatgacgattactgtgacgggggttaaggatggaaaagtcagcatccctgtgatttccggtaatggtcagtttgctgcggtggctgaaattaccgttaataatgtgccgggtggctaa

SEQ ID NO: 19209 - DNA, 2025 bp, Escherichia coli
gtgccggaactgaacaacagcgtcagcaggccaccgacagccagcatgaagaataaatcctggttcaggatgcaggcgggtggtcagggtgaggcggatatttatatttatgacgagattggtttctggggagttaccgcgaagcagtttgtcagcgatatgaatgccatgggtgatatcacccacattaatctccacatcaactcaccgggtggcgatgtttttgaaggcatcgccatttttaatgccctgaaaaatcacggtgcggccattaccgtgtatgtggatggcgttgccgcctcgatggcatccctgattgcgatggccggtgacacggtcattatgccggaaaatgccttcatgatgatccataaaccctgggggatcagcggtggtgatgcggaggaaatgcgcacttatgccgaacgtctggacaaacttgagtcggttatggtgccggtatatgcgcagaaaaccggaaaaactaccgatgaaattgccgccatgctggcggatgagacctggatgtccggtgccgagtgtctggcacacggatttgcagaccaggtgacgccagccgttaaggcaatggcatgtattcagtcaaaacgtacagaggaatttaaaaagatgccggaatccatccgaaatatgatcacgcagccatacaacagtgccccgcgtgataccacagtgacaatccctgcaccggcggtaacagaaccatcaccggtaccggcagtgtctgatgaggcgaccattcgcgcccgcgttatggctgagcagaaagcccgcatgtcaggcattaacgatctgtttgccatgtttggcggtcgctatcaggcgcttcaggcgcagtgtgtggctgatcctgactgttcgctggaaatggcccgtgaacgtctgctgaatgaaatgggcaaggagtcatcgccgaccaacaaaaacacaccggcccatatttatgccggaaacggcaattttgtgggggacgggatccgccaggcgatgctggcccgtgccggatttgaaaatgtcgagaaggataacgcctataacgggatgaccctgcgtgaatgggctcgcatgtcactgacggagcgcggtattggggtggccagttataaccccatgcagatggtcgggctggcgctgacgcacagcacctctgattttggcaatattctgctggatgtgtcgaacaaggggctgatccagggctgggaggaatcagaagaaaccttccagaagtggacccgtaagggacgcctgtcagacttcaaaacagcgtatcgcgtggggatgggcggttttggttctctgcgccaggttcgtgagggggcggagtataaatacatcaccacctcagatcgcaaggagaccattgcactggccacttacggggagattttctccatcacccgccaggccattatcaatgatgatctgaatatgctggtggacgtgccgatgaagatggggcgtgcggcgaaggcaacgattggtgacctggtttacaaggtgctgacggataacccgaaactgtcagacggtaaggcgctgttccatgccgatcacaaaaatattgccaccggtgggatttccgtttccggactggatgcggcccgtcagatgatgcgcctgcagaaagaaggcgatcgcgccctgaatatccgtccggcctttatgctggtaccggtggcactggagacggtggcgaaccagaccatcaaatcggccagtgtgaaaggggcggatgcaaacgccggtgtcattaaccccatccagaactttgctgaggtgattgcagaagcgcgtcttgatgcggcagatccgaaaacctggtatctggcggcggcacagggcactgacaccattgaagtggcctggctggatggtgtggacactccatacattgatcagcaggaaggtttcaccactgacggcattgccacaaaaatccgtattgatgccggagtggcaccacttgactggcgcgggctggtgcgttcgtcggtggcctga

SEQ ID NO: 19210 - DNA, 429 bp, Escherichia coli
gtggcctgtggtgcgcttagtctggggctgaatcattaccgtgataacgccataacctacaaagagcagcgcgataaaaaagtcagtgagctggagcaggcaaatgcaaccattactgatatgcagcagcgccagcgtgatgttgctgcacttgatgccagatactcgagggaattagccgatgcgagaactgaaaatgaaactctgcgcgctgacgttgccgctggtcgtaagcgcctgcggatcaacgccacctgccccggtaccgtgcgtgaagcccccaccacctccggcgtggataatgcaaccggcccccgactggcagacaccgctgaacgggattatttcactctcagagagcggttgatgctgatgcagaagcagctggaagtggcgcaggaatatatccgcactcagtgcctgaaataa

SEQ ID NO: 19211 - DNA, 603 bp, Escherichia coli; identical to SEQ ID NO: 5048

SEQ ID NO: 19212 - DNA, 240 bp, Escherichia coli; identical to SEQ ID NO: 5000

SEQ ID NO: 19213 - DNA, 360 bp, Escherichia coli
gtgctcggtgtctttgataaggtcactgataatatggaggcgatgaaagaaattcatcttaacagtgacgagcaacatttatttggcagagctgcactgatggtcaggtatgaagatgaaaataaaacgccggtgacgcctgaacagataattactccccgtcgtcgggaggataaacagaacgatctctggacaacctggcagcgggttcaggagaatatgataaaaggtggattatcggggcgaagtgcctccgggaaaaataccaggacaagagccattacaggtattgatggtgatataagaatcaacaaagcattatggatgattgccgaacagttcagggagtggaagtcgtga

SEQ ID NO: 19214 - DNA, 867 bp, Escherichia coli; identical to SEQ ID NO: 5197

SEQ ID NO: 19215 - DNA, 699 bp, Escherichia coli
atgcaggatattcatgaagaaagcctgaacgagtcggttaaatcagagcagtcaccgcgggtggtactctgggaaatcgacctgacggtacagggcggtgagcggtattttttctgtaatgagctgaatgaaaaaggggagccggtcacctggcaggggcgtaagtatgaggcatacccgattgacggcagcggctttgagatgaacggtcggggcagcagtgcccgcccgtcgctgacggtgtccaatctgtttggccttgtcaccgggatggcggaggacctgcagagtctggtgggggccacggtggtccgccgccgggtgtatgcccgttttctggatgcggtgaatttcgttgcgggcaatccggaggcggacccggagcaggagctgagtgaccgctgggtggtggagcagatgtcgcagctgacagccatgacggcctcgtttgtgctggccacaccgaccgagacggacggggcgctgtttcccggtcgtatcatgctggcgaacacctgtatgtggacctaccgctctgatgagtgtggttacacgggtggggctgtggcggatgagttcgataaacccaccacggatatccgtaaggacagatgcagcaagtgcatgcgcgggtgtgaactgcgcaggaatgtcggcaattttggcggtttcctttccattaataaactttcgcagtaa

SEQ ID NO: 19216 - DNA, 327 bp, Escherichia coli
atgacgacgttaactcaatgccagcagcaggtgctggatatgctgatttcttatcagaaagaacgtggcttcccgccaaccaatcaggaggtggctaccatgctgggataccgttcagtgaatgcagcggtggagcatcttcgcgcactggagaaaaaaggcgtcatcacgataaagcgtggtgtggcccgggggatcacgcttcataccgcggtgaaggacgacgacagcgaggcggtcgggattatccgctcactgcttgccggtgaggaaaacgcaaggctgtgtgcaactcactggttacatgagagaggcctgaaagtatga

SEQ ID NO: 19217 - DNA, 1083 bp, Escherichia coli
atgaaaaaattaacagtggcaatttctgctgtagctgcatcagtactgatggcgatgtctgctcaggcagctgaaatttataataaagacagtaacaagctggatctatacgggaaagttaatgccaagcactacttctcctctaatgatgcagatgatggtgatactacttatgcccgtcttggcttcaaaggtgaaacccaaatcaacgatcaactgactggtttcggtcagtgggaatatgaattcaaaggcaaccgtgctgaatctcaaggttcttccaaagacaaaacccgtcttgcatttgcaggcctgaaatttggtgattacggctcaatcgattacggccgtaactacggtgtagcatacgacatcggtgcgtggactgacgttctgccagaattcggtggtgatacctggacccaaacagatgtgttcatgactggtcgcactactggtgttgcaacttatcgtaacaacgacttctttggtctggtcgatggcctgaactttgctgctcagtatcagggtaaaaatgaccgcactgacgtaactgaagccaatggtgatggtttcggtttctccactacttatgagtatgaaggattcggcgtgggtgcaacctatgctaaatcagatcgcactgacggtcaggtcgcctatggtaagagcaaattcaatgcctccggcaaaaatgcggaagtatgggctgcaggcctgaaatatgatgcgaacaatatctatctggctaccacatattctgaaactcagaatatgaccgtttttggtaataaccatattgcaaacaaagcacaaaactttgaagcagtagcacaatatcagtttgacttcggtctgcgtccatctgttgcttaccttcagtcaaaaggtaaagaccttggtgttcatggtgaccgagacttagtcaagtatgtcgatgtcggtgctacttactactttaataaaaacatgtccacttttgttgattacaaaatcaacttaattgacgatagtaagtttaccaaaacagctggtattgataccgacgacatcgtcgctgtaggtctggtttatcagttctaa

SEQ ID NO: 19218 - DNA, 438 bp, Escherichia coli; identical to SEQ ID NO: 5248

SEQ ID NO: 19219 - DNA, 420 bp, Escherichia coli
atgagacgtaccggaaacaaactttgtcttatcgccatgataacagcaacagtagctctcacagcctgtaccccaaagggcagcgtggaacaacatacccggcattacgtatatgcttctgatgacggttttgatcccaacttttccacccaaaaagccgacacaacacgaatgatggtgcctttttttcggcagttctgggatatgggagctaaagataaagcgacaggaaaatcacggagtgatgtgcaacaacgcattcaacagtttcacagccaggaatttttaaactcactccggggcacaactcaatttgcgggtactgattaccgcagcaaagaccttaccccgaaaaaatccaggctgctggctgacacgatttctgcggtttatctcgatggctacgagggcagacagtaa

SEQ ID NO: 19220 - DNA, 195 bp, Escherichia coli; identical to SEQ ID NO: 5251

SEQ ID NO: 19221 - DNA, 333 bp, Escherichia coli
gtggtcagcattgccgttgatccggagtctccggaatctttcatgaaacgacctaaacgtcgccgctgggttaacgagaaatacacacgctgggtgaagacacagccgtgtgcgtgttgtggtaagccagccgacgatccccatcacctgattggtcatggtcagggcggaatggggacaaaatctcacgatattttcacgctaccgctgtgtcgggagcatcacaacgagcttcatgcggatcctctggcgttcgaagaaaagcatggttctcaggttgatttaatttttcgttttcttgatcacgcctttgcaactggcgtgcttgggtaa

SEQ ID NO: 19222 - DNA, 294 bp, Escherichia coli
atggatataagccccttacttcatgcgctttgtgctgtggctgcgcagatactggttggtctttttaccggaaactgggcttacggagcgatagccggttgtacgttcttcattgcgcgtgaacatacccaggcagaatatcgctggattgaaatgttcgggcatggcaagcgaatgaatatgccgtggtggggcggttttgatccgcgagcttgggatgtggcaagcctgatggattttgctgtgccggtggtggcgtgtctgctggtctggctgttggttaatcgtgggtga

SEQ ID NO: 19223 - DNA, 738 bp, Escherichia coli; identical to SEQ ID NO: 5109

SEQ ID NO: 19224 - DNA, 213 bp, Escherichia coli; identical to SEQ ID NO: 4953

SEQ ID NO: 19225 - DNA, 213 bp, Escherichia coli
atgctctacacacgtaggttagcctcttacgtgccgaaaggcaaggagaagcaggctatgaagcagcaaaaggcgatgctaatcgccctgatcgtcatctgtttaaccgtcatagtgacggcactggtaacgaggaaagacctctgcgaggtacgaatccgaaccggccagacggaggtcactgtcttcacagcttacgaacctgaggagtaa

SEQ ID NO: 19226 - DNA, 345 bp, Escherichia coli; identical to SEQ ID NO: 5912

SEQ ID NO: 19227 - DNA, 168 bp, Escherichia coli; identical to SEQ ID NO: 5911

SEQ ID NO: 19228 - DNA, 357 bp, Escherichia coli
atggaaataaaaccagaggatgagttaagcaatatcgttttatttccggtaaaagaggatgaccctcgtaatcaggttaattttctttatgagccatcggaaagaccatattgtcatcacgcctctgtccgggttgacgaaaaagagcgtcaggtccgctgtaaaatctgcggtgcagttgtggagccatttgactggatgctctctgtggcgaaaagagaaaccagactggcagatgatgtaaggctcttgcgtcaggaggagcgggaaaggcgaaaaaatatagaaaagctaattcagattgagcgtaacgcgaaagcgcggatacgcagggcgacaaaatccagaactgaataa

SEQ ID NO: 19229 - DNA, 270 bp, Escherichia coli; identical to SEQ ID NO: 12847

SEQ ID NO: 19230 - DNA, 441 bp, Escherichia coli
gtggcaaacctgcaggtggccacgtcagaaacctggcgcgacaaacagacgggggaaatgaaggagcagacggaatggcaccgcgtggtgctgttcggcaagctcgcggaagtggcaggtgaatatctgcgtaagggggcgcaggtctacattgaaggccagcttcgcacccgtagctgggaagataacggtattacccgttacgtcaccgaaatccttgttaaaaccacgggcaccatgcagatgctggggagtgcaccacagcagaacgctcaggtgcaaccgcagcctcagcagaatggtcagtcacagagtgctgacgcgacgaaaaaagggagcgcgaaaacgaaaggccgtggacgtaaggctgcgcagccggagcctcagccgcaaccaccggagggggaggattacgggttttcagacgatatcccgttctga

SEQ ID NO: 19231 - DNA, 231 bp, Escherichia coli
atgacagtaagtattgtttcaccttccgcagcggctgtaaagccccgccgtcatccccgtttcagacgcgaagacatccccgcgccggaaattgaccccgtgctgaaagcattcgggcgacacatagcccggagttttcaccggggacgtggtgtacacatccccgccatgaaaaacacggctttcgggcaggtgctccgcacacttgaactgaaacgcgcttttaactga

SEQ ID NO: 19232 - DNA, 591 bp, Escherichia coli
atgcagaaactggccgcgctgcagacggcaacaaagcgggcgctgtacgaagccattctgtatcccggcgtggataattttgttaaatatttccggctgcagaattactggactcagcaggccgggcttttcaccatgagtgctaaaaaggccatgctggcacatcccgaactggactataacctgcagtacagccattacaacggcacggtacggaaccagctggcggcagaccaggcgcagcagcgacaggccattgcgaaactggctgaacactacggcatcatgttcttttaccgggggcaggaccccatcgacgggcaactggcgcaggtcattaatggcttcagggatacctatggtctgagtgttattcccgtttccgtggatggcgtgattaatccgctgttgccggattcccggactgaccaggggcaggcgcagcgcctcggtgtgaaatatttcccggccatgatgctggttgacccgaaacagggcagtgttcgcccgttatcatacggctttatttcacaggacgacctggcaaaacagttcctgaacgtttctgaagattttaaaccgaatttttaa

SEQ ID NO: 19233 - DNA, 657 bp, Escherichia coli
atgaatctggaattgtggttccaacgcttttaccagcatctcaatggggttccagaagtaattgtctcttcgggtgtgacgcctgtagggatcaccgaaggaccctatgagggcaaacctaacccccatgcatggatgtcgccagataatgctctgatttacgtcgataatattcgtgatgcgttgataaaatacgatccggcaaatgcacaaacctaccaacgcaatgccgatacttataaagccaagattacccaaacccttgcccccctgcgtaagcagattacggaactccctgagaatcagcgatggatggtcaccagtgaaggggctttttcttatctcgcacgcgatttggggctaaaagagctttatctgtggccgattaatgccgatcaacaaggaacaccgcagcaggtacgtaaggttgttgatatagttaagaaaaatcatatcccggcagtctttagcgagagtacgatttccgataaaccagcgcgtcaggttgcgcgtgaaaccggcgcacactacggcggtgtgctctatgtcgattccctgagcacagaaaacggcccggtacctacgtatatcgaccttctgaaggttactaccagtacgctggtacagggaattaaagccggaaaaagggagaaataa

SEQ ID NO: 19234 - DNA, 1299 bp, Escherichia coli
gtggctgaaggcgtcacactgtacaccccggacaaaatccgggtggggaccggcgaccggatgcgcttcacgaagagtgaccgggagcgcggttatgtggccaacagcgtctggacggtgacagcggtttccggtgacagtgtcacgttgtcagacggacagcagacccgggtgattcgccccggccaggagcgggcagagcaacatattgacctggcctatgccatcaccgctcacggtgcgcagggggcaagtgaaacctttgccatcgcgcttgaaggtacggaaggtaaccggaaactgatggctggctttgagtcagcctacgtggccctgtcgcgtatgaagcagcatgtgcaggtgtacaccgataaccgtcagggctggacggatgccattaacaatgccgtacagaaaggaacagcccacgatgtgtttgaaccgaaaccggaccgggaggtcatgaatgcagagcggctgttcagtacggcgcgggagctgcgggacgtggcggcagggcgtgccgttcttcgtcaggcggggcttgccgggggagacactcctgcacggtttattgctccgggacgtaaatatccacagccgtatgtggcactgccggcgtttgaccgtaacggcaagtctgccggtatctggctgaacccgctgaccacggatgacggaaacgggctgcggggattcagtggtgaaggccgtgtgaaaggcagcggggatgcgcagttcgtggccctgcagggcagccgtaacggcgagagcctgctggctgataatatgcaggatggtgtccggattgcccgtgataaccccgacagcggtgtggtggtgagaatcgccggtgaaggtcgtccgtggaatcccggtgccatcaccggtggccgcgtgtggggggatatcccggacaacagcgtccagccgggagccggaaatggcgagccggtcacggcagaggtactggcacagcggcaggctgaagaggccatccgccgtgaaacggaacgccgcgcagatgaaattgtccgtaaaatggcagagaacaaacctgacctgccggacagcaaaacagagcaggctgtcagggagattgccgggcaggagcgtgaccggtctgccatatctgaacgggaagccgcgctgccggagagtgtgctgcgtgaatcacaacgggagcgggaagcggtccgggaggttgcccgggaaaatctgctgcaggaacgacttcagcagatggagcaggatatggttcgtgacctgcagaaagagaaaaccctgggcggagactga

SEQ ID NO: 19235 - DNA, 261 bp, Escherichia coli
atgacacagggctggcgggaggataaatgcccgtctgtccgcgccgggaaaaaaccgcgcgccggtggcgctgaaaggggccgcgctcacgcgccgcccctttcattacgcggacgttctgatgggggcttctgtcttttcagacctgtcatttgtctgttactgatgatgttgttgttcctgctactgctactgctactgctactgctactgctactgctactgctactgctactgttcttcttttttctactgccctga

SEQ ID NO: 19236 - DNA, 426 bp, Escherichia coli
atgaaaatcaagcatgaacacatccgcatggcgatgaatgcctgggcgcatccggacggcgaaaaagtaccggctgtgaaaattaccaaagcgtatttcgagctgggaatgacgttcccggaactgtatgacgacagccatccggaagccctggctcgcaatactcagaaaattttccgctgggtggagaaagacacccctgatgcggttaaaaaaattcaggcgttgttaccagctatcgaaaaagcaatgccacctctgctggtggcccgaatgcgcagtcatagctcagcctattttcgggaactagtggagacgcgggaacgactggtgagagacgctgatgattttgtcgcagtggcgatcgctggtttcaaccagatgaatcgtggtggccctgcaggaaatattgtggctgtgcattga

SEQ ID NO: 19237 - DNA, 534 bp, Escherichia coli
gtgttgataacctgcaaaggaaagctaccgggaagaattactggttctctgaagatgccgccgtcaacactgcggtcagaaaaagaggcgtcttgtctgcagtctgagtactccattacggttaaaagtgccggagaggaaggaaataaacgttattttattgcgtctgcacctgataaagatcaggaatgggagtgtaaccggccatcctttgttgtatacggagatggcgggaaaataaccatctcagaaaatgggaaattaacaccgccatcgcaccagcatagtgaggcgctcattgaatttgccattgattacctgaagaacaataaaaagcaggggctgatgaagcgcattggtcgttgcatgggatatctgcaggtagcagctgagattgaaatgatggccagtggtgctgacaatgatgcagttgtgctggaggctcttctgcgtgattttgataatacgccctttaagaaagcacctgttgactggatgcagccggggatgacttatctgaaagggcgtatataa

SEQ ID NO: 19238 - DNA, 477 bp, Escherichia coli; identical to SEQ ID NO: 13002

SEQ ID NO: 19239 - DNA, 279 bp, Escherichia coli; identical to SEQ ID NO: 4986

SEQ ID NO: 19240 - DNA, 279 bp, Escherichia coli; identical to SEQ ID NO: 11573

SEQ ID NO: 19241 - DNA, 330 bp, Escherichia coli
atgaaaaccttccgctggaaagtgaaacccgggatggatgtgacatcggctccttccgtcagggaggtgcgctttggtgatggctattcccagcgtgcgcctgccgggctgaacgctgacctgaaaacgtacagcgtgacgctgtctgtctcccgtgaggaggccacggcgctggagtcgtttctggctgagcacgggggctggaaggcctttctgtggacgccgccttatggttacaggcagataaaggtgacctgcgcaaaatggtcgtcgcgggtcagtatgctgcgtgttgagttcagcgcagagtttaaacaggtggtgaactga

SEQ ID NO: 19242 - DNA, 234 bp, Escherichia coli
atggtcacagaatataaagggaatataggtgatactcagaacagcgtacgtggcgaggaaaatattgtaagaggacagtattctgaactgcagaatcaccataaaacagaggcattatctcagaataataaatataatgaagaaaaatcgggtcaggaaagaatgcccggggctgacagtccacaggaactgatgaaaagagcaaaggagtatcaggataagcacaagcaataa

SEQ ID NO: 19243 - DNA, 570 bp, Escherichia coli; identical to SEQ ID NO: 17228

SEQ ID NO: 19244 - DNA, 324 bp, Escherichia coli
gtggaaaaagcccgcccgatcctggcggctgcaccactggcggatgccgggccctcgcttcgtgatcagatcatggccctggatgaggcaaaaggggcagaagcgcaggctgaaaaactggcggcctgcccgggaatgaccgtggagaacgcccgggctgtgctggctgcgggatcaggtaaggccgaaccggtctctgcatccacaaccgccctgtttgaacatttcatggcgaatcattcaccggcagcggtgcggggtggcgtgtcacagacgtcagcagacggtgatgcggacgtgaaaatgctcatggccatgccatga

SEQ ID NO: 19245 - DNA, 735 bp, Escherichia coli
gtgaccaaaaacatcaacatcatgtggaatgcgctttccaaaaacagaatgtttgacggcaacaaagagctgaaagagtttgtgatgacgctgaccggctcactggtgtttggtcctaacggcgaaatcacacccttgtcagccagaaccactgaccgctcaattatccgggccatgatggaaggcggcacagcaaaaatttatcactgcaacgattctgataaatgcctgaaagtggtggcagacacaccggtgaccatcagccgggataatgcactgaagtctcagattactaaacttctggccagcattcagaacaaggcggtcagtgacacgcctctggatgacaaggaaaaaggctttatttccagtaccaccatccccgtcttcaaatacctggttgacccgcagatgctcggtgtttccaacagtatgatttaccagctgacggactatatcggttacgacatcctgctgcagtacattcaggagctgatacagcaggcccgggcgatggtggccacaggaaattatgacgaagcagttatcgaacatattaacgacaacatgaatgatgccacccggcagattgcggcgtttcagtcgcaggtgcaggtacagcaggatgcattgctggttgtcgatcgtcagatgagctacatgcgtcagcagctttccgcccgcatgctcagtcgttaccagaacaactatcacttcggagggagcacgctgtga

SEQ ID NO: 19246 - DNA, 321 bp, Escherichia coli
atgaacatgcgtaatattaatgttattacagcccgcgttgtgccgggtaaaaccgtatcagatgattttatgcatgctgttctcagtaactgcaccacaaaaatagttcttcctgctccgaaggtgttcagttctgaatcattgccgcacaattttaatatggctgctgtcggtgtgatgaagaagggaatgtcgatgagcttattttcttctccgggaaatacagtggtctccggacatccctgtgcagggaaaacaaatctgacagcagagttaatttctgctgttgtggggagtaataaaaaaggagaagggcaatga

SEQ ID NO: 19247 - DNA, 246 bp, Escherichia coli
atgcaactggtcaccgcattatgggcaacactggcactgatgtatgtctcgctggcagcgatcaccgggaaatatccggtgcgacccggaaaaatgaaatgtatccgggtggtaaccgcagatgaacatctgaaggaagtttatacggaagacgcttccctgccgggaaaaatcaggaaatgccctgtttatcttcctgatgacagaacaaacagaaacaacggagataaaaatgaacatgcgtaa

SEQ ID NO: 19248 - DNA, 435 bp, Escherichia coli
atgtacggaacatgcgaaacgctatgccgggagctggcagtaaagtatccgggagacatgccgctgatgctggttatctggtccccggaagagattcaggcactggctgacggtatggaaatttctctgaccggtcatgaaatcaggaccgtcctggcacgcctggaggacatcccggaagaccagcggattgagtccggtatttcttccgctgcggtgatggagattatccgcaacgagagcgaaaaccgcctggtgaccgtccctgctgaactgctggcgtccctgattcagaccgctgaacaggcattgtggaaacgtgaatgggccgcccgggatcatggcctcgccgtcccggaatgcgtcacccgccgtcaggaggtggttaatcaggcccgcaccctgctgaaaaacaacacacacgaaaacgactga

SEQ ID NO: 19249 - DNA, 222 bp, Escherichia coli; identical to SEQ ID NO: 8585

SEQ ID NO: 19250 - DNA, 531 bp, Escherichia coli
atgcgcgcaaggctggataacgccgcgccggttgctgaaatccgggctgaatctcagctttttgtgactcctgccccggtctgtgatcgcctggtgacgctggcggaaatcagcaaccgtgatcacattctggaaccctctgccggcaccggggccatactgcgggcgattagggataccgcgccggtagccatgtgtgatgcggtggaaatcaacagcgggctggtccggtatctgcgggaaaattttaacggtgtcagggttcagtgtggcgacttcatggaatggcagccggtgcagtattacagccgggttatcatgaatccgccgttcagccacgggcaggatatccggcatatcctgcgggccttttccctgttgcgtccgggtggcgtgctggtcgccgtctgtctcaacgggccacgccagcaggagaagctgttaccgttttctgacgtccgcgaggagctgccgcgcggcacatttgcttataccgatgtcccgacgatgattattcgtctgcgtgcctga

SEQ ID NO: 19251 - DNA, 228 bp, Escherichia coli; identical to SEQ ID NO: 4959

SEQ ID NO: 19252 - DNA, 330 bp, Escherichia coli; identical to SEQ ID NO: 8750

SEQ ID NO: 19253 - DNA, 408 bp, Escherichia coli; identical to SEQ ID NO: 5352

SEQ ID NO: 19254 - DNA, 288 bp, Escherichia coli; identical to SEQ ID NO: 5261

SEQ ID NO: 19255 - DNA, 216 bp, Escherichia coli; identical to SEQ ID NO: 5262

SEQ ID NO: 19256 - DNA, 306 bp, Escherichia coli; identical to SEQ ID NO: 5356

SEQ ID NO: 19257 - DNA, 531 bp, Escherichia coli
atgcgcgcaaggctggataacgccgcgccggttgctgaaatccgggctgaatctcagctttttgtgagtcctgccccgatctgtgatcgcctggtgacgctggcggaaatcagcaaccgtgatcacattctggaaccctctgccggcaccggggccatactgcgggcgattagggataccgcgccggtagccatgtgtgatgcggtggaaatcaacagcgggctggtccggtatctgcgggaaaattttaacggtgtcagggttcagtgtggcgacttcatggaatggcagccggtgcagtattacagccgggttatcatgaatccgccgttcagccacgggcaggatatccggcatatcctgcgggccttttccctgttgcgtccgggtggcgtgctggtcgccgtctgtctcaacgggccacgccagcaggagaagctgttaccgttttctgacgtccgcgaggagctgccgcgcggcacgtttgcttataccgatgtcccgacgatgattattcgtttgcgtgcctga

SEQ ID NO: 19258 - DNA, 228 bp, Escherichia coli; identical to SEQ ID NO: 4959

SEQ ID NO: 19259 - DNA, 519 bp, Escherichia coli
atgaatcatgctgttcagtacgcgccggtcctcattcaggtgcgtgacaatcagcgtctgctcccgtgcttccggtgtcctgccggtatagtcgcggacaatggcttcatacagtgtcatggggacatccggaaaagtctcacctttcagcatcgccttctgctgcgcttctgccagtttcgcttcctggctgtgactgaactccgtcacggagtgctccggtgcccatgcgccctcctgacggggaacctgagacggtttcacactctcaagcccggacagtgccctttccacatcccggttaatcaggctgtataccgcctcccgcagttccggcgtctgacgcacaatctccttcatgatgaccacatcggcagcactgcgcgtctgctggagacggaaaggctgaccgggcgcgatggcctgcagctggtccgtgtcaccactggccacggcacgaccgccaccggccgcaatcagggcgtatgcccgtgccatgtcggtattgcccaccattga

SEQ ID NO: 19260 - DNA, 261 bp, Escherichia coli; identical to SEQ ID NO: 19235

SEQ ID NO: 19261 - DNA, 213 bp, Escherichia coli
atgaatccgccgttcagtcacgggcaggatatccggcatatcctgcgggctttttccctgttgcgtccggggggcgttctggttgccgtctgtctcaacgggccacgccagcaggagaagctgttaccgttttctgacgtccgcgaggagctgccgcgcggcacgtttgcttataccgatgtcccgacgatgattattcgtttgcgtgcctga

SEQ ID NO: 19262 - DNA, 273 bp, Escherichia coli
atggacaataacaccatttctctacaggagttgctcgacagcatttccaggcttcgggaagacgtgaatacccttaccgtcgccttctcatatctggcattctcaattccaagggaacagatgcaatcaacgctggcatcaatccagtttgaatcatgcaatcccaaatggtctcaggaacaacaagactctttcaggcggcttgctgtattactggatgaaaaatatgctggtaaaattaccatttcggtggagtcttcagagaaccagtaa

SEQ ID NO: 19263 - DNA, 282 bp, Escherichia coli
atgcacttttccgggctgacgtacactgtgctcagcctgtttttcagcgatccggatatgcatccgctggatttcagtttgctgaaccggcgtgaggatgacgaagagcctgaagatgatgtgctgatgcagaaagcggcagggcttaccggaggcgtccgctttgacccggacggaaatgaagttatccccgcttccccggatatggcgggcatgacggaggatgacgtaatgctgatgacagtatcagaagggatcgcaggaggagtccggtatggctga

SEQ ID NO: 19264 - DNA, 138 bp, Escherichia coli; identical to SEQ ID NO: 16164

SEQ ID NO: 19265 - DNA, 249 bp, Escherichia coli
atgcatccctctgatttcagtctgcttgtcccccggcatgaggaagagcaggtggagaggccggatgaggacaaaatgctgatgcagaaagcggcaggacttgccggaggcgtccggttcggtggggacggagggcgcgatattttatcgtctgcggatgtggcggatgtcatggtggatgatgccgcattaatgatggcttcagcggggattccgggaggtgtgagatatgtcccagccggttggtga

SEQ ID NO: 19266 - DNA, 258 bp, Escherichia coli; identical to SEQ ID NO: 5361

SEQ ID NO: 19267 - DNA, 234 bp, Escherichia coli; identical to SEQ ID NO: 5329

SEQ ID NO: 19268 - DNA, 201 bp, Escherichia coli
atggaagaaaagcgcgccagccgtcatgtgacagtcccggcggtgatgctggaaaaagtgatggcgctggcaggtagtgaaatgaagcgcctgtatgccgtcgggagtgagaacgggggcgacggtgacgcattcgtcagggaggaactcgaagcaatggacgttgtgttgcaggcgctggacggggagacgatgtcatga

SEQ ID NO: 19269 - DNA, 162 bp, Escherichia coli
atgggtacaaaagcgcatgacctctttgtgttgcctttgtgcagaaagcatcacgacgagctgcatgcggataccgtggcatttgaagagaagtatggctcccagctggagctgatatttcgttttatcgatcgtgcgctggcaattggcgtgctggcctga

SEQ ID NO: 19270 - DNA, 162 bp, Escherichia coli; identical to SEQ ID NO: 12850

SEQ ID NO: 19271 - DNA, 171 bp, Escherichia coli
atgcagaccttcttcccgaatatcccggtggccacaccgaccaccttcctggtcaacgtcaacacgcttgaggcattaccgcttttacagggggcaacggatgctgccggttttatggcgcggatggataccgttctgcagatgtacggagggaaaaaaggtgcgaaataa

SEQ ID NO: 19272 - DNA, 171 bp, Escherichia coli
atgcagaccttcttcccgaatatcccggtggccacaccgactaccttcctggtcaacgtcaacacacttgaggcattaccgcttttgcagggggcaacggatgccgccagttttatggcgcggatggataccgttctgcagatgtacggagaggaaaaaggtacgaaataa

SEQ ID NO: 19273 - DNA, 384 bp, Escherichia coli
atgctgatgaaagaagatattttattactgattgaacctattaaccattttgatattcctggtttccatctcaccggaacccggcaggcactgaaactgattgacgatgttggttgctgcaatttgaaaattcagtatgacatttatcacatgcagcggatggaaggtgaattaactaataccatgactcagtgggccgataaaattggtcacctgcaaattgctgataatccgcatcgcggcgaaccgggaaccggagaaattaattacgaatatctctttacggtaattgaaaattctgactacaacggttgggttggctgtgaatataaaccccaaaccaccacggaagccggtttacgctggatggatccgtaccgttaa

SEQ ID NO: 19274 - DNA, 387 bp, Escherichia coli
atgtatgatttttataagcatcgagaccatctggtaagatttgacggtaaagtctggaaagacgtaacacaaaccaataagcccaagtttacccaccagcaattagcctcaagatttgatatctggactgaagcacaaaaagataatggtgatttcgagtttatcagaggctttgattatacttacgaagacgaccttaaagacgccattaaattaattgataatttcaactctattaaaaatggtgacaagcacaaagccaacggtaacagatacgataaagatttaatcattgatgcaatcaccaaaggacaatcacaaagttatatttctgggaaatacggtttatcacgtagtcagtactacaagattaaagcgtctgtgtaa

SEQ ID NO: 19275 - DNA, 324 bp, Escherichia coli
atgaacgaatatgaattacagatttttgttgataacgacaccgctcttatgattcaggctttcagtgattccggtgtatcaattgactttgacaggctgttaaggataatggttgataactcagaaacaattgaagattttattcagtcggtggagtttaacgagcctcgaatgatgctaccaattacagacagcaacatgaaaagattggttatcgagcaaacgaacaaatacagtatttccccagagcaatttttgaaaggtgctgtgataatcttgcacagtgataatattctggtgacggattctgtgagggttcactaa

SEQ ID NO: 19276 - DNA, 2076 bp, Escherichia coli
atgagcaaattcacagttgatagttttatcgttgagctaggcttcaatgaaaacgttattaagggcttgcaaagagttgaaaaggcagctttgcagtcagcacaaagaattgaacgtaatttgaatagagcgtttaaggtcgataccaagcaacttgacagcaatctgacaagctctttagggcaacttgaaaggaagtttaataagacctttgacaagattgagcagcgtcttaaaaacactagagcgtttaagattaaaacggaaattgaggatactttaaagccacttagacagccaagacagccacgaattagcggcaacagagcaatcacagcggcttattcagcgaatatgtctaagctgaaaggtcttaacccaattgtcgagaaatacattaagagtcagttttacgcattaagtagtaaatccaagacacttggaaacgaagcttttaatcgtgagttagcaaagttaaatcaaaatctacgtgaaacactttctaagtttaacaagaccaccagcaaaaataatcacagtgaaaatgcttcaaatggtttagatgtactagcttcaagtgcaattaaagcgggtgcggctatttatagttttcagacagccttagaagcctataggaagattatggaggttggtctgaaaaaagaagcatcacaacgagcggcacaattcgttttaggtgatgaaggtgctaaacgagctacagaatttgttaagaatcttgctaataatactggtgttgaccagattgaaacattaagcagttttgctaagttttccgctggtgctggtgatatggatgcaggccagaaagaatccttattttctaatgtaattggtacatccagattaatggggctaagcactgatgaaattaacgggattctgaaagctttcgagcagatggcatctaaaggaaagattcaagctgaagaattacgtggtcagccaggtgaccgtatggcaggtgctttccagttatttgccagaagccttgggatgactacagaagaattagacaaagccatgaaagacggtaaggttctttctaaagatgttcttcctaaagtatccgctgaaatgggaaggatgattgataaagctggtggatgggaaaagattattaactctactcagacgcagttaggccgcctttctaattcatggaataataatctggccttaatgttcgacggttcacaggaaggtttaacagactttacaaggtcactgactaatttacttaattcactaggtggtcaatctaaaaatcttggtgaacattttggcgacttgatgaaaagcatgtcaaacggtattgatgatttaaccacgattagctaccgagtgcagggattctttgacagagtgacccttgcttacagagaattaaatgacactcaaaaggctgtagctgatggtatcgcaaatggcctgttaagtgcattaaaggggcttgctggtatagtcgctgtaaggtctgggattggtgctgtaggtggtatctggaacttaattagggctatttccacgcttggaaatgtcgcaaatactgcagcgggaagaattaattcacgttccggtagtgttgaaggtggtaaaggaaaattatctgtagctgatgcaattaccaaagtaatgattgtcggtatggcaactgatgtgattaactccattgttaaaccgttctatgaacgtcagatgagtaagtcagataatccaattgacaaagttgtaaggtcaaaggtggaacctacagaccaagcattgtctggtgacatgaactctttagccgctgttttatgggctattgttcagggcaaatcaaaagatgttccacagttttcacctgaagcattaaataatctgaaaggtcgagtggaaacattcacacaagatttaaaggttatcaagccgtcagtaaatattcagcctcagacaatcaatatcacaactcagacggtacttgatggaaaggttattgatgaaagaaccacatcgcatattaatcgtatgcaggaagataccttgattagctcagcttacccagaggaataa

SEQ ID NO: 19277 - DNA, 774 bp, Escherichia coli
atgtttgacacaaagcaaattagatactcaggtaaagatggtatctattttcaccttagagataatgtagaatcttttcttgccttaacagctactgaacagatggactatgactcaccgatgatggtgacaactcaggctatgcaatcagggcagactgtaacagataatgtaatgcgttcaccaagaactatttcaatcagtggtgtggttgtggttggtgaatccggtagtatccttatctcaagagataataagctggtggaaaacttcatcgacactctggaaaactggcgtgaccagaagcaaattatctcagttgtctgtaaagatggtattaagattgacgactccattattacaagctttaaagcctccaaagatgttggtatttcaaatggtctaagaatccagctaacttttcaggaaattaactttaaagctattgtaggtcaaactgatatttcagcagctactggcaagaccgctaccacgaatgatggcggtgctacttctaagaagaatactggcaacactacgacaagcttgggtaatggtatgttgctgtgtcaggagctatataatcgctctacgagtgaacttactaatgagcaacttcaagcccgtatcaattgtggtaaaagtgtcagagttgagaatggaaaaagcaccttctcagatgccgctaatgagcaagcttcgaaagtgcttaataatgctggtgcaggtaatgttttgaagaggctgtctattaatcctaacaagcgctactga

SEQ ID NO: 19278 - DNA, 495 bp, Escherichia coli
atgatttacatcggtttgccacaatggtcgcatcctaaatgggtgcggttggggatcaccagccttgaagagtatgcccgccactttaactgtgtggagggtaacaccacgctttatgccctgccgaaacccgaggttgtcctgcgctggcgtgagcagaccacagatgacttccgcttctgttttaagtttccggcgaccatttcgcatcaggcagcattacggcattgcgatgatttagtgactgaatttttgacccgcatgtcaccgttggctccgcgcattggacaatactggctgcaactgcctgccacattcggcccacgggagctgcctgcgctttggcattttctcgattctcttcccggtgaatttaattatggggtggaagtccgccatccacagtttttcgccaaaggggaagaggaacaaacgcttaatcgcggtttacatcagcgcggcgttaatcgggtgattttcatcagacacgtttaa

SEQ ID NO: 19279 - DNA, 396 bp, Escherichia coli
atgaatctggcccgggagcattttgcaaaagttaatcaatacgttgatgaaattctcgctgcactgaacagaatgcatgctgtatttattaaacactattttgagccacttaaatccatgcattctgttattacaacacaacaggatatcagtgtatcagatgatgtcattgtgcttattgaccatggatattcactggccgctattatgacggatattattacaacgccactgtttaaaccgcggaaacaggaaaatggtgaggcagtgataaaagataacgttattgaaatggaaacggatgataatggaatgaacgttattaataaggatgagctggatgatgtattggccagttcggttgtgaaatttgattatttttcatcccagagttaa

SEQ ID NO: 19280 - DNA, 1179 bp, Escherichia coli
atgccacttactgttcgacaaattgagtcagctaaacccgctgacaaggattacaaactttccgacggtcagggactttatcttcttgtcaaaaaatccggttcccgttactggaatctgaagtaccgttttgccggtaaggaaaagaaactggtgattggtgtctatcctgacatatctctggctcaggcgcgtcagaaacgggatgaagcgcgtaaactcctggctgaaggaaaggacccgtcatatgagaaacaggcgctaaaatttgccatcagggagagtatggcctgcacattccgcaccattgcagaggaactgcttacccatatggcacgtcgatggacagcaggttaccaggcagaccagcgtgcaagacttgaaaatcatgttttccctgcccttggaaaccgtcctgtgaccgggatacgtcccatggaaatactgaacgtcctgagggtgattgaagaacagggaaaacttgaagcactgcgtaaaacacgccagctctgtgcgcaggtttttgattatgccatagcaacaggacgtgcaactgttaacccagcgtcaacactcagcggggtactgcttcctcctgaaaaacaacagcgcaggacactttctgaagagcagatgggggctttcatgcatcagatgacggcttccggaaatctgatgtcactggcaacgcgaatgctggttcttacagcggttcgcaccggagaactgcggctggcgagctgggatgaaataaacttcacggaggccctgtgggttattccaaaagaaagaatgaaaatgcgacgaccgcatgttgtgccgctttcacgtcaggtactggcgttactgaaggagataaaaacacgcactgaatcgcgtcattccgcctttattattcccggggcattcaggaaagaccgcccccggggccgtaagtgtattaatgaattccttgagcagtcaggctggcatgccctgacaacagctcacggttttcggcataccttcagtaccattcttcatgaccatgatttcagctcggcctggattgaactccagcttgcccacgttgataaaaacgtcatgcgtggcacctataaccacgcgcagtatctcgatggtcgccgtgaaatgatgcagtggtacgccgactacattgattcactctccagccagtaa

SEQ ID NO: 19281 - DNA, 273 bp, Escherichia coli
atggttatagttgaccttcattgctcccgttgccagtccgttcaggtttaccgtcacgagaagaccccaaaaggacatgagcgattccgctgccgtgattgtcaccgggtgtttcagctcacttactgttacgaggcccgtaaaccgggagttaaagaccaaatcactgaaatggctttcaacggtgtcggaattcgcgatactgcccctatgctgaaaatcggcattaatactgtcatccggactttaaaaaactctcgccacgaagaataa

SEQ ID NO: 19282 - DNA, 249 bp, Escherichia coli
ttgctggcgctgcttgccccttttaccatcggtgtgttgatcactgacgaatggggtagttacactagagggttaccgaaggagaagcatctgactggtacaatttttactcagcgcattgagcgcaacaatctgaccctgagaacccgaatcaaacgtctggctcgcaaaaccatctgttcctcgcgctttgtggaacttcatgaaaaagtcatcggtgcttttatcgaaaaatatatgttatattaa

SEQ ID NO: 19283 - DNA, 1038 bp, Escherichia coli
gtgagtgagttaataagtaagcttttatttcacttttataataaatttaaaaaatataatcattacgataccaatgttaatgatgaggtaaagtgccatcgagtaatcattctacatgagggcaattcatccactttagcttactttcagtcggccttttgcgaaaaatttccttttgctgagtgtattttacgagatgtcaggaatggtgaaccatttattattaagtctggggatgccatagttattgttcgtttcattccaaggaaatggcaaatttttatcgaaagggaaatagataagatttctaaaataatatatttctttgatgatgatcttcttgatgaatatgctttagattcgctctcgaaggattatcggatgcgtattatagcacgttcggctgaacagcatagttggctcaaaaagcattgtagcaatttttgggtttctacagggtatctccagagcaagtatgcttatctccatcctgaaattatccctccgaaaccatctagcgttcttcttgaacctcagagaatgataaaagtggtttatcatggaactagctctcaccgcgaagaaaaactatggctctatggcataatggagcaagtattgcaacggtgcccaaatgtgtcgttcgaaatttttggtgaacatgaaatttacaaactttacagagaacttcccagagtttctgtcttacatccaatgagttgggagaactatctcgcctataccaagtcgcaacaggccgatataggacttgcaccgctgctgatgtctaaatttaatgctgctaggggaggcgtcaaattttatgattttgtgcgaatgggggcggcgggtatatatagtaatgtttcttcatattcagatataattactcataatgaaactggaatcttattggaaaatgagccttctttgtgggttaatgaaataattaatcttgtacagtctttgcaaaaaagagaatatatagtgaagaatgcttatgatcatgcaaagttattgtcttcaccactagcctaa

SEQ ID NO: 19284 - DNA, 3132 bp, Escherichia coli
atgaataatataatctttgaagatgatgatctcttaataatgatctcgaattactgtaaggaaaataaacatgctgtcatttgtttttctccacgtattgctaatgttccggaacaagtcattgattcaaatttggcgttttcaaaggttttttttgataagtacccctttactggtatatatataataccaaaatggaatcattggtatgaaacagaaaattttgataaagcaatctcagctattaacaattatacaaacttgcaggatatctggacatatggtgtctccatgggagcatatggtgctatgcgatatgctgagcagcttaatgcatcaggtacaattagtatttgccctcaggcaagtattaataaacatttaattccatttgagaaacgatggggcactgaattagcaaaattaaatatttctgaaaattggatgaaactacataaacttgctaaaaatacttatgtcttttatgattccaagtacatacctgataaaagacatgtcgacttattaaaagataactactcgtttattacagaggtaaaagttgattttgcagaacatgctgttgcaggtgttctacttgaatgcggtttactcaaggaaactgtattgaatttaatatatggaaatttctatatagagagttttttgtccacattaaaatctcagagaactagttcacctggtatttattgtggtttttctaactatttacggcacttacggaaatatcaaaaagctcaggtgttctcaaaaaaatctttttggatgcgagctcataataaagaattacaaaaaaatgtagcactaacaaaacagactataaacgaatatattttaactttagttgcatgcaaagcatatgacgatttaaatatggtttttgataatgtcaaaaactatttttcaattgatatatataaaggaataaaaaatcagcattcagtaactatcaaaaacgttgaatcgggaaaattcgttgagtcaaatgatacttttataggtggtgcacatgttcatcgctggcttaaatgtatcaaagacggcatttttccacctgaaatttatcaaccattcgatgcatatggcgctggtggtattcctgtctggtctaaaaaattgtatgagtcagctggttcgttaaactacaaatctataaatcttattgtcggtgatttccgttatgggaatgcggtgcttaccgataataagacaacaaaattaatgcttgatggttacgctgcagtgaccacttcactgatcaattcagaaaatgatattttaatgatgcagcgttgtttgtcagcgattaaaagatggaatgaaaaatttcatggtgctttaaaaatagttttctgggatctatttttcaaacagtataatcatttgggagagttaaataaaagtgcatgtgaattatatgctgatgtaattagtaagcattgtgagtttaatgttgttgactttcaaccattgcataaatataaattcaggggtctgcgtagactttttatagataattcataccatccttcttatatcggttgtctttttttacataacttacttattgagaataaggacgttttagagtcttattgttcagcagtatcgtatgttgataatatttttttaaattatgcaaaacaaataactgaacactctattaaacctgtccttatacttggtgatagtatttggatttcgtcattgctccgttacctctgtgaacaaagttattcaaatcttgccagtgctggtttatttatctgcaatatagatgataaagatataggtcggaatattcaggatatacgtaaccttgataagcttggtacactaagaattgttttgatttcgccaaatccagagcttgcttatgtcaaattagccaacaaaacgaatcttgacaaagctatctggcaaaaagtgaaatgtataaattgggaagcaaaggcttcacatgttattaaaaatagaaaacaagaaccccgatttagtttcgaggacaaaaacgatgaatccttattagtggatttttcgataaatgatacgatgctcgaatttgacccgtttggaacaccaacgtttacgggcttgatatctcttcttgattttattaaaaaaaatgattttgcagggtatcttgaggacaactttcagttagcaaatgatgtgttagtttctcgtaatggtatcgcttatctaatcgggggacatcattctgtattagaatttgtaactggtaagaataaaccacctgtggaatcagttttaaacttttgggataatataaaaagaagaaatgctttttctggacaaaaaaatatagaatatagtcatgttatttttccagataaacaatctgtccttgattatgaatttccaatacgaccattatatcgacttggagaacattattttagaaatgtggacgatgatctaaaaaataaagtcatttatcccataaatgaacttaaagaattgggcaatgcttatctaccactcgatacacatttaagtgattctggctcattaaaagttttagagttattgcttaaatctgttggtatcaatgcaactgatactgttaaacatatttcatcttgtatcaataaaaaacaaaaatgggctggtgatttaggggggaagttgacgcctaagatgtatcaggaaggtatgattttgaatccggattggcgttatgaacaatttaagagtccgggtggttttaatgatggaatggttgatattattattagtcccgatgcgctactaaatgaaaccattttattgttcggggattctttctttagaatgatgctaaaacatttcagtgcaatttttaaaaaagtaatatgtttacgaactcgattttatcataaagaaatgatcgagttggtcaagccaggttatatatttacaggcaatgctgaaagatatttatctaatgttacttctgataaagaagctcatgcattctcgttatattcatatcttaggaatgaagccccggctgagcgtgataataatttcattagagcttttagagcttttacatctcctgaatctgatttttcgaaaaattatttcttatcaaaagatgtaaagtaa

SEQ ID NO: 19285 - DNA, 1614 bp, Escherichia coli
atgaaaatccttttttatctagaaattcacccaattagaaatagctattcatctttcacctgggtcggcaagcagattataaatatgttgagaaagcagtatctttctcaacaccatgcgaaaattgattatgatgatattcgaatcgttgtttccagacattatcaagaacttattgataacaatcaggatttaaaaacaatttttcttggactaacaaaagaagaaaatgacagactttctttttatatgagagactggaattctgatgttcaggcgataaacaattggacatctttgatgcagggaactggtgaggtttctgaattttataaaagcatcctcgataggatttatcaaaatacatttagttttgatgtcgttgttaactggagcactaatggtgcaattcgtgatttctgtcgggaacgaggtctaagtaatgtatctatggaattgggatgtgtcagggaaccaattataaataccgtatgtttcgatgcgtgtggtgttaatggcaattcagtgataaagaatttagattttaacgcaattgatgaagatgaacttatagatattaaaacaatcatgcctatcaagacaaaacatgatatgtcccttgattcattgttcagaccaataaattgttcagcttcagatgttctttattcgtctttcggtaaaaatgtattaataccattgcaattaaaagacgattctaaccgaattatattttcccgctttcacggaatgtatgatttcttgagagagatcattcctcaacttttagatgctggttatacgtgtattgtaaaaccacatcctatggctaatgcttctgcagctagagaagtcaacaagaaagatcattttcaatgccaagaatatgtggataaattaggattggatagtgtcatttggctggacgatttaaaaggtaatgagaattatctttctttattaaatttagttaactatgttgtgtctataaacagtagtatggcattcgaagcaatgatgctgggtattcctactgttgttatggggaatgctccgtttgatataggttcttattcatttgaagatttgcttgaggataaatatcctgaggaattggctcttaaaaataaaataattacaaatgtaatttatcgaaactacttagtaccgcaatcactagcttttgaatatgaacattttatattccatattcgtagggctattagattaaataaaatattgatgaataaaggagcctctgcttttacaaaggaaattataaagcatgataacatatcatatatctatgagagtttgaacacagaacctcttgtgaaaaaaaggcatttggagcattacaataaacatgttgaacaaattaaaaagaaatcgacatccacgacgactctggctgcatcaatatcaaatgttacccctgagttaataatgtcaacagtaacaccctccccctctgctggtgaattagttataaaacatccggtaataaaaagctcgtttaaaaagaaaatgataaaactcaaaaataatccaaaaaagttttttaaggactccaaaaaaggatatattagagttttatccaacatcattccataa

SEQ ID NO: 19286 - DNA, 1035 bp, Escherichia coli
atgaaagtattatatgttaccaatagtgcgagaagagaaagaccatatttagatccagcggttaggtatagatgttataattttgcagaggtcctgagagctgaccgaaatcttgtaaatgtcattcatttgggtgacttgaaaatggactatatatcctatttcgatgttatcgtttttcataaacctccatttacaaaaaacttgcaggctgcaatagcttttggcgagaagttaaaaaaaataattattgccgattatgatgatctcattttcgatgaaaaaaatgcattgttttcgtctctatatttgaatggcagagcaactgaaaaagaagctattagtatattcaatagaaatcacaaggctcttaatctttttaataaaattaccgtatctacatatccacttcgtgatgaagtactccactcgaatccagatgcaaacgtaaaggttatacacaatggcctttctcagatttgggttgatagagcaagagaagacatacttagcaacccagtaccagggcttattgggtatttctccggcacatcaagtcataatcatgattggcaaatggtcgaggatctattagccgagtttcttaataaagaaaaaaaagcaaaactaagagtagttggtccattgcacattaataaagataaatttgaccaatctaaacttgaaattatcaaagctgttgattatgaaaaattgcccaatcttattaattcatgttgggtaaatattgctccgttagaaaataacctttttaattcgtgcaagagtggtcttaagttctttgaagctggaattttaaatgtaccatcaattgtttcaccaatccctgatatgtgtagattttcagagtctggcctgttgatgccaaaaaatccagatgaatggactgattctttgcatttaatgatgaatgaaagtacgcggcagtcattatcaaaaaaagcgtaccagttctcaattgataactgcatggctagaaatcaattaaatactctcaaacaattttattcttaa

SEQ ID NO: 19287 - DNA, 273 bp, Escherichia coli; identical to SEQ ID NO: 19281

SEQ ID NO: 19288 - DNA, 249 bp, Escherichia coli
ttgctggcgctgcttgccccttttaccatcggtgtgttgatcactgacgaatggggtagttacactagagagttaccgaaggagaagcatctgactggtacaatttttactcagcgcattgagcgcaacaatctgaccctgagaacccgaatcaaacgtctggctcgcaaaaccatctgttcctcgcgctttgtggaacttcatgaaaaagtcatcggtgcttttatcgaaaaatatatgttatattaa

SEQ ID NO: 19289 - DNA, 324 bp, Escherichia coli
atgcgaaaagaatattttaaagcggctgcacagtatgacgattgggaaggaagtgttgcagcagatgagcttgagaagaaaaatttcagcgacttcttaagagtgaaaggagtactcaaacaaggtgaagtcgttaaaggcatctccctttattcgggtgaacatcgctttgatgttgaagcgtacatcgctgatgataaaaatgtattacggaaagaagatattcagattacccttgaagaatttttcaaaactttcaaaaggttctctatcacaatttctcgtaaaggtgaatttgaggggcaagaaatcgagttcaaataa

SEQ ID NO: 19290 - DNA, 252 bp, Escherichia coli
atgagtatttactttaatgatcaaggtagcgcgattggatatcaagtagatggacgctggttaataaaaggggattatttgcaaatcgagcaaggccccaacattccaagcggtttatacaaaatcaatgacaataaagtgaaattcccattcaactacaaagaggttgagggggtgattgacacagagaaactcactttcaccgtctgtgacagtgaatacaaaatgataaaaatgaaaacaaatatgtga

SEQ ID NO: 19291 - DNA, 231 bp, Escherichia coli
ttgcgatggtttgacactgaacaagtctacattgccctgaaatgtggggaagtgaaacgccacacaatagccagcaatttggggcaatgcgttacccgtggagacgagaagcgtgcaaagatgtttcgtgatgctcttacacggtatgacagagaacgcgcgatcattgatgcgcagaatgtgccaggacgtaagaaacgtgctggacgtaaatcacaattaatcaactaa

SEQ ID NO: 19292 - DNA, 162 bp, Escherichia coli
atggatattcgattcaatccagaagtatttgcagaattacgcacgatggcaacacaacgaggtattagtattcccgcgttagttaacgtcatacttaaagaaaaaatcatcctacatcaagaggaaaaatatgataaagacgatcaaacgaaaaatagttaa

SEQ ID NO: 19293 - DNA, 1494 bp, Escherichia coli
atgataaagacgatcaaacgaaaaatagttaatagcattaatcccgtttaccttgtagattcaatttgcggctcaggaaagagtcaccgccttatagaatatatactcggccttcaagattcatctgaagctatcccgcaacgtgttctaatagccgttcctacgcatgaattagccacagagacgcgtaataagatgttagacgcgggaatacatggttatcatgttaaagtcgatagcggggctgttttagcccttaaacaaacattatcagaatcctttgattatccggtcgttattaccacgcatcaggcactacaggttttttgtgagagagcaacctttgatagtgagatgcaaaaactcctgtatccctttaaagttttcattgatgagattccggcagcttggcacggcgatcacgctacagttttacatagtgactctgtaacggataacttcccgtttatgcagtggatggaagagagagacggattattattccttaagtctgacaatgagaacgacctttacaagtattaccatgaacgccacgccggatcggatagcctgaaagcggttatctatgctgtgctgaacggtagcggattgctttatggtgaaacagataaggggtacagcttctttgcgcagacagctaaccctgtgatcaattgtgcaatgtggtctgaacgtctaatcattatgggggcgggtgttagccgctctgaatggcgttatgtagctgagaacgtggctaaggtggaatgtatgccagcgcctgatcatctactaccggacaacgaccgcagagagcataagaacacgcctgttaaactggtatctgtgctaaagccaggagtaagagcgacgctcacgcaattacaggaagtttttaacaaccatctacaaacgatagcccttacgatggggagtcggtttatctttgcaacgaacaacgacaaagggatctgtaacttcaagactattgcacttaatagcctggaggataacgggaaaggaaaagcggtaagcatggcaagttacgggctgaacgtataccagagctaccacgccgccgctttccttgggtgtgctaacctcaatgctaccgataacaaccgctgggcgcaatggcttaatttctccggttatgacgctgagacggtgttacgccttaaggttgaagcaatgacctatgagcgttgctaccagtttataagccgcacaagcattcgtgatagttcctgcaaagaggctttaacgtttatcgtgcctgatacgcagtgtgctgaatatattaagcgttggtatcttccacaggctgagatcacaacgttaggcattcacaaggaaagaaagaaggtgaaaggagaaaacacaaaacaagctattcaggaattgaaagctaaaggcatgaaacaaaaagctatagccgaggcgttaggcatcgacttgaacactgttaaatatcattgccggaagaagaaatga

SEQ ID NO: 19294 - DNA, 186 bp, Escherichia coli
atgaaatatttttctattttagatgtagtgatggcattgattgaaggtcgagtaagccgaaaccggattctacagaaccgtaacgcagcacgccgcagcggttatcacgatcgtgaggctctattcaccgaagcccttcaaaagttcgaccagattcgcaaacgtgagaaggaagggcagctatga

SEQ ID NO: 19295 - DNA, 258 bp, Escherichia coli
atgaaacatcatttaagcattggtaagcacgaatacgagatcacggaaagcggctacacactggcaaaacagcttgctgatagcaattatgagctacccgcgattatcagctttcaggagttaccgcacagtaaagaacacacgcagcattggctaaatcacctaagccattttggggtaattcagtatgaagctgtgaataatcaaacgttcagactgcttgagataagcccgtttgaattgtgggtgacactgtga

SEQ ID NO: 19296 - DNA, 204 bp, Escherichia coli
atgatctcttacattcaagaaacagaattctttcaaaacattttatctgatgcaaaaaactatgctgagttaatccgactggcaaaagaaacagaagactacgaagcattagagcgttatcgtgatgaagtgctgacgctcaagacaccttttaacattgtaatgaatatgattgatcaggctttagaggagacagcagaatga

SEQ ID NO: 19297 - DNA, 309 bp, Escherichia coli
atgagcgaagtacgcagcgtaactatccaaatgatggatatggttattgacctgcaaaaaagcgtcaatgccgctatagaatatcccagcgaactaaccatcacacaggctgttattaatctggaatcgacacgcgaagctctgcaattgcttatagaggcgtgtgatcaatcggaaggtgcacagattgaagctgatgacttgagcaacctgatcatcgttattcaggacacaacggaaatcatgcaacaagcggtggcagacttgcaaccactcattaatgaactaatcgacaaggctaatcaatga

SEQ ID NO: 19298 - DNA, 570 bp, Escherichia coli
atgtctgaaatcacagtctcccgtccggaagtggtcaacgagaatacggacgttatctgctccacctcagtcaggtacaggtcactggaatatgataattttccggaaatcagcgaagcgaacattctgagcacatttgaacaactgcaccagaacaaagatgaagtgtttgaacggggagtgatcaacgtcttcaaagggctgagctgggattacaaaaccaactcaccctgtaaatttggcagtaaaattatcgtcaacaatctggtgagatgggaccagtggggatttcatcttatcagtggaatgcaggcagatcgcctggctgacctggaaagaatgttgcatctgctcagcggtaaaccgatccccgacaaccgagggaatatcaccattaatctggatgaccacatacagtccgttcagggtaaaggacgctatgaagatgagatgttcatcattaaatactttaagaagggatctgcacacatcactttcaaaaggctggagctgattgacagaattaacgatataatagccaggcactttccttctgtgctctcagcctga

SEQ ID NO: 19299 - DNA, 882 bp, Escherichia coli
atggtgagagccaaaaaacaagatttagcatggtttgatattagtaattatgaatttttaattgatttaaccttgccggacttgattcaagaattagagtggcgcgattttttattgcgtcatgcaaaagatgacactgctatattcaaagaagagtacgatataaaatatgaaaggattttttcgggcgatcctaacctaaccattctcaatgaagaagaggaagaggttgaagaatttattcgcaaagtaaatgatgaagccccatcattaagaaatgagtacgatgatcttccctcattatcttcagctatgggggttagtccagtaacattttcagagctggccatgtactctttctcatcgatagatcaaggcttttttaaaagagacgaagaggattgctacctcaaggcaaacgctatgcttgcgagtgttactggaaacctaagtaattgttcccctaacagcatactcgtttctatagatttagatgacgccactgatgacgaaattattaccagcctgactcaccttctacctctatggcgaaaagagttaaaagtaccagagagagagcatgtcgctcagaaaaggattggattaaagaccctccagaagttgatatctaatagagtgatacctattgttgatctgctgatttggggtgagaagtcaggtaaggaagtgagcaatccgatgatttctgccttggtttttagtgatgatccgaaagatacgcaggctattaaggaatcaataaagccttttgcacttgaatccataagcgagagatacacccgcttgcttcagctttatgtaaacaaagacagagaaatgagcttgataaaaatatctgatttaatgagtagagatttatag

SEQ ID NO: 19300 - DNA, 198 bp, Escherichia coli
atgtctcaatcatttattcgtctttctgaggttcaacgccgtactggttacagcaaagcgtggatttatcggctcatcaaagaacagcgattccctcaatctgtaaagattggaagccgatcaattgcgtttattgaaagtgaaattgaagaatggattaatcagcgcatcgctgagtcgcgtggcgaggtagcgtaa

SEQ ID NO: 19301 - DNA, 2106 bp, Escherichia coli
atggctaaagcatggaaagatgttatcgcctctccacagtatcaggcgttagcaccagaacaaaaagcgcaggctcaggagcaatacttcaatgaagtcgttgccccgcaagccggagaaagtgtagagcaggctaagcaggctttttatgctgcctatccactaccatcaacgaatgaaatagaccgatcccaatcagcaactcaaaatattcaacatacatcatctgataattctcttgcgtcagggtatgcaaagttagctactcagcaaagagaggggcttgagcgttcagcagaacagggagccagtcttggggctgcgatgcgcgatgctataacaggcgaaagccgaatgactccagagatggagagactgcaaaatgtcgcctctgccccagaattgaactcactaagcatggatgccctaaaggctggatggtctcaacttttcggctctgacgcgtctcaggaaaagattcttcagggaatgggggcgacattaaggcaggatgagaaggggaatactatcgtttctctgccatcaggtgattatgccctgaacaagccgggtttatcaccgcaagacctgacttcgtttcttgctaatgcgttggcgtttacaccagctggcagggctggaacggtgcttggtgccataggaaaatcagcagctacagatttagcactacagggagccactagccttgctggtggagaagatattgaaccgttacaaacggtaatttctgctggcattggtggtattggtaaggggctggaaaatacagcgagtgcggtttcgagggctgttcgtggtgatatgtcgcctgaagcaaaggctgctgtcgactttgcatcggaaagaaatctgccgttaatgaccagtgacatgctgaaagataaaacctttatgcagagtcaggctcagacattaggcgaaagagttcctttttttggaaccggtaagaatcggctgaatcaacaacaagcacgagaaaatttagtcagaacatttagcgatggtctgggtggcatttctgataaacagctttatgaatctgcgactaaagggcaacaaaaattcattgaggcagcaggaaagcgatataaccgcataattgacgctatgggggatacccctgtcgatctctcaaacacggtaaaagctatcgacaatcagattgccgtgttaagccgcccgggcaaatctcaggatagagccgcggtaaaagtcttgcagcaatttaaagacgatatcaccagcggaccaaatgacctgcgtctggcgagggaaaacagaaccgatcttcgaaagcgatttatggcgtcatctgacactgttgataaagatacgctccagaaagccagcgatattatctacaaggcatatacggcggatatgaaaaaagccgtagccaaaaatcttggagcagacgaagccattaatatggcaagggttgatcgttcatggtctaaattcaatgacatgatgggaagaacgcgcgttcaaaaggcaatagccagcggcaaggccacgcctgaggatgtaacaaaactcgtttttagccaaagcccatcagaacgttctcagctttacaggcttctggatgacaatggtaggcaaaacgcacgagcagccatagttcagaatgctgtagataaggcgactgatccgtctggaaatatcagtgttgagaagtttattaatgcgttacaccggaacaggaagcaatcagcaactttctttaaaggcgtacatggaaaggaactggacggcgttattaaatacctcaacgatacaagacacgcggcaaaagcgaacgttcaaaacttaaatggtcagcagctttatggattgttagttggtggtggcatcataaacgcagcagtattagcggggatgctaaaaacggctgcgtttgttgttcctgctgctggtgccgtaggcggagcagcgaaggcatacgaaagccctgttatacgaaatgccttgttacgtctggcaaatacgccaaaaggtagcacagcatatgacagagcgatcagtacggtcacacaatcgctcaccagagtcgcacaggcatcacaaaaagaagctcaataa

SEQ ID NO: 19302 - DNA, 978 bp, Escherichia coli
atgattgccgcaaagcctcataaggactatcacgaattgctaggattgctacttgaacgtggcatgattatcaatgatcgaaatcgtgcgatacgtaagctgtcgcaggttggatattatcgattgtcaggtttttggtacccttcaagaattattgcgacaacagataaaggtctttcgtacagaacagaccgatttcttgctggtaccagtttcgagaagacgtacgatctatatctttttgacaaaaaactgcgtcttttgatgattgatgctatcgaaagaatagagattcatgttcgttcagtcatcgcgcatgaggttggtcgcaatgatccacttgcctacatgtcatcaaaatacattaatccaaaattctcatctgccttcgagcattgggtgtataagcaaaaagtaaaattagacgaaagcagagatgactgtattgaatggcatcgaagccaaggcaaggagattccattttgggtggcggtggagacatgggattttggtcagatgtctaaatattatgcgatgcttaatggtcatatgcaggggaaaattatacgtcgttttggcattgataataagcagacatttgcaaaatggttgaagtgccttaatctcataaggaatcgttgcgctcaccattccagaatatggaatagaaagcatccccgagttccagtaccggataatgaatactttgacggacttaatctccatccagagagttgcgagaggatttttagcgcgatctgtattatctggtacttagttaaacgacttggtccgggatcaacatggcttcggcaaattgcagaccttattgactctaaaccaaatgttcccggatgtggatatgattcaatgggtttacctgctaaaggattcccacgagagagattctctcaggacttaggttttgttatcgccgacaacgaccctgtagctgaagggcggaaagggagcgattga

SEQ ID NO: 19303 - DNA, 288 bp, Escherichia coli
atgataaaggacaggaaagctgaagagctggagtcaaaagggctataccggagagctgccgcacgatgggcagaagtcatgatgctggcagatggcgataaagaacgtgaacatgcagcaaacagacgctctgaatgtatccgtaaggcggcacgcccaccagcaactacagacagattcggagatttaagacaggcagttaagcggactcattcggctcttggtatggatgaggaagcgagagggtacttcaggcgttatcgcgataaagattgccagagacagtaa

SEQ ID NO: 19304 - DNA, 678 bp, Escherichia coli
atgagcaacactaccgacatcttaagcacgatagctgatatcactatggctggtactgctgtatgggctgcattcaaagctaatgattggttaaaaaataaaggattggataatgctgaatctttctttagagaggttcatgacctgcataaaagatactcaaaaatcctgcgttatgctgaagagtcgaatcgagtattccagaatcaggaaggtctgatgtcacccaatcctgaaatcataagtaatgagcaattctgggaagtgaaagcaaatctctacaagactaaagaagagtttgaccattttgtatcctcatatctgctaatggatgcaatggatattaagttaagtccagcctctgctgaactggttgagaagcagatgaatgcacacagtgagttttggaaaaacgcaagagattttaacaacgcaatatctgagattgttaggcgtggtgtgttgtctgaagacatgcagcgtgtaagggatgaagtgacagttagatataatatggtgtacataactctcgatacttctatggatatcaatgctgagttgaagaagattaaatttaaagacttctacacactttcaaagcctagaccttttatgaggatttatgactttatgagtagtttgatagtcaggttgaaggagcgattacgtcaattttaa

SEQ ID NO: 19305 - DNA, 189 bp, Escherichia coli
atgtttaacctccctcaagaattggggtcatctgatttatgggctggtgggggtgtgggtctgttcgcaggcttactacttcgctatgtcattgtcagggtgttcatcgtgtttcggttgttcggtcgagaatggtcgtttgacctgaaggacagaggccgtgaagacaaccacaaagacccatcctaa

SEQ ID NO: 19306 - DNA, 555 bp, Escherichia coli
atgaacgacagagaatttcaaagatttcttgaagagagcaaagtaagaaacagaagcaacggttacagctacacagacacccccaccagctacgaaccaccagccttttccaaatccgaacgtaaaaacattgaagcggtcattcgtagcattacgccacgagacagatttatgccagtacgcaaagaaaaagaaaatactttaaaaactttcttgatgagttttgacagctatgaacaattaccatcaaaaattgaagatataattatcggtacttgtcgcagtcttggaagagataattatcaccgaaaagttttctatttactacgaaatattgacaagattagctcaagcacaataacaagttatctgcagcgtcaagcgacccgattaagccatgagctaccaagcgataaatattgcgccaacttaactaccgtttgcatgaaagttattgaggcaattaatcatcatgtggaggtgggcaatattagccttacaaccagtgaaccagattttgaatttgacgtgtacgcacaagcagaaggattttaa

SEQ ID NO: 19307 - DNA, 279 bp, Escherichia coli
atgaacagacacacacttacaagaatttcagaagaagcctttaacgagcttaacagaattaaacaagcaaccaacttacctcatcaaactgttatgcaacttgcaattgctaaagaggtcactgaatcggatttgttaaagcatccagtttctagaggtcgtaaacatatccgaattactcaggatgctttagatactttgaagggactgaacaactttaaaattgatattgcccgactaatgagtattaagattcacaaactgtctctggaggtctga

SEQ ID NO: 19308 - DNA, 288 bp, Escherichia coli
atgaaaccttggcatgaagatgttaggcgatattttacagaacatcttatctatgatgaatccagtgattccctgtgctggtctgatggggagtcagtcacgataaataccgacgactacggcaacaaaacatttaatataggccgatacactttctacgtgaaatatgttgtctggttcctttatcatggctatcaatccaataagcaaattatccatcgaaatggtaacagagccgataccagaccaaaaaatcttatgcaggtccgagactttaagagaaattag

SEQ ID NO: 19309 - DNA, 330 bp, Escherichia coli
atgagagaattaaacttcccgctacagattttcgttgatagcgacaccgctctgatggtgcaaagcttcattgatgcaggtgtggcaattgattttgacaggctgttaaagctaatggctgagaactcagaagcaattgaagattttattcaggaaattgaaactggtgaaccacgttttatgtttcctgttaccgactcaaacatgaaaaggcttgttatcgaagaaacgaacaaatacagcgttagccctgaaagatatctcaaggcggctatagcaattttgtacgctgacaatattttggtgacggattcgaaggtggtgcattaa

SEQ ID NO: 19310 - DNA, 198 bp, Escherichia coli
atgaatgaacaaagactttttgagatgacctctcagactaacctgaaaggtcatgtagcgaaaagcattgtacctttccaactcagaatatccatccatcggattattgaaaatatgattataggaagagttgctctcccctattaccatcatctcatgcttaaggttatttgtcaacagcttttaacagattggtaa

SEQ ID NO: 19311 - DNA, 702 bp, Escherichia coli
atgattcgagatgaacatgaaatgcttatcgaacacagaccaagtgcacttgatattcacgaattaagtttgcgtgaatcttttgatagagcttggcgggaatcacacgaagtaaaaagaagtccttatattccaccagagccatttgagattccaagagttgaaattgatttttcaatgaatgaggaatgtgagcttgatttgaaactgaagctgcaacgtaaatatttcaaagaccttcgagactctcaaaaagctatgaatcgtgtttacgaaaaacttcagtccaaacttgaaaatgaaattgacgaaatggctattttgatggagcttcagacaaatacctacgattattatacaagactagaccgtgacggttggggatatgaccattcagaaattggtaaagtgattgcagatttaccagaaggccaaagacttattcgcacagaaagagctgtcagagcgccacataaactgactttaattatttctgataaatcacaagctgagcttgaagaaatggctagagagcgactgatgaagataagagaaaccgagattaatttggtgaaatcaactctggctaatttgattcgtgaccatcaaaaaatcgctaaggaatacaaacaagagcttgcacagattagtagcttcaatgactttttgagtgttccacgagaatttagtaaggttgtttaa

SEQ ID NO: 19312 - DNA, 309 bp, Escherichia coli
atgaatgatttaacagaacgcgataaaagaattaaatgggtgatggaaccttttgaagataggttcaatgaaattaaaacgactcttggtgatattcaggaggtcactgaatatcttattggtcgtatggaagaaaagcctcttgccgaactaaagtttgagggtcgagatgatttaaccttccttattagagacctcaagcgtgatgtaggacggcttgaatctatctttgataaagctggtctctcaatacgttatgagattcaaaagaatgaacgcggtgtaaagtgtatacacttcttggagtga

SEQ ID NO: 19313 - DNA, 213 bp, Escherichia coli
atgtatgaagaccgtttggaaactatcaaggcagtttgtgaaaaacttaaaaaccaaccaaacaagccaaagctacgaattaaaaaccaacgtaagactatcacctcacataaaccaaaggttagaaggattccttcatggtgtattgaccgtgttccggctgatgctcaattaattggtgagtctggttcttacacttatatccttcattaa

SEQ ID NO: 19314 - DNA, 2133 bp, Escherichia coli
atgagcaaatttacagttgatggttttattgttgaactaggcttcaatgaaaacgttattaaaggcttgcaaagagttgaaaaggcagctttgcagtcagcacaaagaattgaaaagaaccttaacaaaggtttcaggattaatacaaggcaacttgatagcaatctgacaagttctttagggcagcttgaaagaaagtttaataagacctttgacaagattgaacagagagcaaaaaatactaaagctttccgtttcacaagtcaggttaatgacgctattaatcctccaaaacaatcaagaccaagaagagttactggtgaccgagctattacagcagcttattcagcgaatatgaccaagctgaaaggctttgaccctattttgcagaaatacattaagagtcagttttatgggctagctagtaaagctggtcagatggataacaccaagtttaatgaagcccttgctaaactaaattcaagtgtacgagaagcaattgctaaagccagaggtcatacatccaccagcattaacggaaataaagcagctaatagtcttgatagtctgtcttcagcagcagttaaaacagcaggtgcatttatcagctttcaggctgtactatccgcttatcagcgagtactggaagttggtttacagcgtgcaagtgctgaacgttcaattgatttcgtatttgataaagatggaggtcaagtaaaagagttcaccaaatcattagctcaaacaacgggtttagatatcgctgaactgcaatcacagtttgctggtttcggtgcttcagctaaagagtctatgggcattcaaggttctgaagaactttttagaaatatggttggctattctcgtttaatgggtcgaagtgaggaagagattaagcgagcactgacagcattatcacagatggctggtaagggtcagattatggctgaagagcttaaggggcaactagctgaagctgttcctggtatggttcaggtattcgctaaagcaaccggaaagagtgaacaggaattatttgatgccatgaagaagggggctttaaaatctgccgatactcttcagaaggtcactcaggaactgaataaacaaatcaccgctaaaggtggctggaaagctatttcagaaagtacacaggcacaactagggaacttgaaaaactcttggaataccacgcttgatagtattttcagaggttctgaaaatggtcttcaagatttcacaagaagcctaacaacgcttttaaacgctcttggtggaagtggtaagagtcttggtgaatctcttggtaatctcatgacttctatgtcacatggtgtcgattcattgactgatattagttacagggtaagggcgttctttgacgaggtgacattagcttaccgttcactaaatgacactcagaggaaaattgttgatggtttatctgatgggttaattgatggtttgaagatgcttgccgtagcagttactgctcaaaaggctgcaaatgtagcaggaggcttgttaaaccttgcaaatgctgttacttcattcggtgatgctgttaataaagctaaagctggcaaggctggttcttcaggtggtgcattaagcaaagtcggtagagttgttctttatgctgagttggtgaactttgctcttgataatttaaaccctgaagcagctaagaatccgaacttacaccagtcaggtattggcacagaaacaaacttcaaccctgaatacaaaggtgattcatctaagccaaatcaaattaatgagggatgggctaagattggtggttctatcgctgactggtttaatggtgcagctaataaaattgctaacttccaagaaccgatgaataacttcgtaaataacacacaatcaactccaccagctattacgggtgatattgtgaatagcaatgctcaacttgcaatgactattagtgaactatcacgcaaggttgatgctttaacagtagaagctaagaagcccttgtcagttaatatcactggtgaagcaactgttaggccggatgaaccagctttctttactttcaatcaatcagctaatgaccagttcacgcaagatatgctcttaagttcaagctatccagaggaagaataa

SEQ ID NO: 19315 - DNA, 777 bp, Escherichia coli
atgttatgggattctaatatgcaaatcaaatatagtggcaaagatggcatctatttccacttaagagataatgtagatgccttcttaaccttatcagcaactgaaaacatggaatttgatagtcctatgcaggtgactacacagaacatgcaatcagggcaaaccgtcacagataacgtgcaaagagcacccagaacaatcactattagtggtgtcgttgtagttggctatgaaggaagcttattattaactcgtcagggacaattagtagaaaacttcatcgacactcttgaaaactggcgtgaccagaagcagattatttcggtcatctgtaaagatggaattaaaattgatgactccattattacaagctttaaagcctctaaagatgttggaatttcaaatggtctaagaatccagctaacttttcaggaaattaactttaaagctattgtagggcaaactgatatttcggctgcgactggaaggacttctaccacgaatgatggtggtgctaccagtaagaagaacactggcaacactacaacgagtcttggaagccctatgctgacctgtaaagagctttttagctattcggcaagtgagttatcagatgaagcgttaaaagcccgtgtaacgtgctctaagagcgttagcgttaaaaatggtgagagcaccttcacagcctcagctaatgagcaagcttcaaaggtgcttaagtcgggtaatgctttacggaagttttctgttaatccgaataagaagggcacttattga

SEQ ID NO: 19316 - DNA, 189 bp, Escherichia coli
atgacggcagggttcaactttaataactatgcagcaggtttttgttccgctaccccggcgttaaggggaaatgaggtcagcatggatactatcgatcttggcaacaacgaatctctggtgtacggcgtgtttccaaaccaggacggcaccttcaccgcaatgacgtataccaaaaagcaaaacgtttaa

SEQ ID NO: 19317 - DNA, 942 bp, Escherichia coli
atggatgcgggcaacaattcggaaaccaatgatatgaagttcaggatagtatacgacggtccggcactggaaacgcatgaaatgaacgtgcgagaccttgctcctgcccttctatcactatcagatgcattagaggaagccggtaaaactctctacggaaacaagactgttgtttctgtaaaagtcaatgcatcatttaaagctggctcatttggaatagatctggttgcctcatctacatcttggttcaaacaggctgttgattttttatccggcgattcagcaacagccgctgcgaatttgattgcttttattggactctgtcctggttctaaagaaaaaatatgcaaaggcctaattcaactgataaaatggataggtccaaggaaaataaaaaaattacacaatttgcctgatagcaacatcgaagtctttgttgatgacgaaagcgagatctacgacagtaacgttattgaactttataaaaatattaaacttcgctcttcattacaagaagttataagtaagccattagagcaggaaggcattgacagctttgcctctactgtcgatgatggtttgacattcatgacgatcaacaagcaagaagcacattatttcaaagtcaatctaccagcagaatcaataatttcagagtacacagtagagaaagcccttcaaattaaaaatatttccttcaatgaaggaagccggtggcggttttctgatggtgccagtagctttttggctgaaataaaagaccagaaattcatcagcgatattgataacaacaccttaaatttttctaaaggtgatatgttacttgtagatttaaaagtaactcaatatatgatcggagatgccataaaaaccatattcgaaattgagcatgtaaaaaaacagttgaatcctcaaaggcaaatagatcttccattcgaataa

SEQ ID NO: 19318 - DNA, 309 bp, Escherichia coli
gtgataaatcatattgattttagccgcgatcaatctaaagattttagctgcgatcaatctaaaattaaaatagctgagaccttatttttcaatctcgataaagaacactataaaaatagccgtaaattacaggaattgatttgggataagttggttgcatatgtcaatgattttaacttaagcaatcaagaaaaatcacgcttaatactaaggttatttgatgatgttaagttgctatttaatgaagtgcctgtcagcattttagtaaatgatattttttttgaaggattttttcatgaagcaacctga

SEQ ID NO: 19319 - DNA, 993 bp, Escherichia coli
atgaaaaaagaaactaatgcttttattatggtagataaacgagttgcacaattccctaaaacattaaagccaattgaccgcttggtatatttcactatgctggatggtgctgattattacgaatctaagttcgggagatatgcaccaagtattgactatttgatggttatgtctggtgctacacgtaatacagttattgattcacttaagagacttgagtcacacagacttatcgaaaagaccaatgtaaagggtcagcaaagtatttttaaagtattcacgttagatgagcgtccagaagtcttatcagaacctacccttgatgagcgtcgtagagtcaaattatcaggtcaaccagaatctgacactaacccaaccaaaaattggttacctacccaaccagaatttggttacctatctaaccagaatttggttacatgtaatactgaatataaagacaaaaatataaatactgaagaagaaagactaaaagaaaactttgaagaagaatctcctaagaatggagcttcgctctgtgattcacatgaatgtgatattaaagaagatgactttctttctttggatgaattaaatgattttctctctatgaatgaatctgaccttgatagtgaagctactaaagaggcttctaaaacatctgacttagaggaggataaaatctctgatgtgaatgttgatagtgaccataaaaacacacagtgccccgccactgatgatgagatggaccccttcgatgattaccttgatgaagagttagagcgtgaagaggctattaaaaaagcacaacgcaaagcagagattaaatcacgcattgaaatggcgaagctaaagaataaggttaatgacctcgatgactttgatgatggtgacgatgatgacttttctttcacaccaaagaagaaagtagttagtgaaaataagaagcaaaggattaagcctaaaatgtactatgcaggtggaggtatccaatga

SEQ ID NO: 19320 - DNA, 570 bp, Escherichia coli
atgcgtacattcctttatgctcgtgtatcagttgatgacctcaccacacagaaccaagtagaagctgttaaacgtgctggttatgaagtcagaccttcacgagtgattgaggaaaccattagtggtgctacaccagctatggacagaccacaatttgtaaagctggtggataagctggaagaaggtgattgtcttgtagtgaccaagattgaccgcttaggcagggataacattgacgtacagaagaccgtcacaatgttacttgatatgggtgtgaagctaatttgcttagatttgcctgtcaaagacctttcaagtgctgaaggtaaacttatccttcaactattcagtacctttgcagagtttgaacttaaccgcatcagagagcgaaccagagagggcttagaacgagctaaagcacaaggtaaggtgttgggtcgtcctgtagctgtgaacactacagaggccgttttagagcataaggctaagggattgtcacaaagtcaggttgcaaagcttctgaatctctctgtaagaacggttagccgtcactggacaaagacactgtaa

SEQ ID NO: 19321 - DNA, 147 bp, Escherichia coli
atgcagatttactggcgcaatatgaaaggaaaagtatttctcattcgttggattttataccaccacccatggggggcagaaaaagactgtgagaatacggaaataacagttatgcggaactttcagttcaaattaattagcgggtaa

SEQ ID NO: 19322 - DNA, 516 bp, Escherichia coli
atgataaatacaaatgttattctaaccagagaacaaaaatccgcgattgcagaagcattagacgtatcattagacgatttagaagaacttagaattaaagccagtaataaaaggaaaacttcttttaaggatgatttctccatgatctttaagacaaatatcggcactctggcaaaaatgaagctaacaccaacttcttttcgaataattatttatcttttttcaatcattgattatggtaatattcttgttaatttctctcaatcaagggtagcaaaagatttaggactacaaaaatctaatgtttcaagagcattcaaagagttattcgaaaagaaaatattgattcgaaatgcagaagacgatcatgtttatttgaactctaatttatgtgtaaaagggattcctcataaatttaatgaggagcaaatgggtaaattcaagagatccaaagcagaaactgaggactttgataactcatttagtttttatagtgttagaaaaaaacaatcgtga

SEQ ID NO: 19323 - DNA, 186 bp, Escherichia coli
atgagtaataaaaactacgaaagtcaccgcaaagcgattgttagtaaaggtataccacccgctctattaaataggctcaccaattcggatgttcaggtgatcaataccttcttaacacgagtgagcaaactggaactatctcaacaagagaaagactggatcataaaaatcatctctatggtttag

SEQ ID NO: 19324 - DNA, 237 bp, Escherichia coli
atgttgcaacgtacactgggcagtggttggggagtgttgctgccgggattgctgattgcaggactgacgtatgtggatttatcgccggaactgtggcggattgtcatgctgatgggattattggtgacaccgctgatgctgtatcacaaacagttacggcattatgttttgttgccatcgtgcctggcgctaattgcgagcgtcatactgatgataacgagctgggatcaaggatga

SEQ ID NO: 19325 - DNA, 648 bp, Escherichia coli
atgaaactttcactaaaagaatatattgaattgtattacaacactcagcgggatttcgctagcgcccttaaagtcaccccccaacaggtaactaaatggctgcgtgctggctggcaggttgttgacaacaacttgttatccgtcaatcgtgaattaccgcctgttcctgctaaatacgacaatacattcccttactatgctgaaatgagagagctaaattttaaaggtacgggaaaactgcacgctgtatgcacaattttacggcaaaaccgtttcgatcctaaaacaaaaaacagcgattatgatatttatgtcactgcaaaaatagagtatcagggcaaagaacggactgtaactggctcattccctctggatttcgtacccgagagttttacttgcgtgatttttggtgacaatagctgggaaagtgatgacggtgactatatggctgcattttcagttgatattctctcgccaaagcagctggggctggatataggtttggagtatttcaaatacctggaagatcaattttgtgcggcagcttttaattttctacgcaatgctgatatgactcaaaacgatgtgaaagatacagagtcagcttatcgtggatggctggagattgacgaagaagatcttgagtaa

SEQ ID NO: 19326 - DNA, 822 bp, Escherichia coli
atgcgattagcttcccgttttggtcgatataattctattcgccgtgagcgcccgttaacggatgacgaattaatgcagtttgttccatctgtcttttctggtgataaacatgaatcccggagtgagcgttatacatatatcccaaccatcaatatcatcaataagttacgtgatgaaggtttccagccgttctttgcctgtcagagtcgggttcgtgatttgggacgccgcgaatacagtaaacatatgttacgtcttcgcagggaagggaatattaacgggaaagaagttcctgaaattatcctgcttaattcacatgatggttcatccagttatcagatgatcccaggaatttttcgttttgtctgcacaaatggcctggtgtgcggaaataattttggcgaaatccgcgttccacataaaggtgatattgtcgggcaggttattgagggagcgtatgaagtgctcggtgtctttgataaagtcactgaaaatatggagacaatgaaagagatacatcttaacagtgacgaacaacatttatttggcagagctgcattgatggccaggtacgaagatgaaaataaaacgccagtgacgccagaacaaataattactccccgccgttgggaggataaacagaacgatctctggacaacctggcagcgggttcaggagaatatgataaaaggtggattatcggggcgaagtgcctccggtaaaaatacaagaacaagagccattacaggcattgacggtgatatccgaatcaacaaagcattatggatgattgccgaacagttcagggagtggaagtcatga

SEQ ID NO: 19327 - DNA, 705 bp, Escherichia coli; identical to SEQ ID NO: 8686

SEQ ID NO: 19328 - DNA, 435 bp, Escherichia coli
atgtcattacgcacgcccgatttattgttcacagcgatagcacctgccatttggggcagcacctacattgtcaccacccaatacctgccgaacttctcaccgatgacggtcgcgatgctgcgggcgttgccggcgggtttattgctcgtgatgatcgtccgacagattccaacgggaatctggtggatgcgcatcttcatcctcggcgcacttaatatttcgctattctggagcttgttgtttatttcggtctaccgcctgccgggcggggtcgcggcgacggtaggcgctgtgcagccgctgatggtcgtgttcatctctgccgctctgctaggtagcccgatacgattgatggcggtcctgggggctatttgcggaactgcgggcgtggcgctgttggtgttgacaccaaacgcagcgctagatggggtctga

SEQ ID NO: 19329 - DNA, 1206 bp, Escherichia coli
atgcccaagcttctcaataattgcctatctgctggattgaacgtggttattaatacaaatattgaatctagtcatggtcaaggaactgttgcagagattgttggtcggtgtgacagtttttcaaactgcattggatatagcgtagttgacgaaccagccagtagaggaatcagcgttgccgatcaggaccaaatgattgcaacactgagagaacttacgagtaaaaagcttttttcagtagattacatgtgggtcaatactccttgggaatataaattctcaaggaattatgacgtttttcttgtcaatagctacagcatgtactattcatcaggctctcttcaagagagggttgataaagatcttggtaaaatgaggactgatattggtggatgcatgatggtaactggttctgcgcgaatcattcctgtcgtgcaaactttttctcaattcgaaacaaatccagtggagggtataaatgggtcatattgttttgatgttgatcagattgtatctgccgcccgagttttcggaaaaacaggcaatggagatttcgcagcattctgctgggacaatggcttcaccactacgctcgcaaaagaagtaaagtaccaaacattagtaaaagaacttgtaaatcatgctgataaaggtgaaatctatagaaccgagcctattctatttggaggggttggaggatatccaggacgggttcaataccctttagggtgcttaaatgctatacaaacatataaagatccccttaatacaattgataattggattggtggaggcgcagctcctgtaagattaatgacagggtcgtcagaaaccccactgagaacaacactacctggggtcgacacatctggaataggttttaataagacatttagcagacttgttacaactaaaagtttattaaaatatttcactggattcgcagtatttgagaattatgggaatcccttactaaaaccagcatcatttgaagtgtactcaactacagatggtggttatacagaaacccttagatatactataggagtaactgccggatcttcatttaggttttcaggcctcatgaccaatagctatgatggtataggtgattgcgccgtattcgcactatcagtagatccaagtgatgcactggataattatagacggattatatatggattatttataagttcaaactggtag

SEQ ID NO: 19330 - DNA, 1266 bp, Escherichia coli
atgaataatttaattatgaataactggtgtaaattatctatatttattattgcatttattttgctatggcttagaaggccggatatactcacaaacgcacaattttgggcagaagattccgttttctggtataaggacgcctatgagaacggattcttaagttcactaacaacgcctaggaatgggtatttccagactgtttctacatttatagttggtctgactgctttattaaatccagattatgcaccttttgtttctaatttttttggcataatgattcgctcagtaattatatggtttttatttacagaaagattcaacttcctcacattgactactaggattttcttatctatttattttctatgcatgcctggattggatgaagttcatgcaaatataacaaatgcacattggtatttgtcattatatgtatcaatgatcctgatagctcgcaatccaagttcaaaatcatggaggtttcatgatatattctttatcttgctatccgggctcagtggcccatttataattttcattttagcagcttcatgctttaaatttataaataattgtaaagatcatattagtgtaagatctttcataaatttctacttgcgtcagccatacgcattaatgattgtttgcgctttaattcaaggaacttctataattctaactttcaatggcacacgttcctcagcaccgctaggattcagttttgatgtgatttcgtctattatatcatcgaatatttttttatttacatttgtcccatgggatattgcaaaggctgggtgggataatttactgttatcttattttttgtctgtttcgattttgtcgtgtgcggcctttgtttttgttaaaggtacgtggcgaatgaaagtatttgcaactttaccattgctaattataatattttcaatggcaaaaccacaattgacagactcggcacctcaattgccaacacttattaatgggcaaggttcaagatacttcgtaaatatacatattgcgatattctctttgctatgtgtttacttacttgagtgcgtcagggggaaagtggcaactttattttccaaaatatacttaacaattttgctattcgtgatgggatgtttgaattttgttatcaccccactcccaaacatgaactggagggaaggtgctactttgattaataatgcaaaaactggtgatgtcatttcgattcaagtgctaccacctggcctaacacttgaactaaggaaaaaataa

SEQ ID NO: 19331 - DNA, 126 bp, Escherichia coli
atgaccactgagggtgaaaagattgacagtatagcattaccttcgattgcagatcctaaggctgttgtgtggctaggggacaacacattcggtataggtagcgagggcgatggctctgtaatctga

SEQ ID NO: 19332 - DNA, 300 bp, Escherichia coli
atggtggacgcagtccagcgcgaacgtgactcgcagtttttctccgttatcacagcggaactcgaacccgtcagagcaccatcgctgattactttctttcacagccactctgccggtatgtgcccgtttcgatggcggtacagcggtttttcgctcaagcaacagcgcattctggcgcatgatccggtaaacacgtttggcattgatcgcaggcataccatcaagttcggcctgtctgcgaagcagcgcccatacctgacgataaccatacgtgggcagctctccgataacatggtatag

SEQ ID NO: 19333 - DNA, 441 bp, Escherichia coli
atgcttgatctgtggtcgcgagccgtcattggctggtcgatgtcgccgcgtatgacggcacaacttgcctgcgatgcactgcaaatggcgctctggcggcgtaaacatccggaagatgtcattgttcactccggacgtagtggccagtactgttcagcggattatcagaccttgctgaaacgtaataatctgcgggggagcatgagtgcaaagggctgctgctatgacaatgactgtgtggaaagattcttttactcgttgaaagtggactgtatccacggagaacgctttgccagccgagaaataatgcggacgacagtgttaattatatcgagtgtgattacaatcgctggcgtcgccacaatgcgtgcggcggtctcagcccggaacaatttgaaaaccagaatctcacttagcactgtgtccacattccgtgggtaa

SEQ ID NO: 19334 - DNA, 948 bp, Escherichia coli
atgtctgaggcaaacattattcacagcagatatggactgcgctgtgaaaaactcgacaagcccctgaatcttggctggggactggacaatagcgcggtgttgcactgtcccggggagctgccgacagggtggctgtgcgatgcgctggatcagatatttatcgccgcaccacaactgtcagcagtggctctcccctgggccgaatggcgtgaggagccacaggcgctgacgctttttgggcaggtaaaaagcgacattatccatcgtactgccttctggcagttaccgttatggttgagttcaccggcaaaccgggcctccggtgaaatggtttttgatgcagagcgtgagatttatttcccgcagcgcccaccccgtccacagggtgaggtttaccgccgttacgatccacgtattcgcaggatgctgagtttccgcattgccgatcccgtttctgatgcagaacgtttcacccgctggatgaatgatccgcgcgttgagtatttctgggagcaaagtggctcactggaggtacagaccgcctatctggagcgccagctcaccggtaaacatgcattcccgctgattgggtgcttcgacgatcggccattcagctatttcgaaatctactgggcggcggaagaccgcattggtcgtcactattcgtggcagccctttgaccgtggcctgcatctgctggttggtgaacagcaatggcgcggggcccactatgtgcaaagctggctgcgcgggctgacacattacctgctgctggatgagccccgtacgcagcgcacagtactggagccacgcaccgataaccagcgcctgttccgccatcttgagcctgcgggataccggacaattaaagagttcgacttcccacataagcgctcgcgcatggtgatggcggatcgtcatcacttcttcacggaggtcggtctgtaa

SEQ ID NO: 19335 - DNA, 264 bp, Escherichia coli
gtgcagagcatcccggtcgacagagccagcatcgtacgcctacaggacgaacagcacgttggctttaaatcaatggtcgacgatatcctgcaggttgccgcacaccatctggaaaaactcaaccaggccagcgcgtcacctgcccggcctccgagctggtggtgggcatgcactgcggtggcagcgacgcgttctccggcgttaccgctaaccccgctgtcggctacgcctctgacctgctggtgcgctgcggcgcaacggtga

SEQ ID NO: 19336 - DNA, 273 bp, Escherichia coli
atgagcacctttccctatcaaagaaataattttaatacagagctaagtcaattatgtatgaatggagaacacttttcacttttaattgaaatatcaccaatcagaagtaaaaaaaccatcatggctctaaaggagtatttggttgatgggtattcaaagcaagaaagttgtgaaaggaacaatgtttctattagttatttttgcctgtgcctaaaaaaattaaactatacacacagtattgttagtgcgcttaaatatttctaccgtgagtga

SEQ ID NO: 19337 - DNA, 261 bp, Escherichia coli
gtggggaatctctaccggcttatgcgcggctatgccaccggcggttatgtcggtacaccgggcagtctggctgacagccggtcgcaggcgtccgggacgtttgagcagaataaccatgtggtgattaacaacgacggcacgaacgggcagataggtccggctgctctgaaggcggtgtatgacatggcccgcaagggtgcccgtgatgaaattcagacacagatgcgtgatggtggcctgttctccggaggtggacgatga

SEQ ID NO: 19338 - DNA, 465 bp, Escherichia coli
ttggtcattctgaaggcgttggttattttaaagaaaaagtattttatagatgatctgaaattccaagtgacttttgaaaagaataggtacaaaaattttgataagtttgtgcaattaaataacttaagcaaaaacgttgattatctcggcgttctttcatactcgaacttgcaaaaaaaatatatggcggcatctttaatcgtttttcctagctatatcgaatcatatgggttaccactcatcgaagctgctagtttaggaaaaaaaatcattagtagtgatcttccttatgcccgggatgttttaaaggattatagcggcgtagattttgtaatttacaataatgaagatggctgggctaaggcgttgtttaatgttttaaatggcaattcgaagctcaattttaggccttatgaaaaagatagtcgttcatcttggccacagttcttctctattttgaaataa

SEQ ID NO: 19339 - DNA, 183 bp, Escherichia coli
atgaccgaacatcgtggcggtgcaggtaatttcgctgaagatcgacaaaaagcttctgacgctggtcgtaaaggcggccaacatagtggcggtaattttaaaaacgatccgcaaagagcatcagaagcagggaaaaaaggtggtcagaatagccatggtggcggccgtaaatctgactcttaa

SEQ ID NO: 19340 - DNA, 501 bp, Escherichia coli
atgcaaattaaatctgttgaagatatcttcatccacttattatcggatacatacagtgctgagaaacaactaacaaaggcactgtctaaacttagtcgctctgcatatagtgataaattaaccgctgcttttcagtcacatcttgatgaaacacatggtcaaattgaacgcatcgatcaggttgttgattctgaagatggtcttaaattgaaaagaattaagtgtgccgcaatggaaggacttatcgaagaggcgaatgaggtaattgaaagcactgataaaaatgaagtacgtgatgcagcattgattgctgcagcacaaaaagtagagcactatgaaattgccagttatggcactttggtaacactcgctgagcaattaggatataaaaaagcggctaaactcctgaaagaaacactggaagaggaaaaagctactgatgtcaaattaacagatctggcatttaataacgttaataaaaaagctcaggataactcctga

SEQ ID NO: 19341 - DNA, 507 bp, Escherichia coli
atgaatagaattgaacattaccatgactggcttcgtgatgcacatgcgatggagaaacaagctgaaaaaatgcttgagtctatggccagccggatagaaaactatccagagttacgttccagaattgagcagcacattagcgaaacaaagaaccagctttcacagcttgaaagcatacttgatcgtaataatatttcgcgctctgtcattaaagactctatgagtaaaatggccgcgtttgggcaatccattggtggaatttttccatctgatgaaattgtcaaaggttcgatcagtggctatgtgttcgaacaatttgaaattgcgtgttacacatctcttctcgcagcagccaaaaatgcgggtgatacagcttcagtacccattattgaagcaattcttaatgaagaaaaacaaatggctgaatggcttcttaaccatattcctgacaccactgagcaattcatggtcagatctgaaattgatggagttgaagccaaaaaataa

SEQ ID NO: 19342 - DNA, 891 bp, Escherichia coli
atgtttagacacgtgaaaaaacttcaatatacagtacgtgtaagtgagccaaacccaggcttggctaatctacttttagaacaattcggcgggccacagggtgagcttgcagcagcatgccgatacttcactcaaggcttaagtgatgaagatgcaggccgaagggatatgctgatggacatagcaacagaagaactaagtcatctcgaaattattggttctcttgttggtatgctcaacaaaggtgcaaaaggagcacttgctgaaggaactgagaatgaagctgagctttaccgctccttaactcaaaatggcaatgacagccatataacttctctcctctacggaggaggcccagcattaactaattcagctggagtaccctggactgcagcttatgttgatactattggcgaagtcacggccgatcttcgttcaaatattgcagctgaagctcgggcaaagatcatttacgaacgtctcattaatgttactgatgatcctggagtaaaagacactctggcatttttaatgaccagggaagcagcacacatgctttcatttgaaaaagcattacattcaattcgtaacacctttccaccaggaaaattaccaccaattgagaaatacaaaaacgtatattacaacatgtcagaaggtgaagacgtcagaggtagttggaacagtgatgaaaactttgactatgtttccgatccagttccagcggttgacggtggggatgggaaggcctcgataaatctatcgaccaagcaagaagctatgataaaagctatggcaacaaggttgaaatcccatgaagacatcaatcctgtcactggcgctgagcttgctgaaggagaaccacaaacaaagataaatagtaaaaactaa

SEQ ID NO: 19343 - DNA, 282 bp, Escherichia coli
gtgtatgttctgaacaactattgttttttaagcggtaaagaaatgagacggattgatgttattcacaaggagctggagcggctgacgtatgggctggaactgtctgatttagcgaaggagaaagcatttactgctgaggcgattggttttaaccttgggctggcacgcaactcggttagtaaagatcttaatcaattatggaatgaaggcctggtggtaaaaagtcagggacgtcctgttttttttctacatcgtcacgcactagatagactggccccctga

SEQ ID NO: 19344 - DNA, 282 bp, Escherichia coli
atgtccccggtgcaggatgtgtcgccagaaatactcatccacagacagggcacggtcatcggctttaatcagccacagtaccaggtcaagttcaggcagaatgtcacggtacagggcttcatactctgcatccctgtcccggctctcgcccaccccgggcaggtcagtgataaccatgctgtgaccatgtccactcagacggaagcgccgcacttcccgggtgccggcgtgaacatcactgaccggggtgacctccccctgaaacagtgcattacagagtga

SEQ ID NO: 19345 - DNA, 282 bp, Escherichia coli
atgaattacgatgaaataacgaaaattaccgctgaacgtattagcgactacatgaccgaagcagttaatacagactctatagccgttgcggaaatgtttcataacgctgcctggggagtgcgaacattgtggtttgaactcgtcacaaaaatagatatagatatacataaaaagaacaggtatgcgagttatgatcttagaaggaaaatcgaaatgcagcatgaagagtttcagaaaatgacagagcgcgagcaagtgcctttattgaaatcgccagaataa

SEQ ID NO: 19346 - DNA, 369 bp, Escherichia coli
gtgcgtgccggtttccgtctgggcagccacaacgatatgacctttggtgaaggcacctcatcccgtgcccccctgcgtgacagtgcaaaacacagtgtgcgtgaactgccggtgaactggtgggtacagccttccgttatccgcaccttcagctcccggggtgatatgcgtgtggggacctccaccgcaggcagcgggatgacgttctcaccctcacagaatggcacttcactggatctgcaggcaggactggaagcccgtgtccgggaaaatatcaccctgggcgttcaggccggttatgcccacagcgtcagcggcagcagcgctgaagggtataacggtcaggccacactgaatgtgaccttctga

SEQ ID NO: 19347 - DNA, 666 bp, Escherichia coli
atgtcatgccggaggcattgcgtcgttttgaggaaatggtggaagaagcggcacgcaacgctgaagccgcctctcagagcgcagcggcggcaaagaaatccgaaacagcagcggcatcatcgaagaacgcggcgaaaacctcagaaacgaacgcagctaacagcgcacaggcggcagcggcctcacagactgcatcggcaaactccgcgactgcagccaaaaaatcagaaaccaacgcgaaaaacagtgagacagccgcaaagacgagcgaaaccaacacaaagtccagccagacggcagcgaagaccagcgaaacgaatgctaaagccagtgaaactgcggcaaaaaacagccaggttgcagcagctgaaagcgagagcgcggcagccggttctgcgacttcagcagctggatcagcaactgctgcggctaacagccagaaagctgcgaagacgagtgaaactaacgcaaagtccagccagacagcagcgaagaccagcgaaacgaatgccaaagccagcgaaactgcggcgaaaagtagtcaggctgcagcagccgaaagcgagagtgctgcagctggttctgcaagtgcggcggctgcttctgccactgcatcagctaacagtcaaaaagcagcaaaaaccagtgaaaccaacgcaaaggtga

SEQ ID NO: 19348 - DNA, 177 bp, Escherichia coli; identical to SEQ ID NO: 10102

SEQ ID NO: 19349 - DNA, 1389 bp, Escherichia coli
atgatgattaatgaagcacaagcgcaggcaactgcggccagcggcagaggagacggacggtatccgtcagggctgcatgatggcgctgaaatcagcacggcggcgggtgggcaaacgaaagcggaagtgccgctgacgatggaagcggtgataacgagagaaaacctgatgctggcttatcagcgcgtggtggaaaacaaaggcgcggcgggggtggataacctcagcgtggcggagttgaaaccgtggctgaagaagaactggcgcagtgtcaggcaggcattgattgacggaaactaccagccgcgggcaatacgccggatggatatcccgaagccggatggcggcgtgagaaccttaggcatcccgacggtggtggacaggcttatccagcaggcgatagcgcagcagttaagcgccatcgtggacaaaagcttctcagactccagctacggcttccggccggggcgcaacgcatggcaggcggtgcaacaggcacagcgttacatacggggcggcaaacggtgggtggtggatatggatctggagaagttctttgaccgggtggatcacagactcctgatgacgcgtctggccagaacgataaaggacaggcgggtgctgagactgatacgccgctacctgaaagcggaaatagtccgggacgggcaaagggagaaacggcaggagggcatgccgcagggcggcccgctgtcgccgttactgtcgaacatcctgctggatgaactggataaagaactggagcgtcgtggacacagcttctgccgctacgcagacgactgcaacatctacctaagcagccggaaagcgggcgagcatctgctgaagaacatcagggcgttcgtggagaacaaactgaaactgaaggtgaatgagaagaagagcgcggtggcgcgcccgtgggagcggaagttcctcgggtacagtgtgacatggcacaaacaggcgaagctgaaaatagccctgacgagcgtgaacaggctgaaggagaaagtccgcagtctgaccacgggaaaccggagcaaatcagtgaaagcgacaatcaatgccctgatgccagtgctgcgtggatggataagctacttcaggctgacggaagtcagaggagtgctggaagagctggacggctggatcaaacggaaactgcggtgcctgttgtggcggcagtggaagaggccgggaacccggacgaagaacctgcaaagagcggggctgagtaaggacagtgcgatgatctcagcgtacaacaaccacgggccatggtggaactcagggtcaagccatatgaatcaggcgataaagaatgcgtggttcagcaggcagggtctgatatcactgctggaacagcagaggcagttccagtgttaa

SEQ ID NO: 19350 - DNA, 222 bp, Escherichia coli
atgaagaatgaaatactggaatttctgaacaggcatgatggagggaaaacggcagaaattgcggaggcgctggcggtaacggattaccaggcccgctattacctgttattactggaaaaagcaggtatggttcagcgctcaccattaagacggggcatggcaacatactggcttctgaaaggagagaagcaggcggggcagagctgttcttccacaacttaa

SEQ ID NO: 19351 - DNA, 327 bp, Escherichia coli
atgtccgctgtgacctccggcggatatcatgccacccggcatgttaccctgaaatttatccccgaagctgccaccaccgctcagactgattccactgtgactgactttataatccgcttcgttgtgaatatcgctgaagccgagcgtcccggtatcgaggctgtttttatctgccgtcgccgtggaagcgataaccgcaccatcgagctgggtgtggttgccgaccgtgatatcgaagccgccatctccggaaaacatcccggtttgttcagcaacggagtcaaagcggctcttcatcttatcccgggaggcagcgatgtaacctga

SEQ ID NO: 19352 - DNA, 477 bp, Escherichia coli
atgcaacagctttcctttctgccaggagagatgacgcccggcgagcgcagcctcattcagcgggccctgaaaactctggaccgccatcttcatgaacccggtgtggccttcacctccacccgtgcggcacgggaatggctgattctgaacatggcgggactggagcgtgaagagttccgggtactgtatctgaataaccagaatcagctgattgccggtgaaaccctcttcaccggcaccatcaaccgcacggaagtccatccccgggaagtgattaaacgcgccctgtatcacaatgccgcagccgtggtgctggcacacaatcacccgtccggtgaagtcacccccagtaaggcagaccgccttatcacggaacgtctggtacaggcactggccctggtggatatccgggtaccggaccatctgatagttggtggcagtcaggttttctcctttgcggaacacggtctgctttaa

SEQ ID NO: 19353 - DNA, 282 bp, Escherichia coli; identical to SEQ ID NO: 979

SEQ ID NO: 19354 - DNA, 348 bp, Escherichia coli; identical to SEQ ID NO: 10992

SEQ ID NO: 19355 - DNA, 768 bp, Escherichia coli
gtgtgccagcaccacggctgcggcattgtgatacagggcgcgtttaatcacttcccggggatggacttccgtgcggttgatggtgccggtgaagagggtttcaccggcaatcagctgattctggttattcagatacagcacccggaactcttcacgctccagtcccgccatgttcagaatcagccattcccgtgccgcacgggtggaggtgaaggccacaccgggttcatgaagatggcggtccagggttttcagggcccgcagaatgagactgcgctcgccgggcgtcatttctccgggcagaaaggaaatctgttgcattgttcctgccccctttcagtcaataatgcgcataatggcgctgcattccggatgctgcagggcgtaatcccgcagacggtaataatgaaccgtcatggcataacactccgtacggcaggcgtgatgactgtacgtcatcagacaggcggcaatgccggcggcttccgggctcatttcagcgcggttaccgttcatgacgttaaacagcacccatgtttcgtcatcatcttcatccggttcaggtgctataaatgcgccaccgttgttcagggtgtacagattccagatacccccgcagtagttttcgcacagacggtccatccagccgaagacacggggctccagggtcacccactgtggaatgaggccaaaatgctgcggccagaagctgatgcgctgttcatcagggacgagggtggcaaccaactgaggctggtcattccctga

SEQ ID NO: 19356 - DNA, 408 bp, Escherichia coli
atgctgcagggcgtaatcccgcagccggtaataatggaccgtcatggcataacactccgtacgacaggcatgatgactgtacgtcatcagacaggcagcaatgccggcagcttccggactcatttcagcgcggttaccgttcatggcattgaacagtacccatgtttcgtcatcatcgtcatccggttcgggtgccataaatgccccgccgttgttcagggtgtacagattccagataccaccgcagtagtcttcgcacagacggtccatccagccgaagacacggggctccagggtcacccactgtggaatgaggccaaagtgctgcggccagaagctgatgcgctgttcatcagggacgaggctggcaaccaactgaggcggattattctctggtgttgtagctga

SEQ ID NO: 19357 - DNA, 522 bp, Escherichia coli
atggcagtggtgtcttttggtgtaaatgctgctccaaatactccacaggggcagggtagagtaacctttaacggaactgttgttgatgctccatgcagcatttctcagaaatcagctgatcagtctattgattttggacagctttcaaaaagcttccttgaggcaggaggtgtatccaaaccaatggacttagatattgaattagttaattgtgacattactgcctttaaaggtggtaatggcgcccaaaaagggactgttaagctggcttttactggcccgatagttaatggacattctgatgagctagatacaaatggcggtacgggcacagctatcgtagttcagggggcaggtaaaaacgttctcttcgatggtacggagggtgacgctaatctcctgaaagatggtgaaaacgtgctgcattatactgctgttgttaagaagtcgtcagccgttggtgccgctgtttctgaaggtgctttttctgcagttgcaacctttaatttaagttaccagtaa

SEQ ID NO: 19358 - DNA, 201 bp, Escherichia coli; identical to SEQ ID NO: 5078

SEQ ID NO: 19359 - DNA, 273 bp, Escherichia coli
ttgctgaatatacgcgagagcgtactgttgcccgggtctatgtctgaaatgcatttttttttactgataggtatttcgtctattcacagtgacagggtcattctggctatgaaggactatctggtaggtgggcactcccgtaaggaggtctgcgagaaataccagatgaataatgggtatttcagtacaacactggggagacttatacggctgaatgctcttgcagcaaggcttgcaccttattatacagatgagtcctcggcatttgactaa

SEQ ID NO: 19360 - DNA, 489 bp, Escherichia coli
atgctgggggcagtgttaatgtctcagcatgtacatgcagctgataatctgacctttaaaggaaaactgattattcctgcctgtactgtaacaaaggcagaggttgactggggaaatgtagagattcagaccctgagtcaaaatggaaatcacgaaaaagagtttactgtgaatatgcggtgtccctataatctgggaacaatgaaggttacgataacggcaacaaacacttataacaatgctattttagttcagaatacatcaaacacatcttctgatgggttactcgtttatctttataacagtaatgcaggaaatattgggactgcgataactttagggactccatttacgcccggaaaaatcacaggtaataatgcagataaaactatatcacttcatgccaaacttggatataaagggaatatgcagaatttgatagccggtcctttctctgcaacagcaacgctggttgcatcatattcgtaa

SEQ ID NO: 19361 - DNA, 432 bp, Escherichia coli
gtgtttgatccgaaaggctgggcgctgttccgttccttcaaagccgtcaaggagaagctggatacccgtcgcggctctcattccgaactggagacagcggtgaaagacctgggtaaagcggtgtcctataaggggatgtatggcgatgttgccatcgtcgtgtattccggacagtacgtggaaaacggcgtcaaaaagaacttcctgccggacaacacgatggtgctgggtaacactcatgcacgcggtctgcgcacctatggctgtattcaggatgcggacgcacagcgcgaaggcattaacgcctctgcccgttacccgaaaaactgggtgaccaccggcgatccggcgcgagagttcaccatgattcagtcagcaccgctgatgctgctggctgaccctgatgagttcgtgtccgtacaactggcgtaa

SEQ ID NO: 19362 - DNA, 210 bp, Escherichia coli
atggctgtgggtgttggtcttgctttcctgcaggttaacattatcgcgaccgcattggccattggttgtgcaaccttgattatgtcgacattagggatgatggttggtcgctttatcggctcaattattgggaaaaaagcggaaattctcggtgggctggtactgatcggtattggcgtccagatcctctggacgcacttccacggttaa

SEQ ID NO: 19363 - DNA, 780 bp, Escherichia coli
ttgattacaattacattcgacaaactaatcacctacatatcttcagttggtactttcatttcagcaattgctgcattatatgcaatatggttaacgatatttcaaagaaggctctcttataaacccaatttagtgatagacactttaaatatcaagatgaatgttaacgatttcaacggttttcatgttgatatcttacaagcccctacgcttccacaaacaaaattttcaaacataggattgggggcggcaatttcacttagatatcattgggattttaattataaaaaaaacataaatctatatttagagttgttttcgaaaaaattcaaaaaagaagataaatcttttacaaccgactcccagtatggaatgttcaaaataataaaagaaagaaaagtatatatgtacaatactttatcgacaccttacgatattgatttttcgttaccatatagtatagataagaagtcaaaaaacatttttgtaccaaccgcggcaattgatattctattgaatatagcatatctttcacatagacttaaattagtcggttcttcatcattcactggtccaaaattaattattgaatatcaagatatagagggtaaaactaaaaaagtcacttggcaaacaaaattggaacgtggagtggcacgtttcagtggtgataatatggaggcagattttgcactacggtttacacctgtaccagagaaatggactacaaaaggtctagagaagatacgcaaaagcgccgcaaacgccatgttcagataa

SEQ ID NO: 19364 - DNA, 384 bp, Escherichia coli; identical to SEQ ID NO: 5266

SEQ ID NO: 19365 - DNA, 720 bp, Escherichia coli
atgagccatcaactcaccttcgccgatagtgaattcagcactaagcgccgtcagacccgaaaagagattttcctctcccgcatggagcagattctgccatggcagaatatgaccgctgtcatcgagccgttttatcccaaggcgggcaatggccgacggccctatccgctggagaccatgctgcgtattcactgcatgcagcattggtacaacctgagcgacggtgccatggaagatgccctgtacgaaatcgcctccatgcgcctgtttgcccgattatccctggatagcgccctgccggatcgcaccaccatcatgaatttccgccacctgctcgagcagcatcaactggcccgtcaattgttcaagaccatcaatcgctggctggccgaagcaggcgtcatgatgacccaaggcactttggtggatgccaccatcattgaggcacccagctctaccaagaacaaagagcagcaacgcgatccggagatgcatcagaccaagaaaggcaatcagtggcactttggcatgaaggcccacattggtgtcgatgccaatagtggcctgacccacagcctagtcaccaccgcggcaacgagcatgacctcaatcagttgggtaatctgcttcatggagaggagcaatttgtctcagccgatgccggctaccaaggagcgccatagcgcgaggagctggccgaggtggatgtggactggctga

SEQ ID NO: 19366 - DNA, 753 bp, Escherichia coli
atgaaaaaactaaaatttacgttcaaaaatgcggcgggtgaagaactggccggattgcttgaacttcctgaaaatcctaaagcgtttgcgctgttagctcattgttttacgtgtggcaaagacctcaaaggcgcggcgcgtattgcgcggaaactgacagagaaagctatcgccgttctccggtttgattttactggtctgggaaacagcgaaggggatttttccaacaccaacttctcatccaatatttcggacctgctttgcgcggtagattatctccgccgacagtacgaagcgccttctttgctcatcggtcatagcctggggggatcggccatcctgtctatcgccggcgaagttcctgaggcaaaggccattgtcaccataggatcacccggagaactgacacacgtaaaacgtctttttaaggatgatgttgaaaacattaaccagcatggagcctatcccgttgagctggccgggcgggtatttacgttaaagaaacagatgctggacaatattcaggaacacaaaatcgctcataaggtgttcgccatgaacaaacctctgctgatttttcatgcgactgaagatgataccgtgttaattgagcaggccgagaaaatattcaaagcagctaagcatcccaagagtttcatttccctgggtaaggctgatcaccttctgacacatgctcaggatgctgaatacgttgccgatatcattatatcgtggagcgaatgttacctataa

SEQ ID NO: 19367 - DNA, 873 bp, Escherichia coli
atggccaggtgcgcgctcattcttaaaatatcactggcaatgctggcatttgcggcaaactccattctgtgtcgtctggccctgcagggaggccacattgatcccctttcattcagcagcctcaggctggccagtggtgcattcgtcctgtcccccttcctcttttatcacgccaggaccacattatcgctgtggcgtccgctgagcgggttttacctcatggcgtatgcggtgctgttttctgtcgcctatatccatctcgataccggggctggtgcgctgttactttttggtgccgtacagtttgcgatggtgatccacggattatttaaaggagaatcactctccgctatgcgggcttgcggtttagttctggctctgacgggaattgctgccctgctgttacccgggacgaaggcaccgccgctttacagtgcacttatgatgatcgtttccggattagcctgggccgcctattccgtcagggggagggcgggccaggctgccggggcttcaacggcggctaattttattctcgcagcgccgatggctctcgctcttacgttgctgtttatgaagcagggtcactctgatgctgcaggcattgctttgtcattgctgtccggtgccgtcgcctcagccggtgcctatgtattgtggtatacccttttaccctccctcggctctattaccgccagtatccttcagctcagcgttccctgcctggcaatgctagggggtgtggtattcctgggtgaatcactgacggtcagaacgatattttctgccctggcagtgctgactggcattgtgatggtgacacgcgagaaatccccccgtcagccgatggcaaaggcgagaaaacctcaataa

SEQ ID NO: 19368 - DNA, 1224 bp, Escherichia coli
atgaaatatgattttgatgagtacgtaagcagagagaaaacagacagtcttaccgtggacggctggcgggaatacctgtttgcggggcagtccgaatttgcaatgcggtatccggcagaagggctaatcaacctctgggttgctgacatggcttttgccacaccagagccgattcttcaggccatcagagaccgtctggatagaaaaatactcggctacactaaaatctacgacgaagaatactatgaaatctttggcaactggtgtgagcgacaatatggtcaccgtttcaaaacggaagacattgtactgtctccgggcattattcccgcgctgaaccgtctcgtcccgcttctgaccgacaaggatgacagtattcttattatgacgccttcatatggcccgtttaaaaaggcgggtgaatacagtcagcgtcgcgtggtgtactcggcgttaaaaaaatcagcaggtggctgggaacctgactgggaagactttacacgcaaagccagtcaggccgacttacgtgtgaaaattcttttcctgtgtaatccgcataacccgaccggacgagtctggcggcctgatgaacttaagcggattattgaaatttgcctggccaatgatatctgggtgatatctgacgaaattcactgtgacctgtcccgaagtggtatcggtcatacaccggccgcctctcttttccctgattctacacgcattattacctgcatgtcctcgagtaaaacattcaatctggccgggaatttgttggcaaatatcattattccggatcccggtgtcagaagcgagtggcgtctcagacacgacgagttcatctctccgctgagcctggcagcaaacaaagcggcgtggagtgaatgcgatgactggcttgtccatctgagggaatatattgacggcaatttccagtacctgcacgactacctcaaaagctatttacccgaaaccaggttctcgatccccgaagggacatatctggcctggatagatattagccactacctgcccgacactgtgggtgaggatttatcgctgtattttgcccgggagtcaggggtgcttcttgaagggggcttgctgtttgtcgacaatggggaaggacatatccggttaaatctggcgtgcccacggactatgctgacagcagggatgaaaagaatttcacaggtactgcggacaccggcccctaacagggtataa

SEQ ID NO: 19369 - DNA, 774 bp, Escherichia coli
atgaatacatttttcaaaggtaaaaaactgcttgtcgtcggcggcaccagcggcatgggtctcgccgtggcacgcatggtactggaagcgggcggcagtgtggtgctgaccgggaataaaaaagacaaagccgaagcggtacaaaaagagctgggcccgctgggaccggtggcggtcatcgcggccaacctgatgactgaagaaggtatggaaactatccgtcatgaaatcaatgccagccatcgcgatatcagcctgatggtaaatgccgccgggatctttatgccgaaagggtttaccgagcacagctttgccgattatgacatgtacttttcgctgaaccgcgccacgttctttattacgcaggatgtcgtgaagaacatgctcgccgcgaagctcgaagggtctatcgtcaacgtcggttcgattggtgcccaggcagcactgggggactcgccgtcctcggcctattcaatggcaaaagcgggtctgcatgccctgacgcgtaatctggcgattgaactggccagcgcgggtattcgtgtcaacgctgtgtctcccgggattgttcatacaccaatatacgaaggcttcatggacaaagcggatatcgctgatgctatgaagtcgttgaacgatttccacccgttaggccgcgtcggaaccgcagaggatgtggcaaacaccattctcttcctgttgtctgacaaaacatcatgggtgacgggcgctatctgggatgtcgatgccggcattatggcggtcagacgataa

SEQ ID NO: 19370 - DNA, 702 bp, Escherichia coli
atgcaaacgctgaaacacacccttaccatcgatatctggtcagatttggtctgcccgtggtgctggattgctaaaaaaagatttgaacagggtctgaatcgctttgaatttcgcgaccaggtggtgatccgccatcacagctaccgtctggccggtggtactcccgcgatgccttttaaggatgccatcgttaaaaagctgggcagtcagcattcagcggagctgatgatggatcaggtgggcaccgccggtaaatctgaaggtctgatctacaacttcgacggcatgatgtttggtgatacagaagatgcacacaccctgctggttgccgcgcgtaaggccggaattgcggacgcagtggaagaacgtttttatcacggcagtatcaccgaaggtcgctctctctttgaccgtcagcagctcgttgcaatggccgtagaagccggtatggagaaagctgacgccgaagccgctctggaaaatgacgattttcgcgccaccgtttccgacgatgaagcccacgcacagtctattggcctcagcggcgttccggtttttgtgatgaacgagaaatacgccatcagcggggctcagggggcagacaactttttgaatgccctgcgtcaggtctgggatgaacagcaaaccgaattttcagccactgcgggtcagacctgcggaacggatggctgcagcatttaa

SEQ ID NO: 19371 - DNA, 1107 bp, Escherichia coli
atgagtaagcttttcaccccctacaatctgtctggcctggcgttaaaaaaccgtgtagtcatggcaccgatgacccgcacccgcaccatgaatgaggtgccggatgaggtcgtggctttgtactatgcacagcgtgcttctgctggcctgctcatcaccgaagggatgccggtttcagaagaaggccggggttacctttatacccctggtatctacaacgacgaacacgtccagggctggcgtaaggtgacacaagcggttcacgccaaaggtggccgtattttcgcgcagctctggcacgtcggccgtatgtctcacgtctctcttcagccaggccacatagcgccggtttcagcgggcaccgttcaggcggtcaataccaccgtttttgcgctgaccgaatccggagaaccgggcccggttgtaccaagccagccacgcgcgctggaaacgcatgaagttaaacgcatcactgcagacttcgtgcactccgcacgcctggcgatggaagccggctttgacggcgtggaaatcatggcggcaaacggattcatctttgaccagttcctcagtagcgaactgaacacccgcaccgacgaatacggcggctcggtggaaaatcgtcagcgtttcctgctggagaccattgacgccgtggcggaagccgtgggtaacagccacgttgccgtgcgcctgtcaccgttcggccgcatttatgacctcgcgccgtatgaaggtgaagagcaaacctggtcagccatcaccgacgcgctcggtcagcgggaactggcctacgtacacctttactatcagccggtgtacaccaaagcgccacttccggaaggcttccgccgccgttttcgcaacacgtttaaaggcaccatcatcgctgccggcggttttacccgtgatatcgcagagcaggctctggaagatgatgagctggatctggtggcatttggtgtgccctacatcgctaacccggatctggttgaaagaatgcaaaacggctggccactggcagaaagtgaccgcgccacctactacggcgtcagtggttccccggaaaaaggctataccgattacccggtctggcaggcgcaataa

SEQ ID NO: 19372 - DNA, 330 bp, Escherichia coli
atgcgtacattaacagcttataacgaagataatttccgccagatagagcagtacaaaggaatatcggtggtacgtttctctgcaccctggtgtccgccctgtcaggccagcgaagaaatgttcagtcagtttgcagaccggctcgatagagatattcaggtggggaaagtcaatgtagatcaggcgccggtgctgacaaccaaatacgagatctgggggctgccgtctgtgctgatatttcatgaagggcaattagttaaacgcataccgggtgtgaaacctgcatcggtatatgctcaggctattgcggacataaaaaaagggcagtaa

SEQ ID NO: 19373 - DNA, 339 bp, Escherichia coli
atgctggactggaacaactatcgctcagagttaatgcaacgtttaggcgagttgggcaaactgacccccgagaccatgaaaggcgtggttgccctgggcaacgcaggtaacaaaactgaccttttgggcgcaaaagtgcgagaactcattgccctggcgtgcgcagtcacaacccgctgcgacggctgtattgcttttcacgccgacgccgctgtgaaagccggtgcaaccgacgctgaaattgctgaagcgctgggcgtggcgattaacctcaacgctggcgcggcggtcatttattcagcccgcactctggatgccgtcggtcaggcacgcggttaa

SEQ ID NO: 19374 - DNA, 582 bp, Escherichia coli
atgacaaccatgacacgggaacggctgctcagcgaagcagaacacctgatgcgcgaaaaagggtattcagcattcagctatgctgatttatcaaaaatagtgggtatcaccaaggccagtattcatcaccatttcccgaccaaagatattctgggtgagcaggtggtaatacaggcgttctctgatacacaacgcgtatttgagcagatagaggcgactgagaaaagcgcggagagaagaattgcggcttacatcgatatcttcgcgcaaagccataaagcttcgctactgccactgtgttgtgcgttgtcagcagagaccgccaatctgcctcaggcaattactgtacagacatcactttatttcgatatgcaaatcgagtggctcacaaaagtcgtcagggcgggcatggagtcaggtgagttttcatcccatgccgaaccatcagatattgctttgatgatcattaatgtctgtgaaggctcaagcgtagtggcgcatgcaacggccagacccgaagtcttcgccaacagccttaagtatataaaactgcttcttaatacccctcattcaggagaatga

SEQ ID NO: 19375 - DNA, 558 bp, Escherichia coli
atgtctactaccgttaaaccttctgcagacgcagctgcgatccacaatacccgtgaagcagttcgcagccagcctggcctgggtaacctgactttccagatgaaagcccgttccagcggcggattaaccgttcgcacagagaccggcgccacaatccagaacggcgttatcgataccagtcgcgtggggaaattttctaatatcggtgatgaacccgcaggtttactcggcaccgataccggcatgagcccgactgaatacatcatgcaggcgctggctggctgttataccgccaccctcaccatgatggctgctgaaaaagggatcgacctggacggtatcgagctggatcttaatttcgatatcaacctcaacggcttccttgggctggacagcaacgtgcgtaaaggtgcgaaatctattcgcgtcgatgttcaccttacgagcaagaccgccagtcgcgaggagttagaagcgctggtcagcgaaatgcaaaagaattcgccaatccacgatactctggctaatccggttgaaatgattacacgcctggcgtga

SEQ ID NO: 19376 - DNA, 408 bp, Escherichia coli
atggaaaatggggatgtactgattgtcaccaaacttgaccgtctgggtcgtaatgcgatggatatccgaaaaacagtagagcaactggcggctttagatattcgcgttcattgtctcgcactcggaggcgttgatttgaccagtccggccggaaaaatgactatgcaggtaatttctgctgtagcggagtttgagcgggatttgctgcttgagcgaacgtattcaggtattgcgagggcaaaagcggctggaaaacgcttcggtcgcccccccatcctgagcgaggaacaaaagcaaacagtgacagagcgcctaaatgctggcatcagtatcagtgctattgcccgggaatttaataccacccgccagactatccttcgggtaaaggctggattgctgcaagagtga

SEQ ID NO: 19377 - DNA, 690 bp, Escherichia coli
atgattaatcctgcgaatggcaatacaaagccgatgtttgttgggcagggcgatcagatattcatgaacgaagtgttcctgaaatatctgacggctcccaccattaccagcggtggcaatcccccaacgttttcactgacacctgatggtcgactttctgcgagaaatgcggatatcagcggtaacgtgaatgcgaactccgggacgctcaataatgtcacgattaaccagaactgtcggattctgggaaaactgtcagctaaccagattgaaggtgatattgtcaaaacggtgggaaaagcctttccgagaaatggcagttatgccagcggtacaataacggtcactgtgtacgatgaccaggcttttgaccgtcagatagtcgtcccccccgttctgtttcgcggtggtaagcatgaaaacttcaacagcaacaaccaacagtcatactggtattcaacctgtaagctgcaggtgctgaagaacggacaggaaatctttcagcaacccgcgacggatgtcagcagggtattttcatcagtcattgatatgcctgccggacacggccatgtcaccctgactttcaatgtttcttcatatggtgcaaataactggacgccaacgaccagtatcagcgaccttcttgttgtcgtgatgaagaaatcaacagccggcatcagtatcagttga

SEQ ID NO: 19378 - DNA, 363 bp, Escherichia coli
atggttgaactggcatcacaacccggtgcttgtgtggcccagattgcacgagaaaatggcgtcaatgataatgttattttcaaatggctcagactctggcaaaacgaagggcgtatatcacggcgtattccggtgacaaccacttctgacgcaggcgttgaattattacctgtagagataacgcctgatgagccgaaagaacctgtggcggccattgcgccgtctttatccacttccactcagactactgtcagtgccagctcctgcaaggtggagttccgtcacggtaacatgacgctggaaaatccttcaccagagctgctcactgtattgattcgtgaactgaccgggaggggaagatga

SEQ ID NO: 19379 - DNA, 456 bp, Escherichia coli
atgctggaggcgacccaggtcagaggagatttcgttaaagctgtatcaaaagccttcccgaaaaaagtcggtacgtggggtaacacggaaacaccaaacggtacggttacagtcaccatcagcgatgatcataactttgaccgccagattattattccgcccattatttttaacggtatagcgtatgacgatccggggagcggaaataacccaggaggcacgcgatacacgggttatggttttgaagttcgcaaaaacggcgtattaatcgcatccagagaaactaaaggggccattcccggtagttacagtgcggttattgatatgccgagtggcaggggaagcgtcactctggagtttaagattttccagaaaggcaatcagggggcaggcaatatcaccgactgtacggtgattgtgaccaaaaaagccgcttccggcatcagtattcgttga

SEQ ID NO: 19380 - DNA, 639 bp, Escherichia coli
gtggtactctgggaaatcgacctgacggtacagggtggtgagcggtattttttctgtaatgagctgaatgaaaaaggggagccggtcacctggcaggggcgtaagtatgaggcatacccgattgacggcagcggctttgagatgaacgaccggggcagcagtgccagaccgtcgctgacggtgtccaatctgttcggtctggtcaccgggatggcggaagacctgcagagtctggtgggggccacggtggtccgccgccgggtgtatgcccgttttctggatgcggtgaatttcgttgcgggcaatccggaggcggacccggagcaggagctgagtgaccgctgggtggtggagcagatgtcgcagctgacagccatgacggcctcgtttgtgctggctacaccgaccgagacggatggggcgctgtttcccggtcgcatcatgctggcgaacacctgtatgtgggattaccggggagatgaatgcgggtataacggtcctgcggtggcggatgagttcgacaaccccaccacggatatccgtaaggacagatgcagcaagtgcatgcgcgggtgtgaactgcgcaggaatgtcggcaattttggcggtttcctttccattaataaactttcgcagtaa

SEQ ID NO: 19381 - DNA, 150 bp, Escherichia coli
atgacgaaatatgcccttatcgggttgctcgccgtgtgcgccacggtgttgtgtttttcactgatattcagggaacggttatgtgaactgaatattcacaggggaaatacagtggtgcaggtaactctggcctacgaagcacggaagtaa

SEQ ID NO: 19382 - DNA, 258 bp, Escherichia coli; identical to SEQ ID NO: 8119

SEQ ID NO: 19383 - DNA, 312 bp, Escherichia coli
atgggagttgagcagaatgatttcagggacatgttctccgtttatctctccggcccgccgcagacgcagcatgtgttttgtgtatccccggcggcccgggtcgcgcacacgggtctggcaggcgaagaatggctgaaagccttcccgctgcaggctttccagtacggtgatggtgggaatgtacgtatagttctggcttcgggacgtgtgtttatcttccccgaaaatccccggcacatagtgcatcagttcttcgtgtgtcagcggacggtcacggcgtatctggttcgcataaccaaaacgactggctag

SEQ ID NO: 19384 - DNA, 159 bp, Escherichia coli; identical to SEQ ID NO: 6188

SEQ ID NO: 19385 - DNA, 786 bp, Escherichia coli
gtggcttttgatggttcctccgatatcacattaaaagcaagtcatgttggtgcgtttgccttagggaaaacaggaagcaccgttgcgaatgataaagcagttggatggaactggagtagcggagcctataacgcaaatattggtggtgcatcaacgttaattattcatttttatatgggagacggaagttgtcctgcagctcagtttcggattaattataaaaatggcggtattttttatcgttcagcccgtgatggttatggttttgaagccgactggtccgaattttacaccaccaccagaaaaccttcagcaggagatgttggtgcactgccgttatctggtggtcaactgaatggtgcactgggtatcggaacatccagtgctcttggcggtaattcgattgtattgggtgataatgacacgggctttaaacaaaatggcgatggtaatctggatgtttatgctaattacgtccatgttatgcgctttgttcccggaagcattcaaagtaataagaccataaatattacggggcgtgttaatccctcggattacggtaactttgattcccgttatgtgaaagatgttcgacttggttcacagcaatattatggagtgaacaactggcgaacatggaatttccagtgcccttcaggtcatgtattgtctggtattaatgttcaggatacagggtctaactctgccgataatatagcgggtgtttattacagacccgttcaaaagtatataaatggcacctggtataatgtagcgagcgtttaa

SEQ ID NO: 19386 - DNA, 429 bp, Escherichia coli
gtggcagaacgtcctgaccagttgtgggtggctgattttacttacgtcagcacatggcagggggtcgtctatgtggcattcatcattgatgtgtttgccggatacatcgtggggtggcgggtctcatcgtctatggaaacgacattcgtgttggatgctctggagcaggcgttatgggcccgtcgaccgtccggcacagtccatcacagtgataaaggttctcagtatgtatcgctggcctacacacagcggcttaaggaagccggattactggcatcaacaggaagtactggtgactcgtatgacaacgcgatggcggagagcatcaatggcctttacaaagcggaggtaatacaccgtaagagctggaaaaaccgtaagcgtcgtctcagcaccgtctggcagatcctgaaattcctgagagaatag

SEQ ID NO: 19387 - DNA, 501 bp, Escherichia coli
gtgaatgcgaactccgggacgctcaacaacgtcacgattaacgagaactgtcgggttctgggaaaattgtccgcgaaccagattgaaggcgatctcgttaaaacagtgggcaaagctttcccccgggactcccgtgcaccggagcggtggccatcaggaaccattaccgtcagggtttatgacgatcagccgtttgaccggcagattgttattccggcggtggcattcagcggcgctaaacatgagaaagagcatactgatatttactcctcatgccgtctgatagtgcggaaaaacggtgctgaaatttataaccgtaccgcgctggataatacgctgatttacagtggtgttattgatatgcctgccggtcacggtcacatgacactggagttttcggtgtcagcatggctggtaaataactggtatcccacagcaagtatcagcgatttgctggttgtggtgatgaagaaagccactgcaggcatcacgattagctga

SEQ ID NO: 19388 - DNA, 222 bp, Escherichia coli
atgaaaatcatcacccgtggtgaagccatgcgtattcaccaacaacatccggcatcccgtctttttccgttctgtaccggcaaataccgctggcacggcagtgctgaagcgtataccggtcgtgaagtgcaggatattcccggtgtgctggctgtgtttgcagaacgccgtaaagacagttttggcccgtatgtccggctgatgagcgtcaccctgaactga

SEQ ID NO: 19389 - DNA, 222 bp, Escherichia coli; identical to SEQ ID NO: 8109

SEQ ID NO: 19390 - DNA, 540 bp, Escherichia coli
atgcatccgcctgcaggataccccggaagggacgaaggtgttgtaccggatgttttccctgcctgtctggtgagtaggcgaaccagaccgctggaggagatgacgaacccacattgcgatcatcccggacatacgtccagatacgccctgttttcgcctttttctgacccggtgccagtacctttaccggtgtgtcatcagtgtgaaccttgcgggtgttcattacataacggtacagggcatcattcaccggtgtcattaactggcagcacgcgtcaacccagttggagagtaaggcccggctcagttcgacaccctggcgggcaaagatttcactctgacgatacagtggcagatgttcgcagtattttcccgttaacacgcgggcaagtaatccggggcccgcgataccacgctctatcgggcgggacggcgccggtgcttcaactatacagtcacattttgtacaggctttttttacccgttctgtgcggatcactttcagggcactgctcaccagttccagctgttcagcgctga

SEQ ID NO: 19391 - DNA, 441 bp, Escherichia coli
atgacgaacccacattgcgatcatcccggacatacgtccagatacgccctgttttcgcctttttctgacccggtgccagtacctttaccggtgtgtcatcagtgtgaaccttgcgggtgttcattacataacggtacagggcatcattcaccggtgtcattaactggcagcacgcgtcaacccagttggagagtaaggcccggctcagttcgacaccctggcgggcaaagatttcactctgacgatacagtggcagatgttcgcagtattttcccgttaacacgcgggcaagtaatccggggcccgcgataccacgctctatcgggcgggacggcgccggtgcttcaacaatacagtcacattttgtacaggctttttttacccgaacagtgcggatcactttcagggcgctactcaccagttccagctgctcagcactga

SEQ ID NO: 19392 - DNA, 441 bp, Escherichia coli
atgacgaacccacattgcgatcatcccggacatacgtccagatacgccctgttttcgcctttttctgacccggtgccagtacctttaccggtgtgtcatcagtgtgaaccttgcgggtgttcattacataacggtacagggcatcattcaccggtgtcattaactggcagcacgcgtcaacccagttggagagtaaggcccggctcagttcgacaccctggcgggcaaagatttcactctgacgatacagtggcagatgttcgcagtattttcccgttaacacgcgggcaagtaatccggggcccgcgataccacgctctatcgggcgggacggcgccggtgcttcaacaatacagtcacattttgtacaggctttttttacccgttctgtgcggatcactttcagggcgctactcaccagttccagctgctcagcactga

SEQ ID NO: 19393 - DNA, 441 bp, Escherichia coli
atgacgaacccacattgcgatcatcccggacatacgtccagatacgccctgttttcgcctttttctgacccggtgccagtacctttaccggtgtgtcatcagtgtgaaccttgcgggtgttcattacataacggtacagggcatcattcaccggtgtcattaactggcagcacgcgtcaacccagttggagagtaaggcccggctcagttcgacaccctggcgggcaaagatttcactctgacgatacagtggcagatgttcgcagtattttcccgttaacacgcgggcaagtaatccggggcccgcgataccacgctctatcgggcgggacggcgccggtgcttcaacaatacagtcacattttgtacaggctttttttacccgttctgtgcggatcactttcagggcactgctcaccagttccagctgttcagcgctga

SEQ ID NO: 19394 - DNA, 441 bp, Escherichia coli; identical to SEQ ID NO: 19393

SEQ ID NO: 19395 - DNA, 213 bp, Escherichia coli; identical to SEQ ID NO: 5358

SEQ ID NO: 19396 - DNA, 222 bp, Escherichia coli; identical to SEQ ID NO: 12986

SEQ ID NO: 19397 - DNA, 279 bp, Escherichia coli; identical to SEQ ID NO: 8154

SEQ ID NO: 19398 - DNA, 354 bp, Escherichia coli; identical to SEQ ID NO: 5948

SEQ ID NO: 19399 - DNA, 297 bp, Escherichia coli
atgcgtaaatccttcaacggactgggagaacaggtacaacatgtgctgaatgataatcccttctccggtcacctgttcatcttccgtggccgacggagtgacatgattaaaatcctctgggctgatgctgatggtctgtgcctgttcaccaaacgcctggaggaaggcctgtttatctggcctgcggtgcgtgacggtaaggtatccattacccgctcgcagctggcaatgctcctcgataagctggactggcgtcagccaaaaacatcccgtcttaacgcactgacaatgttgtaa

SEQ ID NO: 19400 - DNA, 297 bp, Escherichia coli
atgcgtaaatccttcaacggactgggagaacaggtacaacatgtgctgaatgataatcccttctccggtcacctgtttatcttccgtggccgacggggtgacaccgtcaaaattctttgggctgatgctgatggtctgtgcctgttcaccaaacgcctggaggaaggccagtttatctggcctgcggtacgtgacggcaaggtatccattacccgctcgcaactggcaatgctcctcgataagctggactggcgtcagccaaaaacatcccgtcttaacgcactgacaatgttgtaa

SEQ ID NO: 19401 - DNA, 297 bp, Escherichia coli
atgcgtaaatccttcaacggactgggagaacaggtacaacatgtgctgaatgataatcccttctccggtcacctgtttatcttccgtggccgacggggtgacaccgtcaaaattctttgggctgatgctgatggtctgtgcctgttcaccaaacgcctggaggaaggccagtttatctggcctgcggtgcgtgacggtaaggtatccattacccgctcgcagctggcaatgctcctcgataagctggactggcgtcagccaaaaacatcccgtcttaacgcactgacaatgttgtaa

SEQ ID NO: 19402 - DNA, 468 bp, Escherichia coli
ttgttctataagttgctcagcaagctcattttcgctgttcttcatcgtgccgaaggctgcagccgtcagcagatggctggtcagttccatctggcagaccattttgacctgcgggtagagcgccgggttcccggcatgtgtctggcgggggaaggctgcatcgttctctggtgtatccggtgtgcgccagaacacaccatcgatggccagcagggtcaggccgcaccagtgcggatgcggcgtggcgttatgccagagctgcgctgttttcgtgaacacgcggcggacagcctcacttcccaggcgctggcgggcctgaataacggcactgggggcaacgaaggggcgattgcccggcagcatgatgtccaggcgattcacaatctggtgaagaggttctttacgctcaagcgccatgccaacaatacaccagaccatcatttcgaggggaagacggcgcttgcgtag

SEQ ID NO: 19403 - DNA, 468 bp, Escherichia coli
atgagccgtgttctgtgtgtggtgattattgtcctggcgggtggctgtggtgcgctgtggctggcaacagaccattaccgcgataacgccatcacctacaaagtgcagcgcgataaaaaagccagagagctggagctggcaaacgccaccattactgatatgcaggtgcgccagcgcgatgttgctgcgctcgatgcaaaatactcgagggaattagccgatgcgagagctgaaaatgaaactctgcgtgctgatgttgctgctggtcgtaagcgcctgcggatcaacgccacctgctccggtaccgtgcgtgaagccaccggcacctccggcatggataatgcaaccggcccccgactggcagacaccgctgaacgggattatttcatcctcagagaacggttgatgacaatgcagaagcagctggaaggggcacaggaatatatccgcactcagtgcctgaattaa

SEQ ID NO: 19404 - DNA, 1098 bp, Escherichia coli
atgagcattgagattgccaatattaagaagtcttttggtcgcacccaggtgctgaacgatatctcactggatattccttctggtcagatggtcgcgttgcttgggccgtccggttccggaaaaactacgctgctgcgcattatcgccgggctggagcatcaaaccagtgggcatattcgctttcacggtaccgacgtgagccgtctgcacgcgcgggaccgtaaagtcggtttcgtgttccagcattacgcgctgtttcgccatatgacggtgtttgacaatatcgcttttggcctgacggtgttgccacggcgtgaacgcccgaatgcggcggcgatcaaagcgaaagtgacaaaattgctggagatggtgcagcttgctcatctggcggatcgttatccggcgcagctttccggcggtcagaaacagcgtgtggcgcttgcacgcgcgctggctgtggaaccgcaaattttgctgcttgatgaaccgtttggcgcgctggatgcgcaggtgcgtaaagagctgcgtcgctggctgcgtcaactgcatgaagaactgaaattcaccagcgtgttcgtgacccacgaccaggaagaggcgaccgaagtagctgatcgtgtagtggtgatgagtcagggcaatattgaacaagctgacgcaccggatcaggtatggcgtgaaccggcgactcgttttgtgctggagtttatgggcgaggtaaaccgcctgcagggaaccattcgcggcgggcagttccacgttggcgcacatcgctggccgctgggatacacccccgcgtatcaggggccggtggatctcttcctgcgcccgtgggaagtggatatcagccgccgtaccagcctcgattcgccgctacccgtacaggtactggaagccagcccgaaaggtcactacacccaattagtggtgcagccgctggggtggtacaacgaaccgctgacggtcgtgatgcatggcgacgatgccccgcagcgtggcgatcgtttatacgttggtctgcaacatgcgcggctgtataacggcgatgagcgtattgaaacccgcgatgaggaacttgctctcgcacaaagcgcctga

SEQ ID NO: 19405 - DNA, 225 bp, Escherichia coli
atgacaacacaacatattatcgaaccagggcaagcagtgcatcaagcagcggctattctttcttctttggagtacatcaaccaagcggaagcgcggagccttgggccattggccgaagccgtcgctaatgcttttatggtggtgtactaccaagctgaaacgggccgggcgacacaggctgattttcaagaagcaatgaacgccttgcgccaagcgtgcagctaa

SEQ ID NO: 19406 - DNA, 534 bp, Escherichia coli; identical to SEQ ID NO: 13571

SEQ ID NO: 19407 - DNA, 708 bp, Escherichia coli
ttgaaaaaaaaaggagagtcgctgaaagggctaaatgatattcatgaagactttctagaagctttgacgctatgctttagccagcatcctaagcgtgaaagatggctgaaggccattgatactttggagtctgatgaaaattttgcaagcatggagctgaaaaatctagcggaatacaatgatgagatgctcgttagtaatgcacggaaatgtataaaaaggatgagttccggtcatgcggttgtgttattaacactcacacgtttagtcgcaacggtagaagaaaaaacgttagtgctaattgatgaaccagagagccatcttcatcctccgttgctgtctgcttttattcgtgcgctgtctgatttgctacttgacagaaatggtctttctattattgctactcactcacctgtggtacttcaagaggtccctaaacgatgtgtttggaaaattaatcgttctagattatctaccgaatctcgcaggccagacattgaaacatttggtgagaatgtaggaatcttaacaagagaggtgtttggtcttgaagttgtcaaatctggttttcacgatttattagtccaatcagttaagtcaggtggaacatatgaggagatagttgatgagtatcgtaaccagcttggtgttgaagctcgagctctattaaaagcgcttgtcacacacagagatcggagtgttaagtaa

SEQ ID NO: 19408 - DNA, 819 bp, Escherichia coli; identical to SEQ ID NO: 7644

SEQ ID NO: 19409 - DNA, 420 bp, Escherichia coli
atgctctttcccgcgctcatcgtcgaggcggattttgttgttcgccggggtacgcagtacgttgcgcttgtagttctgaatggtcacatggtcagtgtgtgccgagtcgtgttttacgcctgcaatataaggtcggtccgggttgccttcctcaaaggcgatactgacttccgttcctgccagcagcggcaggtgcaggccgtaggtgtctcccgcatacgggcgcgactggcgcacccacaggctctcatagcccggtttccacgtatcgcggtcaaagtcgaggttgacccggtagcgcccgtccttgtcgatatgggcgtagatgtcgttcttcaccgtactggtgacccgcgccgggagcgttccggccattacggggcgggggataagcgccggacggtagccgtagcgctctga

SEQ ID NO: 19410 - DNA, 348 bp, Escherichia coli
gtgctcgccgctggcgaccgccacgcctttcggtgcgtgcatcaaaatcaccggggcggtcaggtcatttatccggctggttatcaatgctatctgcgcggccatatccgccgggtcggcgttcgccgtcgtcgcgtcatcggacagtttctggattttatcgctcagaccgttcagttcgctgataatgtcggccatctctctgacctgaccctgcgccttgtcctgcgcatcggcgctgataaaaatgcctttcttcgcccgcaccgcgccccacagatcggtacgcagttcaaaaccttccccgcgctgctgtttcccggcatccaccagatggccgaggtttaa

SEQ ID NO: 19411 - DNA, 198 bp, Escherichia coli; identical to SEQ ID NO: 10863

SEQ ID NO: 19412 - DNA, 210 bp, Escherichia coli; identical to SEQ ID NO: 5116

SEQ ID NO: 19413 - DNA, 471 bp, Escherichia coli
atgaccgaggttgagctggctcttgccgccgtactcggtactgaccttgatatgctctttgccgcgctcatcgtcgaggcggattttgttgttcgccggggttcgcagcacgttgcgcttgtagttctggatggtcacatggtcggtgtgcgccgagtcgtgctttaccccggcgatatacggcctgtccgggttgccttcctcaaaggcgatgctgacttccgttcctgccagcagcggcaggtgcaggccgtaggtatccccggcatagggcctcgactggcgtacccacaggctctcatagcccggtttccacgtatcgcggtcaaagtcgaggttgacccggtagcgcccgtccttgtcgatatgggcgtagatgtcgttcttcaccgtgctggtgacccgcgccgggagcgtgccggccatcaccgggcgggggataagcgccgggcggtagccgtagcgctctga

SEQ ID NO: 19414 - DNA, 252 bp, Escherichia coli
gtgacggatacgggcgtaaaacgcgccgctttccgctacctctttatcgcctttttgcaggaagttgtcggcatagtgataggcttcgccgtaggtggttttatcgcccccggtggcgtcatgctggcctgtggtcatttccgccgtggcttcacggtagttgtagtcccgcgtggtgacgcttttttccaccacgctgtatgcggtgttcagcccccatacggcttccgtggcgctgtcgtgcagccctga

SEQ ID NO: 19415 - DNA, 1047 bp, Escherichia coli; identical to SEQ ID NO: 11409

SEQ ID NO: 19416 - DNA, 663 bp, Escherichia coli
atgagcacagcaatcaagaagcgtaaccttgaggtgaagactcagatgagtgagaccatctggcttgaacccgccagcgaacgcacggtatttctgcagatcaaaaacacgtctgataaagacatgagtgggctgcagggcaaaattgctgatgctgtgaaagcaaaaggatatcaggtggtgacttctccggataaagcctactactggattcaggcgaatgtgctgaaggctgataagatggatctgcgggagtctcagggatggctgaaccgtggttatgaaggcgcagctgttggtgcagcgttaggtgccggtattaccggctataactcaaattctgccggtgccacactcggtgtaggccttgctgctggtctggtgggtatggctgcagatgcgatggtggaagatgtgaactataccatgatcacggatgtacagattgcagagcgtactaaggcaacggtgacaacggataatgttgccgccctgcgtcagggcacatcaggtgcgaaaattcagaccagtactgaaacaggtaaccagcataaataccagacccgtgtggtttcaaatgcgaacaaggttaacctgaaatttgaagaggcgaagcctgttctcgaagaccaactggccaaatcaatcgcaaatattctctga

SEQ ID NO: 19417 - DNA, 738 bp, Escherichia coli
atgacatcagacaatatcgctgaatatgttggtgagaataatcaatttactgagaagcctgtaactgaataccccccggtgatacaggataatacagtgaccactaaagactatctgtacagcaataatattgatactgaccttttagtggttatcggagggcttattgttatattgtttctcatgatgcttatcatgtactttattaattctctcaggcataaggaattaactgaaatactggaaaaaatatcttttcctgaaaaatccgggagcaatttgcttaaaccggaggcggtcagctgtaatttgttgtccctgtgtgtgctggcaccggtactctgtacacccagaaagctggcagaagtctccagggagatcatcgtggcgagtgcgcaggaaattgcatggacgccggggagcagtcgtattgatggtcatcagggcgaaaatattacctggtctctgtcatcgcagtctcctgccgataagtatgatctcatcaataaaacctcccgtgtttctcctgacagtggccgtttttatgaaccggacacagttctggatcaccgtgaacgggtacgcctttttattcagatccagtttccgcacgggagtgactggtctgaagtattgcgactgactgacattgttacagagaaggtctcttccggcagggctgcaggcgggtatcaccaccggcatacagggtacacctggtctgtttctgtgaattaa

SEQ ID NO: 19418 - DNA, 219 bp, Escherichia coli
atgcatacctttatttttcttgtgctgataaaaaatattaacggtggcggaagctggaatgttacacccatgccaaatacggacgtatgcgtgcaggttcttcggacaatcgagtcacacggaggcaggggatttggaaatacaggggaatgtattgaagttaaaacaaataaacctttgaacaacgtgatggatacactgaatggtggtgggcaatga

SEQ ID NO: 19419 - DNA, 216 bp, Escherichia coli
atggtacatgctctgaaactggctgcaggatacgacgatatctcagtcgtggcaaaaggtatggagcagatgctgaataccccgggaaacgtggatctgcaccggctgatgcgcttcctgggtataaaggaaaaggcgttgccggtagtcaatgtgaaacagcataacctgagcagttatgagcaactactgcgtggcaagggaggttcgcagtga

SEQ ID NO: 19420 - DNA, 687 bp, Escherichia coli; identical to SEQ ID NO: 5771

SEQ ID NO: 19421 - DNA, 384 bp, Escherichia coli; identical to SEQ ID NO: 5770

SEQ ID NO: 19422 - DNA, 210 bp, Escherichia coli; identical to SEQ ID NO: 14407

SEQ ID NO: 19423 - DNA, 603 bp, Escherichia coli; identical to SEQ ID NO: 5048

SEQ ID NO: 19424 - DNA, 213 bp, Escherichia coli
atgtctagtcaacatcaggatagcctcttaccgcgctttgcgcaaggagaagaaggccatgaaactaccacgcagctctcttgtctggtgtgtgttgatcgtgtgtctcacactgttgatattcacttatctgacacgaaaatcgctgtgcgagattcgttacagagacggatacagggaggtggcggctttcatggcttacgaatccggtaa

SEQ ID NO: 19425 - DNA, 540 bp, Escherichia coli
atggcagttcgtggcattaacaaggtcattcttgtcggtcgtctgggaaaagatccggaagtccgttacatccccaacgggggcgcagtggcaaacctgcaggtggccacgtcagaaagctggcgtgacaaacagacgggggagatgcgggagcagacagaatggcatcgcgtggtgctgttcggcaagctcgcggaagtggctggcgaatatctgcgcaagggcgtgcaggtctacatcgaaggtcagcttcgcacccgtagctgggaagataacggtatcacccgttacgtcaccgaaattcttgttaagaccacgggcaccatgcagatgctgggacgtgccgcaggtgctcagactcagccggaagaggggcaacagttcagcggtcagcctcagccggaaccacaggcggaggccggtacgaaaaaaggtggcgcaaaaacgaaaggccgtggacgaaaggccgcgcagccggagcctcagccgcaaccgccggagggtgacgattacgggttttcagacgatatcccgttctga

SEQ ID NO: 19426 - DNA, 141 bp, Escherichia coli; identical to SEQ ID NO: 13741

SEQ ID NO: 19427 - DNA, 630 bp, Escherichia coli
atggtctgtggtggtgatgtcttctgccttgacggtgaatgcgataaggcacagagcggaaaaagcagtgattttggtgaagcagtatcacagctggctgcgcttgccgccgcaggtaaggatgttgccgccctgaatggtgtggatgtcagggctttcacgggtgaggcgaaattctgccgtaaggccgcagccggcttcagtaactgctgtaaggatggcggctggggtcaggatgtggggctggcgaagtgtaacagtgaagaaaaggcgctgggaaaggcaaaggacaataaactgacggtgagtgtgggtgagttctgttcgaagaaagtgctgggtgtctgtctgcagaaaaaacgcagctactgtcagtttgattcgaagctggcgcagatagttcagcagcaggggcgtaacgggcagttgcgtatcgggtttggcagtgcgaagcatcctgactgtcgggggattacggttgatgagctgcagaaaattcagttcgacagactggatttcactaacttctacgaagacctgatgaataaccagaaaatcccggacagtggcgttctgacgcagaaagtgaaagagcagattgctgaccagctgaaacaggcaggacagtaa

SEQ ID NO: 19428 - DNA, 198 bp, Escherichia coli
atgactgatatgtcacatggtgtcgatagtctggccgatattagttacaaggtgcgagcgttctttgatgaggtgacattagcttatcgtggtttaaccgatgaacaaaagaaagttgttgatgctttaggttctggcttgattaatagtttaaaagtcttggctggtgttattgctgtaaataaagttgttgtttga

SEQ ID NO: 19429 - DNA, 312 bp, Escherichia coli
atgagagttgagcagaataatttcagggacatgttctccgtttatctctccggcccgccgcagacgcagcatgtgttttgtgtatccccggcggcccgggtcgcgcacacgggtctggcaggcgaagaatggctgaaagccttcccgctgcaggctttccagtacggtgatggtggggatgtacgtatagttctggcttcgggacgtgtgtttatcttccccaaaaatccccggcacatagtgcatcagttcttcgtgtgtcagcggacggtcacggcgtatctggttcgcataaccaaaacgactggctag

SEQ ID NO: 19430 - DNA, 705 bp, Escherichia coli
atgaacccattcaaaggccggcattttcagcgtgacatcattctgtgggccgtacgctggtactgcaaatacggcatcagttaccgtgagctgcaggagatgctggctgaacgcggagtgaatgtcgatcactccacgatttaccgctgggttcagcgttatgcgcctgaaatggaaaaacggctgcgctggtactggcgtaacccttccgatctttgcccgtggcacatggatgaaacctacgtgaaggtcaatggccgctgggcgtatctgtaccgggccgtcgacagccggggccgcactgtcgatttttatatctcctcccgtcgtaacagcaaagctgcataccggtttctgggtaaaatcctcaacaacgtgaagaagtggcagatcccgcgattcatcaacacggataaagcgcccgcctatggtcgcgcgcttgctctgctcaaacgcgaaggccggtgcccgtctgacgttgaacaccgacagattaagtaccggaacaacgtgattgaatgcgatcatggcaaactgaaacggataatcggcgccacgctgggatttaaatccatgaagacggcttacgccaccatcaaaggtattgaggtgatgggtgcactacgcaaaggccaggcctcagcattttattatggtgatcccctgggcgaaatgcgcctggtaagcagagtttttgaaatgtaa

SEQ ID NO: 19431 - DNA, 276 bp, Escherichia coli; identical to SEQ ID NO: 6180

SEQ ID NO: 19432 - DNA, 177 bp, Escherichia coli
atgacggcggcaggtacggtaacctttttgaataaactcaccaactttacgatttttgaagtccagcagacgccagccttcatcaatgacgttcagtttcttgagggtacgcggcgtgcggtacatccggttctcgatgtaaatgataaggctgaacatcaccgcaaccagcagtga

SEQ ID NO: 19433 - DNA, 384 bp, Escherichia coli
atgaaaggactgttcagaattgtggatatgaagcggtggtatctgtgtccgcaggtacgggtcgcggatatcgtccagctgaacgggaatatccggccacgatcacgccagtggtggcagttattcaggatggtgtctcagtggcatgttgatgtggttatcgttgagcggcgttcgttcagtattgttgcagcagtagagctggatgatgccagccatttacgaccggaacgcagacgccgggatattcttctggaagaggttctgaggcaggctggtattccgttgctcagaagccacgatgccagaaaactgctgcagatgaccggagaatggctgaatacaacaggggctgttcagcagtcaccggaacatcgtagctga

SEQ ID NO: 19434 - DNA, 135 bp, Escherichia coli
atgaagaaaggcgatgcggctgaacatgcagagttccacatgaaagacaaccgctgggtgcctggctggatgtgtgcaccacgcccacagacggatgccactgaacgtaccgataacctggctgatgccgcctga

SEQ ID NO: 19435 - DNA, 276 bp, Escherichia coli; identical to SEQ ID NO: 11424

SEQ ID NO: 19436 - DNA, 366 bp, Escherichia coli
atggtggatggcaaacctgtcgttccgggcatgaagttgtcgaaggaaaaatgcgaccgggttaacgccattgagcgtgataaggcgctggcatgggtggagaaaaacatcagagtgccactgaccgaaccccagaaagcggggatcgcgtcattctgtccgtacaacattggtcccggtaagtgtttcccgtcgacgttttacagacgaattaatgcaggtgatcgaaaaggtgcctgcgaagcgattcgctggtggattaaggacggtggcagagactgccgtattcgttcaaacaactgctacggtcaggtatcccgtcgtgaccaggagagcgcgctggcgtgctggggtatcgacagataa

SEQ ID NO: 19437 - DNA, 297 bp, Escherichia coli
gtgctgggtgtctgtctgcagaaaaaacgcagctactgtcagtttgattcgaagctggcgcagatagttcagcagcaggggcgtaacgggcagttgcgtatcgggtttggcagtgcgaagcatcctgactgtcgggggattacggttgatgagctgcagaaaattcagttcgacagactggatttcactaacttctacgaagacctgatgaataaccagaaaatcccggacagtggcgttctgacgcagaaagtgaaagagcagattgctgaccagctgaaacaggcaggacagtaa

SEQ ID NO: 19438 - DNA, 258 bp, Escherichia coli; identical to SEQ ID NO: 11054

SEQ ID NO: 19439 - DNA, 177 bp, Escherichia coli; identical to SEQ ID NO: 5364

SEQ ID NO: 19440 - DNA, 147 bp, Escherichia coli; identical to SEQ ID NO: 11446

SEQ ID NO: 19441 - DNA, 738 bp, Escherichia coli
atgtggaaaacactgcatcaactggcgatcccaccacggctgtatcaaatctgtggctggtttataccgtggctggcaattgccagtgtggtcgtgcttaccgtcggctggatctgggggttcggctttgctccggctgattatcagcagggaaatagctaccgcattatctacctgcatgtgcctgcggcgatctggtcgatgggcatttatgcatcaatggcggtggcagcgtttattggcctggtctggcagatgaaaatggccaacctggcggtggcggcgatggcccccattggtgccgtgtttacctttattgccctggttaccggctctgcatggggaaaaccgatgtggggcacctggtgggtatgggatgcacgtctgacttctgaactggtgctgctgtttctgtatgttggtgtcattgccctgtggcacgccttcgacgaccgtcgtctggctggccgtgcggcaggtatcctggtgctgattggcgtggtgaatctgccgattattcattactccgttgagtggtggaacaccctgcatcagggatcaacgcggatgcagcaaagtatcgatccggcgatgcgttcgccgctgcgctggtcgatttttggcttcctgctcctgtctgccacgctgacgctgatgcggatgcgtaatttgattttgctgatggaaaaacgccgtccgtgggtgagtgaactgatactgaaaagaggccgtaaatga

SEQ ID NO: 19442 - DNA, 738 bp, Escherichia coli
atggcaaatcgtaaacgtgacgccgggcgcgaggcgctggagaaaaaaggctggtggcgcagtcaccgttggttagtgttacgtcgcctttgtcagttcttcgtgctggggatgtttttgagcggtccgtggtttggtgtgtggatcttgcacggcaactacagcagtagcctgttattcgacaccgttccactgaccgatccgctgatgacactgcaaagtcttgccagcggtcatctgcctgccacggtggcgttgaccggtgcgacgatccctcgccatattcgctacgtgctgttggtggtcattctggtgggatcggccttaactggcacgctcatctgggaatggatcaaccccgtttctctgatggggcgtagcctggtaatgggcttcggcagcggcgcgctgcttattctcgcgctgtttttatttgatctactggtcgttgaacacggctggtgcgggcacatttgtccggttggtgcactgtatggcgtgctgggtagcaaaggtgtgattaccgttgcggccaccgatcggcagaaatgtaaccgctgtatggattgttttcatgtttgcccggaaccgcatgtgctacgtgccccggtgctggatgaacaaagcccggtgcaggtcaccagccgcgattgcatgacgtgcggtcgctgcgtggatgtctgttctgaggatgtatttacaataactacacgatggagttcgggagcgaaatcatga

SEQ ID NO: 19443 - DNA, 153 bp, Escherichia coli
atgtcgttctggaaagttgcagcagcgcaatatgagccccgtaaaacctcactcaccgaacaggtagctcatcatctggagtttgtgaggggccgccgccaggcaacaatgtcagctgttagtttttccatcgctttctttactggggtgtga

SEQ ID NO: 19444 - DNA, 783 bp, Escherichia coli; identical to SEQ ID NO: 4541

SEQ ID NO: 19445 - DNA, 459 bp, Escherichia coli
ttgtcattattcctgctgaatctgggaaaaacaggctatgaattaccggcagagctggatgccgacaaagcattattagcccgcattgaatctatccgtctacaagcgggtaaagcaatgggcttaggcgatgtcagtaatatggttatccctaaacctgtacttatttctccagcgcagaaaggcggggcaattaatgtgcgttattttatgccgcattcttgccatcgcgctttggcgataaccggtgctattgctatttccagtagttgtgcattggaaggtaccgtcacccgacaaatcgtcccttctgtaggatacggcaatatcaatattgaacaccccagtggtgcgctcgacgttcatttaagtaatgaaggtcaggatgccacgacgttacgcgcatctgttattcggacgaccagaaaaatattttccggtgaagtttatcttccctga

SEQ ID NO: 19446 - DNA, 774 bp, Escherichia coli
atggggcaatcatcgcaaccacatgagttaggcggcgggctgaagtcacgccacgtcaccatgttgtctattgccggtgttatcggcgcaagtctgtttgtcggttccagcgtcgccatcgccgaagcgggcccggcggtattactggcctatctgttcgccggattactggtggttatgattatgcggatgttggcggaaatggcagttgccacgcccgataccggttcgttttccacctatgccgataaagccattggccgctgggcgggctataccatcggctggttgtactggtggttttgggtactggttatcccacttgaagccaacatcgccgccatgatcctgcactcgtgggttccaggcattcccatctggttattttccctcgtcattaccctcgccttaaccggcagtaatttattaagcgttaaaaactacggcgaatttgagttctggctggcgctgtgtaaagtcatcgctatcctggcctttattttccttggtgcagtcgcaattagcggtttttacccgtatgccgacgtgagcggtatttcaagattgtgggatagcggcggctttatgcccaacggcttcggtgcggtattaagcgcgatgttgatcaccatgttctcgtttatgggcgcagaaattgtcaccattgccgccgcggaatccgacacgccggaaaaacatattgtccgcgccaccaactcggttatctggcgtatctctattttttgtgttctatttttgtcgttgtggcattaa

SEQ ID NO: 19447 - DNA, 510 bp, Escherichia coli
  misc_feature (466)..(475): n is a, c, g, or t
atgccaaaaattattgttgaacaaataaataataaattattttcttcatacaaggtactattcattccaactttcccaaatgttttttcacttaaaaaggttatatggttttataacgtatataattatttagttttaaattcaaaagctaaagatgcttattttatgagctatgcgcaacattatgcaatcttcgtatatttgttcaaaaaaaataatataagatgttcattaattgaagaggggacagggacttataaaaccgaaaaagaaaacccagtagtaaatattaatttttattcagagattattaattcaattatcttgttccattatccagatttgaaatttgaaaatgtatacggtacatatccaattttgcttaagaaaaaatttaatgcgcaaaaatttgttgagtttaaaggtgctccatcagttaaatcatcaaccagaatagataatgttnnnnnnnnnngatataatatatgcaaatcaaaagtatttgattga

SEQ ID NO: 19448 - DNA, 405 bp, Escherichia coli
atgaaaaagacccgtacagccaatttgcaccatctttatcatgaacccttacccgaaaacctgaagctcacgccgaaggtcgaagtggataatgttcatcaacgacagacaacggacgtctatgaacatgctttgacaattaccgcctggcagcagatttacgatcaactgcatccgggcaagtttcatggtgaatttacggaaattctactcgatgatattcaggtttttcgtgaatacactggtctggcgctgcgtcagtcgtgcctggtctggccgaactcgttctggtttggcattccggcgacgcgcggtgagcagggatttatcggttcgcaatgtctgggaagcgcagaaattgcgacgcgcagaaattgcgacgcgccctggtggaaccgagtttga

SEQ ID NO: 19449 - DNA, 888 bp, Escherichia coli
atggatcaaaaacagattgaagaaattgtacgcagcgtgatggcgtcaatgggacaagcggcccccgcgccgtcagaagcaaagtgcgccaccaccaactgtgcggcaccggtgacctcggaaagctgcgcgctggatttaggttctgcggaagcaaaagcgtggattggtgttgaaaacccgcatcgcgcagacgtattaacagaactgcgtcgcagcaccgtggcccgcgtttgtaccggtcgtgccggtccgcgtccgcgcacccaggcgttgctgcgtttcctggccgatcactctcgttcgaaagataccgttctgaaagaagtaccggaagagtgggtgaaagcgcagggcttgctggaagtccgctccgaaatcagcgacaaaaatctctacctgactcgtccggatatgggccgccgcctgtgtgcagaagctgttgaagcgctgaaagcacagtgtgttgctaatccggacgtgcaggtcgttatttctgatggcctgtcaactgatgcgatcaccgtgaactacgaagagatcctgccgccgctgatggcgggcctgaagcaagccgggctgaaagtcggtacgccattctttgtacgttatggtcgcgtgaagattgaagatcagatcggtgagatcctaggcgcgaaagtagtgatcctgctggtgggcgaacgtccggggttggggcagtcagaaagcctctcctgctacgccgtttactcgccgcgtatggcgaccaccgttgaggccgatcgcacctgtatatctaatattcaccagggcggcacgccgccggttgaagccgcagccgtcattgtggatttggcgaaacgtatgctggagcagaaagcatccggcatcaacatgacccgataa

SEQ ID NO: 19450 - DNA, 516 bp, Escherichia coli
atgaaatttaaaaaatgtcttctgcctgtggcaatgttagcgtcattcactctggcaggatgccagtcaaatgctgatgatcatgccgccgatgtttatcaaaccgatcaactgaataccaaacaagaaactaaaaccgttaatattatttccattcttcccgcaaaagttgccgtagacaacgcccaaaataaacggaacgcacaagccttcggcgcgcttattggcgctgtcgctggcggtgttatcggccacaacgtcgggtctggcagcaattccggaacgacggcaggtgcagttggcggcggagctgtaggcgcggcagcgggttctatggtgaatgataaaaccttagtggaaggtgtttctttaacatataaggaaggcaccaaagtgtatacctccacccaggtgggtaaagagtgccagtttacgacaggtttagccgttgttattaccacgacgtataacgaaacgcgtattcagccaaataccaaatgtcctgaaaagagctaa

SEQ ID NO: 19451 - DNA, 516 bp, Escherichia coli
gtggtcggtacgcgcctgctgaccaaaaagggcggcgatatcaaagattttgccgacctgaaaggcaaagccgtagtcgtcacttccggcactacctctgaagttttgctcaacaaactgaatgaagagcaaaaaatgaatatgcgcatcatcagcgccaaagatcacggtgactctttccgcaccctggaaagcggtcgtgccgttgcctttatgatggatgatgccctgctggccggtgaacgtgcgaaagcgaagaaaccagacaactgggaaatcgtcggcaagccgcagtctcaggaagcctacggttgcatgttgcgtaaagacgatccgcagttcaaaaagctgatggatgacactatcgctcaggtgcagacctccggtgaagcggaaaaatggtttgataaatggttcaaaaacccaattccgccgaaaaacctgaacatgaatttcgaactgtcagacgaaatgaaagcactgttcaaagaaccgaatgacaaggcactgaactaa

SEQ ID NO: 19452 - DNA, 288 bp, Escherichia coli
atgcaattacgtaaacctgccacagcaatcctggccctggcgctttccgcaggactggcacaggcagatgacgccgccccggcagcaggcagcacgctggacaaaatcgccaaaaacggcgtgattgtcgtcggtcaccgtgaatcttcagtacctttctcttattacgacaatcagcaaaaagtggtgggctactcgcaggattactccaacgccattgttgaagcagtgaaaaagaaactcaacaaaccagacttacaggtgaaattgattccgatcacctcataa

SEQ ID NO: 19453 - DNA, 669 bp, Escherichia coli
atgatcaaaaatatcaaaacaattgccgaagcgaaagccaaatgtctaaatcagaaagatggtaaacaaaaatatgtagtcgttgagcagtggttgaagatgtttaaaaagtggttctcaccgtcaggtaatgaatacaccgctacactgccagccgttgaaatctatagctatatagctggattcaatgaacaagggcaagaatgttacgccactcaaaaaacattatctaatattggaatggttagtgatcgccaggttcgcaatattataaatatgtttgttgatatgggagttctttctgtagaggctcgggacgggcaaacatcactctataaagcattaccattcacagatgcacatattactccccctggagagtcatcactacctgatccttctgagaaagaagacgaatctaatgaaatattgaatgtttcagaaatcatcattgaagaagaaacacaggaatcagagttccctgagcggcccgaaatttttacttggcttctttcccttgataagaagaaaccaccgcacgaagaaacagaagattttgtaaaacgagcattagattcaaagaatatctatcttgagaaacaggcttttcacgatctgataatatctctaagagaaaaaagtgaaatatacgattcaataccattctaa

SEQ ID NO: 19454 - DNA, 1026 bp, Escherichia coli; identical to SEQ ID NO: 5729

SEQ ID NO: 19455 - DNA, 861 bp, Escherichia coli
gtggacgaatatcccatcatcgacctgtcccacctgctgccggcggcccagggcttggcccgtcttccggcggacgagcgcatccagcgccttcgcgccgaccgctggatcggctatccgcgcgcagtcgaggcgctgaaccggctggaagccctttatgcgtggccaaacaagcaacgcatgcccaacctgctgctggttggcccgaccaacaatggcaagtcgatgatcgtcgagaagttccgccgcacccacccggccagctccgacgccgaccaggagcacatcccggtgttggtcgtgcagatgccgtccgagccgtccgtgatccgcttctacgtcgcgctgctcgccgcgatgggcgcgccgctgcgcccacgcccacggttgccggaaatggagcaactggctctggcactgctgcgcaaggtcggcgtgcgcatgctggtgatcgacgagctgcacaacgtgctggccggcaacagcgtcaaccgccgggaattcctcaacctgctgcgcttcctcggcaacgaactgcgcatcccgttggttggggtaggcacgcgcgacgcctacctagccatccgctccgatgaccagttggaaaatcgcttcgagccgatgatgctgccggtatgggaggccaacgacgattgctgctcactgctggccagcttcgccgcttcgctcccgctgcgccggccttccccaattgccacgctggacatggctcgctacctgctcacacgcagcgagggcaccataggggaactggcgcacttgctgatggcggcggccatcgtcgccgtggagagcggcgaggaagcgatcaaccatcgcacactcagcatggcctgttga

SEQ ID NO: 19456 - DNA, 567 bp, Escherichia coli
atgaaactccaatatcgtattccattagctatatatagcgtctggtgcattatagcgattttgctctgcaaggatggcttgtaccagatgaacatatggacgctagtagagatattggggatgatagctctcccgctgttagtccgtccgtttttcattctgcttagaataatatttaggaaaaatagttttaaaaccaaagacatgtctgacaatcacacagtatgtgttttcctgagcgcactcgcagatacttcctcaaagaaggcgataaaaaaacacttcaagcaattactcgaaaagctgccccccttattacgccagaagaaacgtatctacatgaaatcccatcttctgactgaagccaggacacaaaagctgatttgctctctgcgccgaaaagggctggatgtaacagcggaacgaagggaatccgccatgaatagcgtcatgttccgcatcctcatcgtcagcagaatcttatctcagtggaaagtgcctcacataaatccccgctgtggtattgtcattctgaccctgaaaaacgattctggaaacagggaataa

SEQ ID NO: 19457 - DNA, 591 bp, Escherichia coli
atgaaaaataataacgtaccattatatctatggttactttggtgtacgttttgcctgtacatcactaccccgtggcaatacttccgttatctatacactgaccacatatcactatcttatatattatatttctgtatagtggttattatctgcttttccccactacttttcagatgcgtgcttcttatcgtaaggtctgtatctaaatacaacttcacattctttgcgaaaaaaaatggcagtaaagaatcaagcatacatcttagcccctatgccgatacacgttgcccggagtcaatgaggaaacactgggatgtgttactttctctgatatcaaaagcaattaataatgatgaaaccattgttatgcattcacatctctttactcctgcaagaataaataaacttataaagagactggaatcttatggtttgaatttctctgttattacatgcccacggaaaacaagtctgtatgaaagattatcaattccttttgtatatctcttatttcagtggtctctcccgcatttgcattcggacggaatgacagtcgtcattcgtcctctccagccgcctcacaccaattaa

SEQ ID NO: 19458 - DNA, 2163 bp, Escherichia coli
gtgaaaattttacttcgcgcactctgtgcaggccttgctatatcctcactgccggcaatggcttcagtgacctatcaggatattgtgtctgccgcaaccaatcctgacgatctgtctcgccaggcgctggtcacgatattcggtgatgtagtcaccaatccactgtcaaccagcgcccccactctgatcggaagcatgttcggggcgttcaacagtatcatcgccgtacttgccgttgtctggtttatgttcattggtatccgtcatgttgtgcgttcggggcatcagggacaggtattcagcaccggacgcgatatcgtcggcacactgagtgtcgttgcaggttttctgatgatcgttccaaccggaaatggctggagtatcgctcagctcattatgttatggggcgcatcgataatgggggttgggtccgccaatgtgatggtgcaacttgccgctgataatatcgcaaatggttattcaatgactgtacagccagttcaggcatccacacaaacagcagcgcgtggcatttttgaaatggaactgtgtaagtatgcggttaacgcaggactaaatgattttaatcagacggccaaatcctcgacttcactgatgacagaatcagctaaaaccgccagtggtaattacactgtcacggtatccaatggcagcggtatctgtggttcagccagcctgtcagtagaaggaaacggaacaacagatcaatcgacgattggaaaattctttaatcccttcagtaaaaacgaatacagcggtgttatctcagcacaacgtgcagccatggataatatgattagcgacatggacaacgctgccagtgagtttgtgacaacatttctggaaaaaagaaattctggcaacggaacattgccggatatcgagacacggattcagagagcagccgacgagtatgaacgtgctgtacaaaaatcgctacccactgataacggagagcaatccagaaaagaggctcttaaatcttatctcacaacctacgggtgggtaacgcttggcgcatggtatcagacctttgccactgctaaccagcgtctggccgagctggctgacagagctccagctgtaacttcaatgtcatcactgggagaagttggtgatactgacttattcagtgcagtcatgagtgcctacaagactcaattacagaacaccacctatacaccacctctgggcactgttacatcagccaatgagcaacgaatggccaatgcgcaagatcctaagtctgccttatctgaaatgatgagcttctttgtctatcgaaccaactggatagcaacagagataagtggcacaggaacaacaagcgatcaggtcaatccattgataaagatgaaaaatattggtgattatacattaggaacaacagagattctctggagtggatatacaacagttagagttctcgcgacagtaggtgataactctattttcggaaaggttgccaatttattctctggattacctaaaggattagttgctctgctggatgctgcagctcccccaatatatttcttgttgttcctgttgttttgtgcgggtttttccttatcaatttacctaccatttataccattcattttctggatgacaggcattgggaactggatagtcagtgtattaataggatgtaccgccggacctctgtgggctgcaacacatctcggaacatcagaagatagaggaagtcgggcagcctacggttatatatacttaattgatagtatgataaggccgcccatcatggtctttggttttttctttgcttctgttgccatcatcgccgtaggcacaatactgaatgcattatttggcgctgccctggttaacgtacagttcaattcgctgaccggtattttcagtcttgctggtttcttgctgatatacgccagaatttgtacaacctctgtagctgccatatttgcccttcaggcctacctacctgatcatgttattaatttccttggtgggcgtgagggagccaacactcttggcagcatggcaaattctgttaaagaaatatttattggaggaagtcgcaatatccgacatactcctggaatgaaaacagatcgtcttaaagataaaggaagtgacgacaaggacggaataaaaggataa

SEQ ID NO: 19459 - DNA, 663 bp, Escherichia coli
atgaaagataaaaaagagacacctgacagatttccaacttggtggttgttatattatgtattaaggaaggcttacttctttttaggaatacctttctttttattttgcgcactgacatctacactgatgttatttagttctcgttattatggtgacaacattgaagattatgttgtcacttttggtagttggttcttattacttgcgccaggtatatggatgtattcacgtgcaaaaacaaggagagaaaagataagaaaagttgtacaaacaataaaagagtcaggcttctactctccagagaaggggtatgaaggattatctttaactcagggagcttatttcggtattgaccttaaaaatggcacaatgttgtatgtccgtatctatccaggcaacattatggatgttatcggttttgacattcataatttcactcgtactgtaacagacgacaaaacactggaaattcatacgaaatacatcaacctgccaatggttcctattccatcatggtgtactcatccagaaaccgcatcaaacaccatgcacgctatggcaagtcgaggatatgattaccctgtcgactttcctcgcctgattcaggagaagcgtaaggagtgggagcagattgcaggcatgcctgtagccgaagtattttaa

SEQ ID NO: 19460 - DNA, 786 bp, Escherichia coli
atgcagcacctgccggcaccgatccaccatgcccgggatgctgctcagcttcctgttgccatcgattatccggcagcgctggcactccgccagatgtcgatggttcatgatgaactgccaaaatacctgctggcccctgaagtgagcgccctgctccattacgtgccggatctgcgccgcaaaatgctgctggccacactgtggaacaccggtgcgcgcattaatgaagcactggcgctgacgcggggggatttttcgcttgcgcctccgtatccgtttgtgcagttggccactctgaagcagcggaccgaaaaagccgccaggacggcaggaagaatgcccgccggtcagcagactcaccggctggttccgctctctgacgcctggtacgtcagccagctgcagacgatggtggccacactgaaaatccccatggaacggcgtaataaacgaacaggcaggacagagaaagcgcggatctgggaagtgacggacagaacggtcaggacctggattggggaggcggttgccgccgctgccgctgatggagtgacgttctctgtcccggtcacgccacatacgttccgccattcctatgcgatgcacatgctgtatgccggtataccgctgaaggtcctgcagagtctgatggggcataagtccatcagctcaacggaggtctacacgaaggtctttgcgctggatgtcgcggcgcgtcatcgtgtgcagttcgccatgccggaagccgatgcggtagcgctgataaaacaacttgagaggcgttaa

SEQ ID NO: 19461 - DNA, 1929 bp, Escherichia coli
atgatttcagacgcacagaaggcagctaatgcagccggtgcgatagctacagggcttttatctctcattattcctgttccactgacgacagttcagtgggccaataaacattattaccttcctaaagagtcgtcttataccccggggcggtgggaaacactgccgtttcaggttggcatcatgaactgtatgggcaacgatttgattcgcactgttaacctgattaaatctgcccgtgttggttatacaaagatgttgctgggagtggaggcttattttattgagcataaatcacgcaacagccttctttttcagcccacggactcagctgctgaagattttatgaaatctcatgttgagccaacgataagggatgttcctgcattgctggagctggctccatggttcggaagaaaacaccgcgataatacgctcaccctgaagcgtttttcctccggtgtggggttctggtgtctggggggagcggcagcaaaaaactaccgtgaaaaatccgtggatgtggtttgttatgacgagctttcctcgttcgaaccggatgttgaaaaagagggttcgccaaccctgctgggggataaacgtattgagggctctgtatggccaaaatccattcgcggctcgacgcctaaaatcaaaggctcctgccagatcgaaaaagccgctaacgagtcggcacatttcatgcgtttttatgtgccctgtccgcactgtggggaggagcagtatctgaaatttggcgatgatgcctcgcctttcggtcttaagtgggagaagaataagccagaaagtgttttctacctttgtgagcatcatggctgtgtgatccatcagtctgagcttgaccagagtaacgggcggtggatctgtgaaaacacgggcatgtggactcgtgacggtctgacatttttcagcgccgcggataatgaaattccgccgccgcgctccatcacattccatatctggacggcgtacagtccgttcaccacctgggtacagattgtctatgactggctggatgcactgaaagatcccaacggcctgaaaacctttgtgaacaccacgctgggcgagacctgggaagaggccgtgggcgaaaaactcgatcaccaggtgctgatggataaggttgtgcgttacacggctgcggtgccttcccgggtggtttatctgacggcgggcattgactcgcagcgaaaccgttttgagatgtatgtctggggatgggctccgggagaggaagcctttctggtggataaaatcatcattatggggcgtcccgatgaggaagagacgctgttacgtgtggatgtggcgatcaacaaaaaataccgccatgcagacggaaccgaaatgaccatttcccgtgtctgctgggacatcggggggatcgatggcgaaattgtctatcagaggtcaaaaaaacacggtgttttccgggtgctgccggtaaaaggtgcatctgtttatggcaagccggtgatcaccatgccaaaaacccgcaatcagcggggcgtgtatctgtgcgaagtggggacggacaccgcaaaagaaattctctatgcccgtatgaaagccgatcccacgcctgcggatgaagccacgtcgtatgccatccgttttcctgatgatccggagattttttcgcagacagaggcgcagcaactggtggcggaagagcttgtggagaagtgggaaaaaggaaagatgcgtctgctgtgggataacaaaaagcggcgtaacgaagcgctggactgcctggtgtatgcctacgcggcattacgtgtgtccgtgcaacgctggcagcttgatctggctgtactggcaaaatcccgggaagaagagacgacccggccaacccttaaagaactggcagcgaagctgtccggaggagtgaatggttacagtcgctga

SEQ ID NO: 19462 - DNA, 486 bp, Escherichia coli; identical to SEQ ID NO: 17123

SEQ ID NO: 19463 - DNA, 531 bp, Escherichia coli
gtgcctgaaattattctgctcaactcccatgacggttcatccagctaccagatgttacccggatattttcgtgccatttgtaccaatggactggtctgcggtcagtctctgggagaattgcgtgttccacaccggggaaatgtggtggagaaagttattgaaggggcttacgaggtggtgggcgtgtttgaccggatagaggagaagcgtgatgccatgcagtcgctggtcctgccgccaccgacacgccaggcgctggcacaggcggcactgacttaccgttatggtgacgaacatcagcccgtcaccaccgccgacattctgacgccacgacgccgggaggattacggtaaggacctgtggagtgcttatcagaccatccaggagaatatgctgaaaggcgggatttccggtcgcagtgccagaggaaaacgtatccatacccgggccattcacagcatcgataccgacattaagctcaaccgggcgttgtgggtgatggcagaaacgctgctggagagcctgcgctga

SEQ ID NO: 19464 - DNA, 477 bp, Escherichia coli
atgcagcagctttcctttctgcccggagagataacgcccggcgagcgcagcctcattcagcgggccctgaaaactctggaccgccatcttcatgaacccggcgtggccttcacctccacccgtgcggcacgggaatggctgcttctgaacatggcgggactggagcgtgaagagttccgggtgctgtatctgaacaaccagaatcagctgattgccggtgaaaccctcttcaccggcaccatcaaccgcacggaagtccatccccgggaagtgattaaacgcgccctgcaccacaatgccgctgccgtggtgctggcacacaatcacccgtccggtgaagtcacccccagtaaggcagaccgccttatcacggaacgtctggtacaggcactgggcctggtggatatccgggtgccggaccatctgatagtcggtggcagtcaggttttctcctttgcggaacacggtctgctttaa

SEQ ID NO: 19465 - DNA, 324 bp, Escherichia coli; identical to SEQ ID NO: 19244

SEQ ID NO: 19466 - DNA, 354 bp, Escherichia coli; identical to SEQ ID NO: 5338

SEQ ID NO: 19467 - DNA, 261 bp, Escherichia coli
gtgggaaatctctaccggctgatgcgcggctatgccaccggcggttatgtcggtggcaccggaagtccggcgcaaatgcggcgttcagagggtatcaggtttgagcagaacaacaacgtggtgattcagaacgacggtacgaatggtctgccaggtccacagatgatgaaggcggtgtatgacatggcccgcaagggtgcccgtgatgaaattcagacacagatgcgtgatggtggcctgttctccggaggtggacgatga

SEQ ID NO: 19468 - DNA, 330 bp, Escherichia coli; identical to SEQ ID NO: 5350

SEQ ID NO: 19469 - DNA, 402 bp, Escherichia coli; identical to SEQ ID NO: 16674

SEQ ID NO: 19470 - DNA, 309 bp, Escherichia coli
gtgatcagccgctggcgcattgagcagtgcagcgaactgagcgcggtcagtgcctcctttgtactgtccacgccgacggaaacggacggcgctgtttttccgggacgtatcatgctggccaacacctgcacctggacctatcgcggcgatgagtgcggttatcacggtccggcggtcgcggatgaatatgaccagccgacttccgatatcacgaaggataaatgcagcaaatgcctgagcggttgtaagttccgcaataacgtcggcaactttggcggcttcctttccattaacaaactttcgcagtaa

SEQ ID NO: 19471 - DNA, 513 bp, Escherichia coli
atgcgggtagtggagcggctgattgcgcttggccaccgcgatatcgcctttattaccggctcccttgactcgcccaccggcgtcgaacgcctcgccggctacaaagacgcgctggctggccacggcatcgtcctgaacgaggcgcttatcgccgaagggcgctggacgccggaaaccggggcggcgggggtggagagcctgcgtcagcgcggggttacctacagcgcgctggtggcgagcaatgacgatatggccatcggggcgatgaagcagcttcaccagctgggcgttaaggtgccggaacaggtctcggtggtggggtttgacgatattgcccttgcgccgtatatggtgccgtcgctcgccagcgtccgggtgccggtgacggagatgattaaagagagcatcaatcggctgatctttatgctggatggcggggaattcaactttcagcaaagctttcccggagcgctgattgaacgcgagtcgctggtggcaggcccctgtgcctga

SEQ ID NO: 19472 - DNA, 432 bp, Escherichia coli
atggacggtaccgtctggcgtcttctgaatggttttaagctgttccgcgaaaaactggatacccgtcgcggttcaaattctcaactcgaaacggcagtgaaagatctgggcgcagtggtgtccttcaaggggtattacggcgatctggccattgtggtggcgaaaacgtcttatatagcagaagacggtatcgaaaaacgttatcttccagatggcatgctggtgttggggaatactgctgcagatgggatccgttgttacggtgccattcaggatgctcaggcgttgtccgaaggtgtggtggcctcttcccgttatccgaaacactggctgacggtaggggatcccgcccgtgaatttaccatgacgcagtccgcgccgctgatggtgttgccggacccggatgagtttgtggtggtacaggtgaaataa

SEQ ID NO: 19473 - DNA, 261 bp, Escherichia coli
atgctgatggcggggattcagttcaccgctggtgagcatgagttccagttgtttcatcagcagcggaaaggcctggtccaggtggtacgaatccgcgtcgctgaaccgccctctgataccggcgcggtcggcaaggtaatgcaaccggttgccttcctgtaccagacgggcaccaaaacagggcgtcacggtgcagggcagtccccaccaggtacggtcgttattgtcgtcgggaagcgttgtcccggggagtgtgtctga

SEQ ID NO: 19474 - DNA, 261 bp, Escherichia coli; identical to SEQ ID NO: 19473

SEQ ID NO: 19475 - DNA, 357 bp, Escherichia coli
  misc_feature (325)..(334): n is a, c, g, or t
atggcacaatttaaagttgatagttttatcgttgagctaggcttcagcgagaacgttattaagggcttgcaaagagttgaaaaggcagctttgcagtcagcacaaagaattgaacgtaatttgaatagagcgtttaaggtcgataccaagcaacttgacagcaatctgacaagttctttagggcaacttgaaaggaagtttaataagacctttgacaagattgagcagcgtcttaaaaacactagagcgtttaagattaaaacggaaattgaggatactttaaagccacttagacagccaagacagccacgaattagcggcaacnnnnnnnnnnttcagcgaatatgtctaagctga

SEQ ID NO: 19476 - DNA, 273 bp, Escherichia coli
atgagtgcatttatttttagaaccacatttaaagcaactggcgatcagcaaaaagacgctattacccaaattgaagttatgcaggaacaagcagtaaaagcctttgtttcctggatgaccaaccaggagggtacagaatttttaagcactttgcaggaaatcacaacagaacttgacgcactgattgatgcggtagagtcccattcccctgttttcagaaagaaagcgactgaactggaagcgcttttagcccattacaaaacgttgctgtaa

SEQ ID NO: 19477 - DNA, 300 bp, Escherichia coli
atggctcgcttaccttatattgaatcaaccacgcaacagatttttatttttaatactttgacactttgtactattggattaattcatatagagactggtgaaaaatatattgtagtatttacagataacaataagattagagattataaaaatggtgtaatagaagaattaggggaaattacgcaagaagatattgaactgattgagtattatgctaaaaaatatgaaaagtattttgatgatttaaaaataggtgaggagcctttgaatcttaaagaatatatagaatgtatgcaatag

SEQ ID NO: 19478 - DNA, 534 bp, Escherichia coli
atgaatatccaagaagcattaaatatttttggcttgtctggccagttgactgaaaaagacatcaaaaacgcctttaagaaagctgcattaaaatatcacccagaccgtaatccggtaggtgctgaaatgatgaaggcggttaattcagcattcgattttttaatggcgaatcttgataagattaatcactaccaaagtcctgaacaaagtgcaatatataactatggtgatgaactagaaaatgttttaaaggctctttacggtttgtctggtttagtttatgaggttattggtaactggatctggattagtggaaatactatcgagcacaaagaagcattaaaagaaatagggtgtaaatgggcggcaaagaaaaaacaatggttttatcgtccagaagaacataaaagttactggaaccgtgaagagcacacgatagaggaaatccgcgcaaaatatggcacaagcggaaaattccaggccggaggatggcaacaagttgaaggcagggcaagagttgaagccagagcataa

SEQ ID NO: 19479 - DNA, 543 bp, Escherichia coli
atgacaacattttcagaaaaatatcagcctgtctttgaagttgtatgccgtattcttgggaacggctggcgtgttaacaaactggataattatcagcatcgtattaaactgacttctacagaaattcgtaaatactccatcattattcgtctggagcgtgaaagattttttatagttggtagcgttgatagtcttgtatggcacggtaatccttccgtctgtactgtatctcttacgcgcaatcctgttggtattgctaatgatatatctcggaaaatccttgctaatgcactggatgaaattgaattgctcagggagcatgagagcgcattacaggaaaaacaagataaagtgcgaataatcaaagggatgttatcacagttgctttctatatctccctggtatggggcattaacgggatttaatgcggataatggacttgcaggaaaaatactacaaaatggtgatgattatgaaatggttatcagagggcttaatgttgatcaacttatcaaagtggcaggttttataaaaaaactataa

SEQ ID NO: 19480 - DNA, 270 bp, Escherichia coli
atggggttgtttatgaaaactgataatgttttctttaaaagtaagggtagttactcttatgttgttacagtagatatggataatcagatgtatatggtcagaaagtatgttaagacatatgtgaaatcttgtgataaagagcaagttaaagggaaaaagacagttaaaaaattggtgctcgatacgaatcttacattgccagaattattggatcttgataatggtattctggctgatttatttacaagaggtaataacaatgcaaactaa

SEQ ID NO: 19481 - DNA, 246 bp, Escherichia coli
atgcaaactaaaccaactccggcagatgttaaagaggcgagaatttccgcaggtttaacgcttaaggaagctgccgaaatttttggctatcagttaaatacctggcaaatgaaagaaagcgcaggtaaagctacaaggtctttatctgtaggtgaatataactacttattgttgttggctggaaaacaccctgaatatgttctttgtaaaagggatacgatcaccgcagaaccaaccactgtctga

SEQ ID NO: 19482 - DNA, 300 bp, Escherichia coli
atgagaacattagaagaagtaattgcggctcaatcacctgaaagtcaggcgatcatcaaagctatggctgatgagatgattctggaaacagggctgcaaatgatgcgtgaagaattgcagctttcacaaaaacaggttgctgatgcaatgggaatcagtcagcccgctgtaactcaactggaacagcgcggaaatgatttgaagctggcaacgttaaagcgttacgttgaagctatgggaggaaagttgagcctagatgttgaactccctaccggaaagcgagtggcctttaacatttag

SEQ ID NO: 19483 - DNA, 351 bp, Escherichia coli
atgtggactgtttattttggcagattatttgatgaatggtttgaagagcaggaactagccctaaaacgaaaagtgctggctgaacttaaacatcttgaagagtttggcccctctctttcacggccacatgcagatacagtgaaagggtcacgtcataagaatatgaaggaactacgtatacaatatgagggacacccaatcagggcattctttgcatttgatccaattagacaagcaatcattctttgcgctggcgacaaaagtaatgataagaaattttacgacagaatgattcgtattgctgacgaagaattttccactcacttagccgaactggagggcaaaaaatga

SEQ ID NO: 19484 - DNA, 648 bp, Escherichia coli
atgacggtagctattgcgctggttaacggtaaaggcggggtgaaaaagtcctcaatgagcagggctattgccacagagtacacgaaggcagactggaaggtattagggcttgatatggatgttgatcaggggtcattcctggattggggacagcggcgattgagatataaagttgaaccacctgtcactattcagggatgcggaacggtatcacaggctaaaaaacatattgaatcagggatatgggatttagttgttatcgatagtgctgcttatgcaactaaatcgctgttgagcctggcagaaattgttgatttgctcgtgttaccgtctggttttagtgtggacgatttgagaacgacggttacaaccgtgaatgcattgcgtaacaagggacactcaacaaataagatggctgtagtttttgtcggagtcagtgaaagcgaaagtgagtatcgtaccgcgcttgaatatcttaaaccgtgcggtgttcaagttatcaatggcgcaataccttttatgacctcgttcagccaggcacaggataaaggactggcattgacggaatccccttttccaggtccacggcagaaagctgacgaagttgtccagggagttattgacttgctgactaaactctcacagtga

SEQ ID NO: 19485 - DNA, 234 bp, Escherichia coli
atggctaatgtaccaccaaaaccgcgtaacaccaaaggcgagccgccaagtctggaggatacacaacacggatttaatccgacgcgtaaaaacgctgatgggagaaaagctcagcttaacctttatgtggatatggaagttaaacgggagttccgctcgattgcagcggctaatgatatgaagcacggggagttgctggaggcataccaggaattctggaaaaagcatcattaa

SEQ ID NO: 19486 - DNA, 264 bp, Escherichia coli
atgacgataaaaatactcgttgtgtcaaatgacggccatgaaaaactaattgatctaagtccagataatgatttagctaaaattacaaaatcattgcgtacagcagaaaacaggatggtatgtgttatccaggacaataatcgtattctccgctgggacagaagctatgcctctcgtgccaaaaatcactggcgaaaggtagctcccgatcgttttgagattttaggaaccgttgaacatattcattatgttggtaagtgttaa

SEQ ID NO: 19487 - DNA, 516 bp, Escherichia coli
atgcaaacaattaccacacgtgaacagttattagtgaatgggaaagtcctggaaagggttgcgacacatatcgtaactggcgctcatgggtatgaaacgctttgtacaggtggctataacttacagtacaaccaagagcgagtactggttcaaaattgtgaaaagctggctgaaggcgaactgcccatcacctgccacacttgtttcgctgtatggcaggatgcatacaaattcaaagatagcgactttgacataaaatcaggaaatttcactgatacaggtctgacagatatcacaattggccagatttcagaaccagaagaagaaagtgtgaatattctctatgcggatcaatacgaaacattgccaatagaacgctatatgacaaatgaagaagtaggcagattagtgttcaattttatgaaacgcaccaacggcgaagcgttactaatagtgtttccagaatatgataatggagacgataatgacgataaaaatactcgttgtgtcaaatga

SEQ ID NO: 19488 - DNA, 465 bp, Escherichia coli
atgaaaatattaatcatattcgcattatatatcttgtcgccttcactatatgccaatgcagcggatatacagggaaaagttattcgtgtacttgacggcgataccatcgaaattttacagaataaaacgccagtaaggattcgtctggccaatattgatgcaccggaaaagaaacaggcttacggacgctggtcaactgaccaacttaaaagcctgattgccggacaatccgtcagggtgacatattcacacaacgaccgttacggtcgcattatcggacgtgtattcacaacaggcggtagtgaggctaaccgctttatggtgcaatcgggtgctgcatgggtgtatgagcattacaacacagataacgctctggcagatctacaacaggaagctcgctcacaaaaacgaggtttgtgggctgaccccaatcccgttccaccgtgggaatggcgacataaatag

SEQ ID NO: 19489 - DNA, 735 bp, Escherichia coli
atgttaattcatgatttttacgaaagaaaaagaatatcagctaacaacatgctttgtcttttaaatttccttaaggatgaaacgtattcagactttcacattataaaaagaaaattaggattcacaaaaaaaagcagaaacccagtatataaattactaaacaaggctcttaaagaaggttttattatcaaacatgaaataccatcatcaaaaagaaaattaactgtttggggtattactatgcaaggattagcaatggttgtaaaagccgatgacattacgttccctagttatttcgaacccagcaaactaaaatactggactcttgagcatcgtcttttaaatcagcgagtgagaatatctctggaaagtaaaggcgctactgaatggattaacggtgatagtgcagccttcatcgcacgttattccggctgttcccatcgccctgatggagtaataaaacaaccaactggcgcaataatggctattgaaacagaacgaacaatgaaaactcgtgctcgctatataagcattataaacagtcatcttacggcaagagataaaggaaactggcattatgctttgtacgtcatgcctgacaccaaaagtaaagaatcattaatcagactgttcgactcaatcaaaactgtaatgaggaataatacacctgtgccttttgatgcaaaaaacagagagatgtttatttttagaacaattgatgaactggaacaatag

SEQ ID NO: 19490 - DNA, 1728 bp, Escherichia coli
atgaatccacatctaatgcaaaagctgaatggtattgctgatgccttttcaatatttctgttatggctacagaacagccctgtcatattgtcattactggcaggactaacactaccatttatattcaacctaccacgagaggaaagaaaaaacgctcccttctggttaaaatctgttgcgtgcgtgtccattttctttttcatattcggcacaatgtcaccacttagtattcatggtctgagctacctatttgacgttctcgatcccaatacactacttagaataccattatggataatcacaattctctttacactagctggattagcttttcatttgaccgcgcgacgattattagcaggtgaaatagacagcctgaaacacagaatgataaagaaaagcaaacttgagagaaatacaagaacagatgttcgcaaagtaaaagaattgttgccagacagcatagaatacaatcccctagattacattgatttgaaaaaaggggttttcattggcttagacaaagacgaccaaccgcaatatataacaataaaagaatttcagaaacaacatgcagcaatcataggtacaacaggttccggtaagggcattaccgcatcggttttgctttatcaggcaattctgttaggcgaggctgtttttgttgaagatccaaaagatgatgaatgggctgtgcatgttcttagggaagcatgtaaaaaagcaggaaagaaatttgttgtaattaatttaaacagaaccaaccatcaacttgacttacttgctgacatatcacatgaacaattagaagaattatttaatgcaggatttagtctatcaaaaaaaggagaggccgcagatttttatcgtatagctgatcgccgcgcagccagaaatgtagccgcaattcataaaaccggaatgacactgtatgatttattcaacgatgacaacgtaaaatcaataggagaagatgccccagcatttttaggtgaactagaagaaattgctcttgtaaattccgtcaatgcaaaaaatggattttctcttaaagagatttttgataatggaggatgctgctatatcattgggtcaacccgaaatcaaaaaattatttctgcacaacgcatgatacttacgcgtttgattcagatagctgaaaccagagacagaataaacacaactccacgtgttgttgcaatttttcttgatgagttgaaatatcatatttcacgcccgacaatggaaggattaggtacagcacgagataaaagtgtgcatatatttatggccttccaggcaatagatgatttaagagattgcccttctgatcttaatggcgattctgtaattggtgctgttattgaaaacgcaaaattcaagttaatctataaaatccagaatccagaaacagcagagtgggcagctaaaatgactggttcaatattagttgacgatgaaatgaggaaggtgagaaccgacttatcattaacagaaaaagttgatactgaccgcatgataagacaggcagaaagttattatgtagacagtaatatgtttttaaatctacctgaaagagtaggatttgtgttcacatcaaaagatttaccaaaagcaactaaaatgtctcatataccagcaaacaaagaaaccattgaattgctatcttttgagacagaacaaatagaacaacacaataacaacgatgtgccttccagtggtttatga

SEQ ID NO: 19491 - DNA, 306 bp, Escherichia coli
atgttaaaagaagatatgttcattaataatattcattcaaggaatcaggacagaatccatgtaaaaagagtctttgatgatattagtaataaagcaaacaggggatgcgggctatattatgaaatatatcaagcgaggttaatgcgagggttaattgagcacacagtaaaactgaaaagttctgatgccaataagctgattagttacgctgcttcacaaggttatgaaataacagaagacagatataatgctgcaataaaagccgaggatgaatgtctgactgaaataacacgggcacaggtctga

SEQ ID NO: 19492 - DNA, 216 bp, Escherichia coli
atgaatacagatgaaaacatggtattttatctgacaaactccgatcttgtttatagctatgcacacaagatagtgtgctccattccatcaggaatgaaagggaatttcattacttctatcggcgaaacgcttgaagatttaaagaaacgatatcctgatattattctcattacagaatcggaagcattagcattgcaatcgaagagggaaaattaa

SEQ ID NO: 19493 - DNA, 399 bp, Escherichia coli
atgataaagcatatactggttactgtgcttgtaacactaattaccggatgttcctcaccgcctccaccagtacccgtggaatggaataaaaagccggtatcgcttaacgagaaacttcctgaatggaaccccaatagcttaataataaaatcgcctgttattaatgacaaatggacgttatccattagctcacaagatttcaataaagaagattggatgccatctgtcttttatgccattgctcactcaacacaaatcacagtagcaacaaagtcaggcgctgattatttcagtgcaaaaaactggttgtatcatcatggtgcaaacggggtaattatatatcaccccatcacaaattgtcttacgtgcaatgaaacaaccatctacttttcgcgttaa

SEQ ID NO: 19494 - DNA, 192 bp, Escherichia coli
atgaactgcaaagataaagagacttggttgcacatgctcgccgccggacacatggggggtctcgccgggaacccgaacgaagccgccgcacaggatgcttaccagcgtctgattaaaaacaaaaccgcacaggccgttttgcagcggtgtaccaccagaatcacactgaaaggagcaaacgatgaccgctaa

SEQ ID NO: 19495 - DNA, 906 bp, Escherichia coli
atgagaaaactgacgttaattaccctgataataatgctgaacagccaggcatgggccgcagctacaccacaagcgagccgttatgatgcacgtatccagcaggtcatttataacccgcagaatgttaccgttgtaaacacaaaaccaggatttatgacgactctggtttttgataacgatgaagctgttatcagtgccagtcctggctttgatgaagcatgggaagccagagcagatgcaaacagggtaaacattcgtccggttgcgctcacacagggcgcacctggtgaagacggtaatacaacacaggttgttatcccgccgaacagccgtgactggcataccaatatgctgattgtgacaaataagcgcctgtacaacgttgagctgaatgtcattgatgaaaaatcgccacaacagcccgcatacctggtgagttaccgctatccaggagacgaacgtaacagagctaataaggaagcagcagcgcgtcagaaagaatgggaacaaaagcaggaacaaacccagattcagaaagcactgagaaccgcacaaaccccgcgtaactgggactacacgaaatatccaggaaaagacagttacaacattgaacctgattttgcctacgacgacggtcgctttacgtttctcggattctcacccaacaaatcagttccatcagttaccaaagaacagaacggccaggaatacgtggttaacagcagtatacagcgtaagggcaattttaccgttctcgttatccaggaaatcacaccacggcttgtattacgttccggtgatgccgtagtggggctgaaaaataacggctttggaaaagtacacgcggctgataattcaaccgtatctgacaaggtggagcgcgttgaaaaaacagataacacctaa

SEQ ID NO: 19496 - DNA, 684 bp, Escherichia coli
atgactgaacagaaattaattgctgattcccgctcgtttgagcagcaaatgattgacagggataaacgcgccacaaaagcaggctttctggtcggtggagcagggttattaatcactatcctgtcactgatcgcgatagtgattatgttgccacttaaacaaacaacagttgaactctataccgtagataatcataccggacgagtggaacacgttacccgtgcatcaaaaacagccctgacagcggaagaagcctaccaaaaagctatggccgccaattacgttaaattacgtgaacggtacgtttatcctgcattacaggacgattacgagacagtacagatctacaactcaccacaggtaaacgacgactacctggcactgtacgccggaaaaaacgcaccagacaaagtttataataacgcggctcacaccgtgaaaattgaaattatttctgagcagataacgaatgcaacagcaccagacaaagtagccaccgttcgttataaaaaaataattcgtcgcatggctgataacagtattcgcaatgaatactgggatgcacgtttcaccttccattcagaccctgaaaaagaaatgtcagatgttgagcgggaaataaacccgttcggattcaccgtaacaagctggcagactgaccgcgaaatcaggggaggcgagtaa

SEQ ID NO: 19497 - DNA, 144 bp, Escherichia coli
atgaaacgcttaatcgcgctggctttgctgtgcgtgctttctggctgcgcacaaaaatctaaatctctgccgcacgcattcagcggtcagggtagccctgtaaacacaccccaaattatcgcggagctaaccacacatgactga

SEQ ID NO: 19498 - DNA, 1068 bp, Escherichia coli
atggccggtatattttcttctgtcgaaaaaaatatcatcggtgggataactgacgcgactaatggtttgatgatgtcttattcgtcaatgatgatggggctggcggctacgtcagccactatctacattatgtggcgaggatatcaaaccttagcgggaaagctgtctacaccaatggaagatgttatgtgggatataatgaggatggctatcattttatcctttgtagcaaacattaacggatatcttgatggtgtcattgatgctgtaaatggaataaaagaaggtttttccagtagcacaagcatctggcaattacttgatactctatggaacagcgcaagagttttaggtaaaacgttacatgatctagacaactccgaatttatcaaagaggaaggcacaattgctgaattatttgtatggggtggtgtctttgtcttaatgattatcacagcattcgtatctatgattgcggagatcatgatcttattgttaggtattaccgcaccaatatttatattttgcctgatgtatggctttttacggccaatgtttaataactggcttcaaaatatatttgctgcaatactaacaattatgttttcagccttagctctgcgaattgtaattggttttcttacatccagaatgtcagaagcagtgacccaagccagcaaagcaaacattgtagaacttggcgctcaagtttgtcttgccggagtatgcgctgcaatactggtgtacatgtccgcaaaactagctggggcacttgcaggagcaagtgctacagccactatgcaaggtgcggcggctctcggcattggcgctgctgcatacggcgctggaaagatgttaaaggaggcaggaaaagtattacctaaagaagtagcaagcccaagtaataaagggttaggagatccacaatcgcgcatagtatttaacgctgctgatgcacgtaaacacgctatagaacaaatgatagcgcgtaatgaagcgcggatgctgacagatcaatcagcaccaaaactaccgccatcaattaaacgtttacctcctccaagataa

SEQ ID NO: 19499 - DNA, 228 bp, Escherichia coli
atgaagaaaatcattttatttacaattatttcaggcctgatggcgttaacttcaggatgtaaggaagaagctaaaacaacaaaatggtatcgtgaacatcctgatgaactcaaagttgtttatgctgaatgccagaaaacaggtagcgcatctgaaaactgcaaacatgccaatgaagctcattggcaaattcaacaattaaatgcacctgaaataagtttcaactaa

SEQ ID NO: 19500 - DNA, 705 bp, Escherichia coli
atgaaaagatttcgcccccttattctggcggttcttattgccagcccgatagtaaacgctgctggtatacccgtgtttgatgcaacagccagactagagaatattcgccagtggacaaaagaagccaatcaatggctacagacggtacaacactataaagaccagctacaggcgtatcaaaaacaactggaaacagttacaggcatccgtgacattcaggcgttcgttaatcaggccaaaagccttaaagctgacctggataaactacgtaagccagggcaagccctgaacgatttgctcttatccggcggttcttctggccaatttgatgaactgtacaacaaatacaagattttcgataactgcaatgctgaacaatcaaaaagttatgccaatacatgcagacaagaggtcatcaacaaagcaatacaaatcgaacaaaccaatgaagtacaaacccagattggtgagatgcttggtgagatcaacgaattatcagaccgtgtagcaaatgccaaagatatgaaagaggcccaagacttagcaaacagtattcagttaaaatctgtgatgctaaatacgctcacgacccaatgggaaatgaacgtaaaagcggcggagaagcgtgaaaagatgcttgctgatgaacgccgtaagaaatggaatcagcagcaattaaacgcaccagaaataatgtttaattag

SEQ ID NO: 19501 - DNA, 2745 bp, Escherichia coli
atggcaaagctgcttaaggcgatgaaacgtccggcggcgctgtggggggtgccaatggtgcccctgctgactgtcgtgggcgtgacaattattgttgctatctggacttccatagccctacttctcttcctccctattgagtttctggttatgaaatcactaaccagaaatgaacctctgagatttaacctgatagctgtctggctaagggtaaggggtaatccggtagcaaaccgtttatttggcgcaaccgcatttatgcctgttgaacataatgctgttgatatccaggagtttatcgatgcgatgaagctaaaccaatgtgccaccataaaaaaatacattccttactcgtcacatattcaccctaatgttgtccgttcactgaatagcgattttttctgtacctgggaactgacaggaacgccgtttgattgtgaatctgacgagacactacagttcggtacaaaccagttgcacgggctaatacgctcatttgaaggctttccggttacattttatgtacataacagccgtgaacagtttacggactcactgcataaggtttcaggaaacccttacgcggataccgtgagcgaacgctattacgcatcactgaataaaaggccattccgacgtaaccgcctgtttgtgaccatctgctatcgtccgtttgccagtctggataaggcaaaccgtaaacgtatgaaagacggtcagaagctaaaagagatagacagcgcattacttgaagtgctggaaatcaaaagtacgctggatacagccttatcccgttatggtgctcacgcgctcggtactttcaccgaaaacgaggctgtattctcgtcccaactggcattttatgaataccttctcacgcatcaatggcgaaaagtcagagttacacgtacccccgcttacaacgtaatgggaaatgttgcgctgtacttctccgtcgaatcagggcaaataaatcatgttaatggcactcaatatttccgtggtctggaggttaaagagttttcggaagaaaccgcaacgggcatgacagactccttactgtacgcgccgtgcgattatgtgattacacaatcctatacctgcatgtcccgtgaggaagcgaaaaaggcgattaagcgcacccgacggctgatgatgagtgctgatgatgatgctgtatctcaacgtttggatctcgatgtggcgcttgacctgctcacctccggtaaaatcgcctacggtaaacatcatttatcaattatggtgttttcgccgtcactggaaagtctgattgcagacacaaacgagatcagcaatgcactcaacaatatagggataacccctgttcctgctgaaatctcattgtctgcggcctatatggctcaattaccaggcaattacaatctgcggccacgagcgggagagttgagtagcctgaactttgttgaactggcatcacttcataatttctatccaggaaaacgcgacaaagccccgtggggtgacgcgatggctctggtgcgaaccccgtcaggtgatggctactatctgaatctgcataacactctggcagataaagacgagttcaacgaaaaaaatcctgcaagtacctgcattctgggtacaaacggctcaggtaaaacaatgctgatgacgtttttacaaatcaatcagcaaaaatataaccgtgatgacagcttttcaccggatgccaagactaaacgactaaccacagtttacctcgataaagaccgtggtgctgaaatcaacattcgcgcacttggaggaaagtactacagggtattcagcggtgagccaacaggctggaatccgtttgctctgccagccactaagcgaaacatcaatttcattaagcaactgatgaaaatcctttgtacccgcaacggtgcaaccataacgccacgtgatgaacgtcgcctcaatgatgctgtaaatgccgtcatgagtgacgagcctcaatatcgcgtctacggcataacccgaatgctggagaacctaccggaaccggcaacgcgtgaagcgcaagaaaatggcctgagtatccgtctttcacagtgggcgcgcggtggtgaatttggttgggtgtttgataacgaacacgacactttcgatatcagcaactgcgataatttcggaattgacgggactgaatttctggatgacccgaatgtctgcgcccctatctcgttttatctgctgtaccggataaccagcctgctggatggcagacgacttgttattttcatggatgaattctggaagtggttacgcgaccctgtatttaaggattttgcgtataacaagctgaaaactatccgaaaactgaacggtatgctggttgttggcacgcaatctccagcggaaataatcaaggatgagatagctccggcagttattgagcaatgtggtactcaaatactggccgccaacccaagcgcagatcgttctcattacgtggatggaatgaaatttgaaccagaagtgtttgatgtcattaaaggacttgatccacaggcgcgacagtatgtcgttgtcaaaaatcagttccgccgtggagatacaaaacgctttgcagcccgtatcacgctggatctgtctggtatcggcagatacacaaaagtaatgagcggcgacgcacctaacctggaaatattcgaatcactctatcaggagggaatgaagcccagcgactggctggattcctacctagctaaagcactataa

SEQ ID NO: 19502 - DNA, 297 bp, Escherichia coli
atgattaacaaattaaaggccatttgcagccgcgcatctgcttatattctggctccgttagtaagtgttgtcagtcccgttttcgcggctgacggtttcagccgagcaaataccatcatggaaaaggtttcgaatggtctgcatggtctggcagccgtcaccatcaccgtcgctgtgatctggattggctataagactctgtggaaaggcgaaagcctgtcgcagtgcggttacatcatcattggcggcattttaattggcggaggcagtgaaattggcgctctgctaatgagctaa

SEQ ID NO: 19503 - DNA, 705 bp, Escherichia coli
atgctttccaccgtttcatttatggcggtggctatgcagtgtgccgccacagttcacccctccacatcactggatgttgcgcgggtcgagtctggttttaatccctacgctattgctgagatcatccccaaacgtgaacgccagccaggcgacaagggctttatctcacatatgccaaaaactaaggaggatgcattaagcatcgtcaaacagatagaggcaaaaggtcgtcgctattctgttggtctgatgcaaatcacaagtacaaattttaatagttacgccgtaacggctgctgacctgttcaacccgtgcacaaatctttctgtttttgaaaagatcatcactgattgctaccagcgaggcggcacactgaaacgggcgctgagttgttattactctggaaattttactacaggacaacaaccagaagctgcgttatccagaaccagttacatacagcgaattggttactcacctgaaaagccccgctatgtcgttcctggaaccagggatgatatcgcaactcaatcggccattctgaatgcaacacccgttgaagctccgacacgccctcgcgttgtctggcctggcgcaatcgtgcgcggggttcctgctcaactgcgccagaaaaaggcagataccgtttattaccccgcacaagttatacgcggaaacagattttcaactgaaaaagaggattaa

SEQ ID NO: 19504 - DNA, 207 bp, Escherichia coli
atgcccaaacccacctataacgtatacgtcacacaggaagttcccactgacgaaaacggcggtaaaaatacctactggaccaaggttggcgcggcattcgcgcataacggaaaaccaggactgaatattatgctcgttcctggtattgctgtttccggcaagctggtactactcgaacctaaagaagacgccccacaaggaaactaa

SEQ ID NO: 19505 - DNA, 213 bp, Escherichia coli
atgccgaaccctataggccaggctaaatctacagccgttatttacatcggcaaaaaacgctatgaaacactggcaaaacacgccagagatataagttatgttgcggaggtaaatattcgtccaagtgcctttttgcagtacatgatcgacaaattaagtaatgaagctcacaacgaaatgttgaaagagctaatgtcaaaagaggataaataa

SEQ ID NO: 19506 - DNA, 480 bp, Escherichia coli
atgggggcttgtgtccgtaaggtgacgcttatgaatgcatggtatcttctatattgtaataacaacgatttagaccgcattgcatatcgttgtaaaactatgaacgttgtggctttctgtccgagatacataaagatcacacctcggaaagattgcaacgcagtacgcaaggaagaaaaagttttatttcctaactacctcttcctccattttgatgtgaatgtcacgcacacatcagcaataacctctattccaggtgcaattggcttcgtaagtttcggttccacaatatgtactgtaccggaaaaagtcgttatcgctattaaatgcgccaagatactggcgctaaatcctgatgatgattccatagagtgccgtaacatcggtagtgacctactggcagaaattcaacgcatatcttcaatcatcttaccgttagaacgtcaaacggccttctccaggcttttacagaatcagtaa

SEQ ID NO: 19507 - DNA, 366 bp, Escherichia coli
atggtgcctaaacgactgaaagaagcgaggatggaggctggattatctcaagaaaaattatctcaacttcttggtgtagcggaaggtattaacactcgatctcgattttcaagctacgaggtaggcagaactgaaccaccttttaaacttgtaaaaaaaatcgcagaacttcttgattatcctgaaaattatttctatacagaagacgatgattttgcaaaggctgttcttgattttcaccgaaaacgtacgagtccagagctaaaccctaattacgattcggaagtagaagcaagaagaatggcatctaagctggataacgtaaaaaaaatagttgctcaattaaatgaatatctaaaggaatga

SEQ ID NO: 19508 - DNA, 474 bp, Escherichia coli
atgaaaacattgtctcagaacaccacctcttcggcctgtgcaccggagactggcctgcaacaactggttgccaccatagtccctgatgaacagcgcatcagcttctggccgcagcattttggcctcattccacagtgggtgaccctggagccccgggtcttcggctggatggaccgtctgtatgaagactactgcggtggtatctggaatctgtacaccctgaacaacggtggcgcatttatggcacccgaaccggatgacgatgatgacgaaacatgggtactgttcaatgccatgaacggtaaccgcgctgaaatgagcccggaagccgccggcattgctgcctgtctgatgacgtacagtcatcacgcctgccgtacggagtgttatgccatgacggttcattattaccgtctgcgggattacgccctgcaacatccggaatacgacgccattatgcgcatcattgactga

SEQ ID NO: 19509 - DNA, 1041 bp, Escherichia coli; identical to SEQ ID NO: 11406

SEQ ID NO: 19510 - DNA, 873 bp, Escherichia coli
atgaatccgtctgatgccattgaggcaattgaaaaaccgctctcctccctgccttactcactttcccgtcacatcctggaacatctgcgcaaactcaccagtcacgaacccgtgattggcattatgggtaaaagcggggccggtaaatcctcactctgtaatgcactgtttcagggggaggtcaccccggtcagtgatgttcacgccggcacccgggaagtacggcgcttccgtctgagtggccacggtcacagcatggttatcactgacctgcccggggtgggcgagagccgggacagggatgcagagtatgaagccctgtaccgtgacattctgcccgaactggacctggtgctgtggctgattaaagccgatgaccgcgccctgtctgtggatgagtatttctggcgacacatcctgcaccggggacatcagcaggtgctgtttgtggtgacgcaggccgacaaaacggagccctgccatgaatgggatatggccggcattcagccttctcccgcacaggcacagaacattcgggagaaaacggaggcggtattccgtctgttccggcccgtacatccggttgttgccgtatcggcccgcaccggctgggaactggatacgctggtcagtgcgctaatgacagcacttcccgaccatgccgccagtcccctgatgacccgcctgcaggacgagctgcgcacggaatctgtccgcgctcaggcccgtgaacagtttaccggtgcggtggaccggatatttgacacagcggagagcgtctgtgttgcctctgttgcccgtacggttctgcgtgccgtccgtgacacggtggtctctgttgcccgcgctgtatggaactggattttcttctga

SEQ ID NO: 19511 - DNA, 663 bp, Escherichia coli; identical to SEQ ID NO: 11000

SEQ ID NO: 19512 - DNA, 738 bp, Escherichia coli
atgacatcagacaatatcgctgaatatgttggtgagaataatcaatttactgagaagcctgtaactgaataccccccggtgatacaggataatacagtgaccactaaagactatctgtacagcaataatattgatactgaccttttagtggttatcggagggcttattgttatattgtttctcatgatgcttatcatgtactttattaattctctcaggcataaggaattaactgaaatactgacaaaaatatcttttcctgaaaaatccgggagcaatttgcttaaaccggaggcggtcagctgtaatttgttgtccctgtgtgtgctggcaccggtattctgtacacccagaaagctggctgaagtttccagggagatcatcgtggcgagtgcgcaggaaattgcatggacgccggggagcagtcgtattgatggtcaccaggcggagaatatcacctgggcgatttcatcgcagtctcctgccgataagtatgatctcatcaataaaacgtcctgtgtttctcctgacagtggccgtttttatgaaccggacacagttctggatcaccgtgaacgggtacgcctttttattcagatccagtttccgcatgggagtgactggtctgaagtattgcgcctgactgacattgttacagagaaggtctcttccggcaggactgcaggcgggcatcaccaccggcatacagggtacacctggtctgtttctgtgaattaa

SEQ ID NO: 19513 - DNA, 366 bp, Escherichia coli; identical to SEQ ID NO: 5339

SEQ ID NO: 19514 - DNA, 681 bp, Escherichia coli
atggcaacgacgaacgcattctgtctggcgtcaccgccactggcacgcatctgccttcacggggatttgcaacgatttggccgccgcctcagcctgtatgtgaacacggcagcggaagccatccgtgccctgtcgttacaggtgccgggctttcgccgtcagatgaacgaaggctggtaccagatacgtattgccggtgatgacacggcaccggaggcggtgtatgcccgtcttcacgaacagctgggtgagggaacggtcatccacattgtgccgcgactggccggggccggaaagggtggactgcagattgtgctgggggcggcagccatcgtgggctctttcttcacggccggaggctcgatggcgttatggggtacagccctgagtgccggtggtttttctgccaccacgatgctgttttcactgggtgccagcatgatactgggcggtgtggcacagatgctggccccgaaggcaaaaacaccggattaccgcgtaacggataacggcagacagaacacgtacttttcctcgctggataacatgattgcccaggggaacccgatgccggtgccttacggggaaatgctggttggctcccgccgtatatcccaggacatcagtacccgtgatgaaggcgggggcggaaaggtcgtggttatcgggcggcaggggtaa

SEQ ID NO: 19515 - DNA, 570 bp, Escherichia coli
atgaaagcgtcatcggacaataacgacttccgcgcccggggccggggctggcagggctcactggaaaccggtctgccattcagtatcactgacaacctgatgctggagccacaactgcagtatacctggcagggactttccctggatgacggccaggataacgccggttatgtgaagttcgggcatggcagtacacaacatgtgcgtgccggtttccgtctgggcagccacaacgatatgacctttggcgaaggcacctcatcccgtgacactctgcgcgacagtacaaaacaccgtgtgagtgaactgcctgtgaactggtgggtacagccttctgttatccgcaccttcagctcccggggagacatgagcatgggtacagccgcagccggcagtaacatgacgttctcaccgtcccggaatggcacgtcactggacctgcaggccggactggaagcccgtgtccgggaaaatatcaccctgggcgttcaggccggttatgcccacagtgtcagcggcaacagcgctgaaggctataacggtcaggccacgctgaatgtgaccttctga

SEQ ID NO: 19516 - DNA, 384 bp, Escherichia coli; identical to SEQ ID NO: 5770

SEQ ID NO: 19517 - DNA, 213 bp, Escherichia coli; identical to SEQ ID NO: 5358

SEQ ID NO: 19518 - DNA, 720 bp, Escherichia coli
atgagcgcacgttcacaggcactggttcctctcagcacagagcaacaggccgcatggcgggcggtggcggagaccgaaaaacgccgccatcagggtaacacgctggctgaatatccgtatgcgggggcgtttttccgctgtctgaacggaagccgcaggatatcgctgtctgacctgcgatttttcatgccgtccctgaccgcagaagaactgcacggcaaccgtcttcagtggctgtatgccatcgatgtgctgattgaaacacagggcgaggtctgcctccttccccttcccggtgatgcagcagagcggttgttcccgtcggtgcggtttcgtgtcagggaacgcagtcgccataaatccgcgctggtcatgcagaagtacagccgccagcaggcacgggaggcagagcagaaagcccgtgcgtaccaggcgctggtcgcccaggctgaaatcgaactggcgttccattcaccggaaacagtcggaagctggcatgcacgctggagtgaccgggtggcagagcatgacctggaaaccctgttctggcagtggggcgagcgttttccgtcactggccggaatggaacgctggcagtggcaggatatgccgttctggcaggttattgcggaagccagtcttgcagcaagagaggccggtcacgctgtccgtgagatggagcggtggatggtgccgaacaaactccgggaggcagcgtga

SEQ ID NO: 19519 - DNA, 477 bp, Escherichia coli
atgcagcagctttcctttctgcccggagaaatgacaaccagagagcgcagtctcattctgcgggccctgaaaaccctggaccgccatcttcatgaacccggcgtggccttcacctccacccgtgcggcacgagaatggctgattctgaacatggcgggactggagcgtgaagagttccgggtgctgtatctgaataaccagaatcagctgattgccggtgaaaccctcttcaccggcaccatcaaccgcacggaagtccatccccgtgaagtgattaaacgcgccctgtatcacaatgccgctgctgtggtgctggcacacaatcacccgtccggtgaagtcacacccagtaaggcagaccggcttatcacggaacgtctggtacaggcactgggcctggtggatatccgggtgccggaccatctgatagtcggtggcagccaggttttctcctttgccgaacatggtctgctttaa

SEQ ID NO: 19520 - DNA, 534 bp, Escherichia coli
atgccatccctgaccgcagaagaactgcacggaaaccgtcttcagtggttgtatgccatcgatgtgctgattgaaacacagggcgaggtctgcctccttccccttcccggtgatgcagcagaacgcttgttcccgtcggtgcggttttgtgtcagggaacgcagtcgccataaatccgcgctggtcatgcagaagtacagccgccagcaggcgagggaggcagagcagaaagcccgtgcgtaccaggcgctggtcgcccaggctgaaatcgaactggcgttccattcaccggaaacagtcggaagctggcatgcacgctggagtgatcgggtggcagagcatgacctggaaaccctgttctggcagtggggcgagcgttttccgtcactggccggaatggaacgctggcagtggcaggatatgccattctggcaggttatcgcggaagccagtctggcagcaaaggaggccggtcatgctgtccgtgagatggagcggtggatggtgccgaacaaactccgggaggtggcgtga

SEQ ID NO: 19521 - DNA, 462 bp, Escherichia coli; identical to SEQ ID NO: 10202

SEQ ID NO: 19522 - DNA, 510 bp, Escherichia coli
gtgtgtcatccgaatatctactacttccataatctgacgcccggttgggtgtcattcaatggtgaaaaaccggagattgccatcgtaccccagagcctgcaccggctgatttatggccctgacaaacgggccacaccgcccctggatgatgatctgatagtgaatttatgcaccagtgaacatctgctggttcatcatccgatgctggaaggcattctcctgtctgaatgtgaacgtctgaggcagcgttctctggcaaataaactgatcagcctcttccgtcagtttggtggcacggagttgcgcctcaaactggtctggctttgctggcttgatttaatgaccggaaactgccttgacgactggacggagaatctgaaacggaaatcagaaaaagagctggaggaatggatcatcaaccgtcagaagcagagcgcagcactgacggatctgatggatcagtacgtgctcctgtcataccgcacaacggttgacgataagcgcacctga

SEQ ID NO: 19523 - DNA, 516 bp, Escherichia coli
atgaaacagatttctttatttattcctctgctgggaaccttattactttccggctgtgcaggaacgaactctgattttgagtgtgatgccaccacgtcagatacctgtatgacgatggagcaggctaatgagaaggccaaaaaactggagcagtcctcagaagcaaagccggttgcggcatcactgccgcgcctggctgaagggaacttccggaccacgtcggtgcaggccgttgcggcgacaacgccgtcccgcagcaggcctgctgtgacagcacttccggagcagaaactgctggcaccacgcccgctgtttaccgctgcccgggaagtgaaaacggttgttccggtcagttcagttgcgccggtaacacctccccgtccgctaagaacgggtgagcagacggcagcattatggatagcgccttatattgataatcaggatgtttatcatcagccatccagtgtgttttttgttattaaaccgtctgcgtggggaaaaccacgtattaattaa

SEQ ID NO: 19524 - DNA, 276 bp, Escherichia coli; identical to SEQ ID NO: 6180

SEQ ID NO: 19525 - DNA, 201 bp, Escherichia coli
atgaaaccggaagaagagatggaacagcaactgccacccgggatcagtgaatccggtgaagtggtggatatggccgcttatgaggcatggcaacaggaaaatcatccggacatccagcagcatatgcagcgtcgtgaagaggtgaacattaatgtgcaccgggagcgcggggaggatgttgagccgggagatgatttctga

SEQ ID NO: 19526 - DNA, 219 bp, Escherichia coli
atgcatacctttatttttcttgtgctgataaaaaatattaacggtggcggaagctggaatattacacccatgccaaatacggacgtatgcgtgcaggttcttcggacaatcgagtcacacggaggcaggggatttggaaatacaggggaatgtattgaagttaaaacaaataaacctttgaacaacgtgatggatacactgaatggtggtgggcaatga

SEQ ID NO: 19527 - DNA, 183 bp, Escherichia coli; identical to SEQ ID NO: 9298

SEQ ID NO: 19528 - DNA, 258 bp, Escherichia coli; identical to SEQ ID NO: 11054

SEQ ID NO: 19529 - DNA, 180 bp, Escherichia coli
atggcaacgggtacaacaaacgcaaaatcacaagctctaaaggctcgtgtaccacacgaaatagtaaacgccatggaatcagtgaaagaatcaggcgaaagcacatcacaattcatcattgcgtcaatgcaaggcgagatcaaacgccgccagcgccgcaaggccaaagagcaggagtaa

SEQ ID NO: 19530 - DNA, 2397 bp, Escherichia coli
atgacagtaaaaatttctggcgtgcttaaagatggcacaggaaaaccagtacagaactgtaccattgtgctgaaggccagacgaaccagcagcacggtggtggtgaacacggtggcctctgaaaatccggatgaagccggacgttacagcatggatgttgagcatggtcagtacagcgtcaccctgctggttgaaggttttccgccttcacatgccgggaccattaccgtctatgaaggttccagaccaggtacgctgaatgattttctcggtgccatgacggaagatgatgtcatgccggaggcattgcgtcgttttgaggaaatggtggaagaagcggcacgcaacgctgaagccgcctctcagagcgcagcggcggcaaagaaatccgaaactgcagcggcatcatcgaagaacgcggcgaaaacctcagaaacgaatgcagctaatagtgcacaggcggcagcgacctcaaagactgcatcggcaaactccgcgacagcagccaaaaaatcagaaaccaacgcgaaaaatagcgagacagccgcaaagacgagcgaaaccaacgcaaagtccagccagacggcagcaaaaaccagcgaaacgaatgccaaagccagtgaaactgcggcaaaaaacagccaggttgcagcagcccaaagcgagagcgcggcagccggttctgcgacttcagcagctggatcagcaactgctgcggctaacagccagaaagctgcgaagacgagtgaaactaacgcaaagtccagccagacggcagcgaagaccagcgaaacgaatgccaaagccagcgaaactgcggcgaaaaacagtcaggatgcagcagcccaaagcgagagtgctgcagctggttctgcaagcgcggcggctgcttctgccactgcatcagccaacagtcaaaaagcagcaaaaaccagtgaaaccaatgcaaagacaagcgagactgcagcggcgaactcggcgaaagcatcggcagcaagccagacagcagctaaagcaagtgaagacgcagccagagagtatgcaagtcaggcagcagagccgtataaatatgtcttacagccactgcctgatgtgtggataccgtttaacgattcactggatatgattacgggcttttcgccttcatataaaaaaattgttattggtgatgatgaaataacgatgcctggcgacaaggttgttaagtttaaacgcgcatcaactgccacatatatcaataaatcaggcgtatttagtgttgctaaaattgatgagccacgatttgaaaaagaaggtttattgattgaaggacagcgcactaactattttgttaaatccaatactcccgctgaatggacgagtaccagcaatatcgataaaactaataatggtgttgatgaatttggtttttcatatgccaaaatgcgaacaaaagataatatgacaggacaatcatctgcacttagtctgcatacatgcagtgcatcccgggggattgatgttagtggcgataataagtattgcactgtttcatgcagggttaaagctcctgatggtcttcgttgtcgtttgcgttttgaaaaatacgatgggtcggtttatacatttttaggagatgcttatttaactttcggaactctgataatagaaaaaactggcggggcagccaatagaatagcagctactgcaactaaagatccggttacagggtggattttctatgaggcaactatagaagctgttgaaggtgaaaccttaattggcgcaatgattcagtatgcgccgaaaaaaggtggtataactgaagcgggagattatatttaccttgcaacaccacaatttgaaaacggcggatgtgcttcatcttttgttattacgacaactgcacccgcaacccgctccagtgatatggtgacgatcccaactgaaaataatatctataatagaccgcttacgtgtcttgtcgaggttaatagaaattggggcgatattcctcctaatgtagcaccgcgtatttttgatttttctggtgtgccacctattgagtcaattacatacgcttttaacacaactgagaaatattacggtcagctttatatgcaaacttataaagcgtcgacaagtacttacgtttctagtgtgtttgctggtcgagctgatgttcgaaaattcattggtggttttaatatttattctgatggtactaaacgagtagtttctaacggtgaggctactaaaactatgaaaacggagtggacgggcgtaaaaacacggacctttattcgaattggaggtcaagccacatcgggaactcgtcatctattcggccatttgagaaatcttcgtctctggcataaagaattaactgatgcgcaaatgggggagagtattaaatga

SEQ ID NO: 19531 - DNA, 1542 bp, Escherichia coli
atgaacgcatcgtcatggtccttgcgcaatttgccctggttcagggccacgctggcgcaatggcgttatgcgttacgcaataccattgccatgtgtctggcgctgacggttgcctattatttgaatctggatgaaccctattgggcgatgacctcggctgcggtggttagctttcccaccgttggcggtgtcatcagcaaaagcctcggacgcatcgctggcagtttgctcggagccattgcagcactgcttcttgccggacatacgctcaatgagccgtggttttttctattgagcatgtcggcgtggcttggcttttgtacctgggcctgtgcgcacttcacgaataacgtcgcgtatgcatttcaactggcgggctacacggctgccatcatcgcctttccgatggttaatattactgaggccagccagctgtgggatatcgctcaggcgcgtgtttgcgaggtgatagtcggtattttgtgcggcggcatgatgatgatgatcctgccgagcagttccgatgctacagcccttttaaccgcattgaaaaacatgcacgcccgattactggaacatgccagtttactctggcggcctgaaacaaccgatgccattcgtgcagcacatgaaggggtgattgggcagatactgaccatgaatttgctgcgtatccaggctttctggagccactatcgttttcgccagcaaaacgcacgccttaatgcgctgctccaccagcaattacgtatgaccagtgtcatctccagcctgcgacgtatgttgctcaactggccctcaccgccagatgccacgcgagaaattctcgaacagctgctgacggcgctcgccagttcgcaaacagatgtttacaccgtcgcacgtattatctccccactacgcccgaccaacgtcaccgactaccggcacatcgccttctggcagcgactacgttatttttgccgcctttatctgcaaagtagtcaggaattacatcgtctacaaagcggtgtagatgatcatgccagactcccacggacatccggcctggctcgtcataccgataacgccgaagctatgtggagcgggctgcgtacattttgtacgttgatgatgattggcgcatggagtattgcttcgcaatgggatgccggtgccaatgctttaacgctggcagcaattagctgcgtactctactccgccgtcgcagcaccgtttaagtctttgtcactgctgatgcgcacgctggtgttactttcgctattcagctttgtggtcaaatttggcctgatggtgcagattagcgatctgtggcaatttttactgtttctctttccactgctggcgacaatgcagcttcttaaattgcagatgcccaaatttgccgcactgtgggggcaactgattgtttttatgggttcgtttatcgctgtcactaatcccccggtgtatgattttgctgattttcttaacgataatctggcaaaaattgttggcgtggttagcgttcgccattctgcgtccaggatcggatgctcgtaa

SEQ ID NO: 19532 - DNA, 435 bp, Escherichia coli
ttggaatcgccactaggttctgatctggcacggttggtgcgcatatggcgtgctctgatagaccatcgcctgaaaccgctggagttaacacaaacccattgggttacgttacacaatatccatcagttacctccagaccagtcgcaaattcaactggcaaaagcgattggcatcgagcagccatcactggtccgtacgctggaccaactggaagaaaaagggttaatttcgcgtcaaacttgtgccagcgatcgtcgggctaaacgtattaaactgacggaaaaggcagagccactgatcagcgaaatggaggctgttattaacaaaacccgcgcggaaattttacatggcatctccgcagaggaactggaacaactgattaagctcatcgcaaaacttgagcataatatcattgagttacaggccaaagggtga

SEQ ID NO: 19533 - DNA, 780 bp, Escherichia coli
atgggtgacattatatatttacgcattacaggggagcaacaaggggatatttctgcaggatgcgggacgcaagtctctgtcgggaatcggtatcaacagggacatgaggatgaaatatttgtttttagttttcagggaggagtaagtaacacaggatttggcattaatcatcaagcgatacaattttgtaaaattctcgataaaagctcaccgctgctgatgaattgcattaataataacgaacgatgccgttttgagttttatttttatcgtattaataaatatggaaaatgggaaaggtattattatattgaagtccgtggtgccacgttaactcagaatcagattataataaaagaaaatgaactcgactatcagtatataacaatacactacgaatatatctactgtaagcatcttacagccaatacagaatttagttatttactcacacctgaaaattataatcgccttttcccaccgacgctcttacctgtcgaggaaaaaccagaaataccgcctgaacgagaaattatcctcaccattggcgtattctttgatggcacaggaaacaatttaaccaatacgaatttacgtatgagtttttgccaaccagaaacctatggtctggatgtccaggatttggcctcgtttaataaacaatgtatgagcaagcagggtaaaacgggatccggagtacagagctatttgaattactatacgaatattcattggttgaataagttgtatcatcggcaattagttttagatgatgggtga

SEQ ID NO: 19534 - DNA, 282 bp, Escherichia coli
atgacagaagccgaaatactgggattaatccgccgtgctggtggaatcagccagcagactgacgaacaggccacgcagccggacagcgtgacagccgaaaattatgcgcgtgttgttgctgaggtgatgcgccgtgatggtatccagcttaatgatgtggatatgcgcaacatacggatccgcgttcttgaaatgctggcctaccgtcgccgcgtgcagacgtacagggaaaaagcaaaaattacgtaccactggaagaagccggagcggttacggcggtaa

SEQ ID NO: 19535 - DNA, 423 bp, Escherichia coli
atggcggatctgtacagtcatcgctgggaaatcgaactgggatacagggagataaaacagacgatgcaactgagcaggctgacgctgagaagtaaaaaaccggagcttgtggagcaagagctgtggggtgtcttactggcttataatctggtgagatatcagatgattaaaatggcagaacatctgaaaggttactggccgaatcaactgagtttctcagaatcatgtggaatggtgatgagaatgctgatgacattgcagggcgcttcaccgggacgtataccggagctgatgcgcgatcttgcaagtatgggacaacttgtgaaattaccgacaagaagggaaagggccttcccgagagtggtaaaggagaggccctggaaataccccacagccccgaaaaagagccagtcagttgcttaa

SEQ ID NO: 19536 - DNA, 270 bp, Escherichia coli; identical to SEQ ID NO: 5372

SEQ ID NO: 19537 - DNA, 360 bp, Escherichia coli
atgctcatagatttggttttaccttacccgccgacggtgaacacttactggcgacgccgtggcagcacatattttgtatcaaaagccggggagcgttatcgccgggcagtggcgcttattgttcgccagcagcggctgaaattaagcctgtccggaaggctggcgataaaggtgattgcagagccaccggataagcgccgtcgtgacctggacaatattctgaaagcaccactggatgcactgacacatgcggggttgcttatcgacgacgagcagtttgatgaaatcaatattgtgcgcggactgcctgttcctggtggtcggttggggataaaaatcacagagctggagtgcgcatga

SEQ ID NO: 19538 - DNA, 198 bp, Escherichia coli
atgctaaaacagcaggatatgaccgaaactgccagagtggtgtttaatgaattaagcgtcaccgaaccggcgaccgtcggggaaattgcgcataatacttacctttcacgcgaacgttgccagttaatactgacccagcttgttatggcgggtctggcagattatcagttcggttgttacagacgccttcctcagtga

SEQ ID NO: 19539 - DNA, 183 bp, Escherichia coli
atggaaaacaagaaaaatcatatttatggaattgtaaataatattattgtgatgttatctcccattataataattccgtttgcaattaaaaatgtcggcattgatgaatatggctattttgtacaagttaatataatttattcgtgtttgatatccatattcctgtctcttatacacatctga

SEQ ID NO: 19540 - DNA, 543 bp, Escherichia coli
atgaacgtaattaaaacagaaattccagatgtactgatttttgaaccaaaagtgtttggggatgaacgtggtttttttatggaaagctttaatcaacgacaatttgaagaaattgttggacgcaaaatttcgtttgttcaggataatcattcaaagtcaaaaaaaggtgttttacgtggccttcattatcagttgcctccatttgcacaaggtaaattagttagatgtatcaatggtgaagtatatgatgttgcagttgatctacgacctgaatcaattaattatggtaaatgggtaggcatcattctttctgctgaaaataagaagcagctatggataccagaaggttttgcacatggttttttagttataagcgaatttgctgaatttgcgtacaaaaccacaaattattattcaaaagaaagtgaaagaggcatacgttggaatgatccaacgataaatattcaatggccaaaaatgggacaatatttactttctccgaaagatgcgttagcaccatttatagaattaagaattgattaa

SEQ ID NO: 19541 - DNA, 966 bp, Escherichia coli; identical to SEQ ID NO: 5904

SEQ ID NO: 19542 - DNA, 1020 bp, Escherichia coli
atgagtgtattagtgacaggtggggcaggttatattggtagtcatacagttttgactctcttacaaaaaggaatagatgtcattgtgattgatgatttttctaattctagcttagagtctttggaaagagttaaaaaaattacaaatcgagatattaaagtatataagggggatgtagcagatcttcgtttattgaatcttattttttctaatcatgatattcatacggttattcattttgctggttctaaatctgttggggagtctatatcaaaaccaattcattactataataacaatgttgtagctagccttgttcttattaatgaaatgatgaaaagaggtatttataatttaatttttagctcatctgcaacagtatacggtaactcgaataccatgccagttactgaaaatgcacctattgggatgactacaaatccttatggcacttctaaacttatgattgaaaaaatcttagatgatgttacaagggcaaattcgagctttagagtgacggttttgaggtattttaaccctgtgggtgctcatttctctggagagattggtgaggatccaaatggtattccaaataatcttatgccatatgtttgtcaggtggcaattggtaaatataaacaagtttcagtatatggaagagattacccaacaaaggatggcactggtgtccgtgattttatccatgtaatggatctcgctgaaggtcatgttgctgcgttggaacatagaaacgaaggtcccaatcataaagtttacaacctcggaacaggaaaggggtattctgttttggatcttttgaccacttttgaacgagtaacctttcgatccgtaccttacgttttgagtgaaagacgccctggagatatcgccgaatgttggtctgatccttctaaggcttatagggaacttggatggaaagcgaagcgtgggttggaagaaatggttcgagatgcctggaattggcaacaaaagaatccgaacggttatataaaagcatga

SEQ ID NO: 19543 - DNA, 810 bp, Escherichia coli
atgagcttttccgttttaatgtctttatataatggtgaaagttccgagtatcttaatgattgcttaagtagcattaattcgcaaatattaaaaccgaaccaaattgtaatcgtatatgatggcccagttagaaaagaattggacgatatagttacaagatgggaaaagcaattgccaatacattgtgtaaagctcacttcctgtacaggattaggtaatgcattgaattatggtttgaaattttgtgattacgatattgtctgtcgtatggacactgatgatatatgtagaaatgacagatttttaagacaagttaaaatacttgaaagtgataataatctggctttgattgggtcttatatctcagagtttgactctactccctcaaacagtcatgctgttaggaccgttcccattgagcataatgatatttgtttatatgcaaaaaaaagaaatccgtttaaccatatgactgtagcatttagaaaaagtgtagtaacttctctcggtgggtataaggatgaatatttatatgaagactacgcactgtggattaagatgcttaaaaatggatttttgactaaaaatattccagaggcgctagtttatgcgcgggttggtaataatatggagcttaaacgcggtgggtggaaatattttacatcagaagttaaggctcaatatggcttctataaaattggttttcttaataaacaggaaatgattattaatattgttttgagagcaccggttcgtttaatgcctaactttatgagaaagattatttatagaaatttacttagaaactga

SEQ ID NO: 19544 - DNA, 1062 bp, Escherichia coli
atgaaaatagcgtatgttgtgtcttctaagaaaaaatgtggcccaaatattgtcatattgaacattgttaaagaattggctaataaacatgaaatggaaatatttttccttgatgagtctgatgatgatgtatttgaatgtgtgaacgtaaagtctacacaaataaaaaaagcttctgatttgaaggaacatctaaaaaggttcgatataattcattctagtggaatacgtcccgatgcattggttgttttatgcaaagttatttatcgtgtgaaatgtaaaataattacaacaatacataactatgtatttcaagacctttattactcatatggtttggttaaatccttaatttggggcttactttggtgttctatctggctatttttcgataaattagtaattctttcaaaaaatgccgataattattactggtttctcccgtctgcaaaaaaaaatatcatttataatgggatagatgatgatgattgccttcaaaataaaaaatgtaattatcgtaaggaatttaatattcctgatgatgggatattagcaggctcttgtgctaatttaaccaagcgtaaagggatcgatcttgttattcagaccttaactaaagaacataaaatttactatatagttgccggtgatggtattgaaaaacataatcttattaatcttgtaaaagcacgtaagctgcatgaaagagtgtattttatcgattttcttgatgaaccagaaagttttatgtcccagttggatgtttttttgatgccatccagaagtgaaggatttggacttactgttttggaatcaactaagttaggtatacctgtaataacgtctaatattccaatatttatggagttatttgatcaaatgtgtctcacatttgatattaaaaatccatctacattaatcgatgtaataacctacgcaaaaaaaaatagattgcatctttcgcaaaaattccatgctatatttcaagataggtttacttcttcaaagatggctacaaaatacgaaaacgtctataataatttatttagagaggttttatga

SEQ ID NO: 19545 - DNA, 648 bp, Escherichia coli
atggaataccggacctggatcaccgaagctttacgtcttcactttgaagaacatttaccacggattgtggccggacgtcgcctgggcgtaccaaaatcaacagtttgtggtatgttcgtgcgcttccgcaaagctggcctttcatggcctctgtccgcaggtatgtcggagcgggaacttgatgcccgtctttacgggagtgcctccacagtacctgtcgtacttactgaaaacaccgttatgtccgaagtcccggtggtaaaaaaacgtccccggcggcctaattttccttatgagtttaaaatcgccttagtagagcagtcactgcagcccggagcctgtgtggcgcagatcgcccgtgaaaacggaatcaacgataacctgctcttcaactggcgccatcaataccggaaaggtggcctgctgccttccggaaaaaatatgcctgcactgcttcccgtgacgttaacgccggagccggataataaaatcccggctccggcacaggaaccagagcagataaatacaccgtccgacagtctgtgctgtgagctggttctgccagctggaactctcaggctgaaaggtgaactgacaccggcgttattacagacacttatccgcgaaatgaaagggagcagccactga

SEQ ID NO: 19546 - DNA, 291 bp, Escherichia coli
atggtcaaaaatatgtcgaccattgtgctgattattatgaagagcgttaccgtagtcacgtactcaatggacttaaacaaagagcaacatcactgggttattctctccagcaagaccctgaattatgagtgtgaaccaggagtttctcaggaagtctaccgcgctcttgatgtcagattcctgaacagtctcgataatcggaaaactcagagcacattatcctgtgttcacactctgccatgtgttcggggttcatcgctgcagctacagatattggaaaacccgtcctga

SEQ ID NO: 19547 - DNA, 186 bp, Escherichia coli
atgatgacagtgattacctcgcctacactgcctgccacgaaagataacacgctttcgcagcccgcccaggaaagaaaaaaactgattaccgtgctgggcttcggtctatcaggcaccaccattgagttctacgatttctttatttacggcacggcggcggcgagtggtgtggggcgacgacgttga

SEQ ID NO: 19548 - DNA, 1608 bp, Escherichia coli
atgaacgcagaggcttacattggcgtagacgttggttccggtagcgtccgggccgggatctttaccgcggcgggtcagcggctggcctttaccgttaaacctgtcagccagtttcatgatgccggtgattgcattgagcagtcatcgacagagatctggcaggcggtctgcgctgcggtaagcgaaagcgtccaagcggcggggatcgacccggcgcagatccgagggatcggcttcgatgccacctgctcgctggtggccgttcgcgccgatggcaccggtatttccgtctcccctgccggtcagccggagcgtgacatcatcatgtggcgcgatcaccgcgcacaggaagaaacacgtgaaatcaacgccacgggagacgacgcattacgctacgttggcggtgaagtcagcgtggaaatgcagctaccgaagatcctttggcttaagcgccatttgccggatcgctacgcgcagatctggcggttgttcgatctggcggattatctagtgtggcgcgcctgcggcaacgaggtcgccagtacctgcaccttgacttgtaaatggaactacctggcccacgaacagcgttttagccagtcgctgctgcgatctatcgggctggaagaggtggtgggaaaaatccccgccacggtgcgcgatcccggtgaaaaagccggaacgttgcgcccggaactcgcccgcgtatggggattgcctgaggacgtggcggtggcgaccggtatcattgatgcccatgcaggcggattatcgttgagcggcgcccggccgcagggcagtctcgctattatcagcggcacctccaactgccatatgatcgtcagccaacaacccgtgctgatcccgggcgtctggggtccttactggggtgcgatgctgccgcagttgtggctgaatgaaggcggtcagagcgcggcgggcgcgctggtggaatggacgctgcgccagcatgcgtcctgggccacgctccagcaggagtcggactccacgggtgtgtcgccctatcaattattgaatcagcaggtggaacagctggaggcggtggaacgctggccgacgcgccacctgcatgtgcttgacgaccaccacggcaaccgctctccccgcgccaacccgctggcacgcggtgcggtgtacggactcacccttgaagagggcgtcagcggcctggcgcggctctatctcgccacgctacaggccattgcatacggcactcgccacatcatcgaggccatgcgcgccgccgggcacgacgtgtcgcggatcatgatgtgcggaggggcgaccaaaaatccgctgtggctgcgggaatacgctaatgccaccggctgcgatattcatcttgcccgggaagaagatgccgtcaccctcggcgccgcgctgcttggcagcgtagcctgcggtggtttcgcgtcgctgaccgatgccgtcgctgccatgagccgccacggccacaccatcactgccgatcgctctccatcaacccaggccttccatcgggctaaataccaggtctatctgcaaatgtacgacgacctgcaacgggcggaagcgcggttcaacaccactatgaacactacacaatga

SEQ ID NO: 19549 - DNA, 1656 bp, Escherichia coli
atgccgatgttgaatttaaccctgcccgtggaagatgcccccctcacgccacagcctggcgaagtgctgatggtgaccaacgcggatttacgcgaaccggcgaacgtcacctgctggccgacgcaaaaatcatttgaacagcgcctggaagcagcgctggaaaaactgggctatcgcatgcgacgcgcccatccggtgaatgaaagccgcggtcacggctttatcagtagccagaaagaaggcagcgatctgttcgcaaccctcgacccggacgcccctgtgatcgtgctgttgaccgcgtggcaatactcccaccatatcgctccgtcgctggtgcaccatcgcgggccgatcctgttgctcgccaacttcgacggcacctggccgggcttggtggggatgttgtgcatggcgggctgcctgaccagccttgagcgcaactactcccgcctgtggtcggaaacctttgaagacgacgcgtttatgcgcgggctcgatacttggctgcgcgacggtcatcttagccacaaactcagctatctgcatccggtgcccgcgagcgcgccgctgttggcaagcgaaaccgggcaaatcggcgtgaaggtcggtcaatcgatcctcaaacataaagcaatcgtcggcctgttcgacaccttctgtatggggatgatcaacggcgtcttcccgcaaaaagcgatgattgacgtcggcatcccggtggagtcgttgtcgcagtcggcgctgctggtcgagatgaacaaggtgccgcaggcgctgcgcgaagcctgcctggattggtatgaaacccgtgggatgcgcttcaacttcggcacccacagcgccgaagaactgacccgcgagcaggtgctggagcaatgcgcaatgatgattgccatggcgcgcttcgtgaagcgcttcggactgtcggcgataggcgtccagtatcaacaggggctgaaagacagctgcgctgcgtccgatttcgccgaaggcgcgattggaaacagcgagcgcttccctatcccggatgaacagggcgagattatctgcccggatgcgccgatcccgtgcattaacgaagtggacatgggcagtgctattccgcaggtgatgatggcgaaactgctgggggcgctgggccttgagtccgaaaccacgctgcacgatatccgctggggcagcgagtacaacggcacgttttactgggatctggaaatctccggcgcggtcccgttcgcccatctcaaaggcggcattgccggtgccaccggctaccgtcagccgccgatgttcttcccgtacggcggttctactatcacaggccagggcaaggccggacgctttatctgggcgcgcgcccattatgagggcactcaggtcattatgcatatcggcaccggtaccgccgtcgagctgccggaagcagagttcgaacgtcgccgcaaagccaccaactatgaatggccgctgttgaacgctgtgctcgatggagtcacccgcgatgacctgatggcagggcaccagagtaatcacctgagtctggcctacgtcgatgaggcgctgctggctggcgtacttacagcctttgtcgcccaggcgctgacgcagaacatccgagtttatctcgcaggagaggcccattcgctcgtgcaataa

SEQ ID NO: 19550 - DNA, 1455 bp, Escherichia coli
atgtatcagcagcaacaccttgaatttattatccagaaggcaaaaaaacgcctcgattcccaggaagcgccgggctgcaccaaagcaggctggctgatgattaccgccttacttattgagtcatgggatatctattccatggcctttattctgttcgccctgaaagacatttatgagccgagtgcctggctgctcggttttaccgccgcgggtacgcaactgggcgcggtgatcggcgccctgctcggcggctggctgaccgacaaactcggtcgccgcaaaattttcctgtggtcgatgatcctgtttgccattttcgcactcctgcaggggctggcaccggatatgtactggctggcgattatccgctgcctcgccgggatcccagtgggtgccgacgtcgcgaacggctttacttacatcatggaagtgatgccgaaaggcaagcgcgaggtcatggctaaccgctggcagtttatgttcgcgctggggattatcgtcgcgattctgctggtcaccggcctagtggcgcttgacgttcacccagacatgatctggcggatcgttctggcagtcccggcgattccggcatgtatgctgttgtttatgcgccgtgaattgccggaaaccccggcgtggtttgtggagcgtggtcgctttattgaggctaaacaggcgtcccgcgaatactacggcgagcaggacggcaagctgctggacgatattctgcccaacgagaatgtccagatccctcacccgacgcttaaagagacgctgcacgacctattccgccgtccgttcacccgccgcacgaccctgttcggctggttctcctgcgcggtgcagtcgtttgaaaactatgcattttcattctatctgccgctgatcctcgtcaccatcggtatctcaggccagatccagaacaacctcgctctgctggtggtgaactgtatcgccgcgctgtcggctttcgtcggcccgctgctgttaccgaagctggggcacaagggattgagtaaatggggtttcctgctggtggccatagggatatccatttcgtcgtggggcgtctactccagcagtttcgggtttatcaccttcggcgcggcgctgatgctgtggggccactactgggattctgaaagcgggatgactgtcatttcgctggtagcgaaaccgcgttatcgcggtgtggtttccggtatcggttacaccatcgtgaaagtcaccgcattcattaccacgctggtgttcccgccgctgtttgaaaagctcggagtaccgctggcgtcgctgatcattgctatcgcgccgttctgtgccttcctagcgtcgattttcctgctgccggaagtgttcggtcatgccgtgggcgatgagcacgatcagccgtatacggagaactccgacgccgcgctaccgggtcagcaatcttctgtttctcccaaaaactaa

SEQ ID NO: 19551 - DNA, 1104 bp, Escherichia coli
atgaacagcaccaaaatgcccgttattgaaaatattgaactgatgaccgcccgcgttccgttgccggaaggcccgtggggcgaccagatccaccacgttaccgatattgaagtggcgattgtcgatgtgtacggctctaacggccaaatcgggaccgggtttagccatacttccggctggtgcgggaaaaccatctcggcgctgattgctgaaattattccggacgttatcgggcagccgctgtcgccgcgcgggctgtggcaccgctcgtataaatatatccacgacgtcggcggcgcgggcgtgacgacacatgcgctcgccgcactggatatcgcgtactgggacctgctcggcaaaaccctcaacgcgccgattgtcgacatcatcggtaaagtgcgcgaccgcgttccgctgtacggcagcggcatcaacctgcatctgtccattgaggaagtgatcgaccaggtcaagcgctggaaaagcatcggctatcaggcggcgaaagtgaaagtgggcaaaccgacgctggaagaggacgtggagcggctgcgtaagattcaggaggcggtgcaaggcttcccgctggcggtggacgccaaccaaggctggaacttcccgcaggcactgcgcgcgttcaagctgttcgaaccgcttaacctgctgtggattgaagaaccgctgccttccgacgacatcaccggccacatgaaactgcgcgaacgcagtacaacgccgatcgccctgggtgaaaacgtctataacttaaaccagttcacgcaatatattgagagtggctgtgcagattatgtgcaagcggatctgggacgcgtgggtggtattaccggctatctcgatatcgccgccgtcgcacgcgctcataacctgccgatgaccccgcactttgtcatggagctcagcgccagcctgctggctaccgtaccgaatatctcgtatgccgaaatgaccgacggcgggcgctggaaagatctgcgcatcatcgccgaggccggtgttgagaaagacggctactacataccgagcgaccgaccgggccacggcattattctcgatcgtgactacctcgccgcacacaaaatctaa

SEQ ID NO: 19552 - DNA, 828 bp, Escherichia coli
atggaagacagcttattctcggtaaaagacaagatcatcattgtgactggcggcctggggcaactgggcgctcagtacgtgaaaacgctgcacgagcgcggcgcgaaggtggcggcgctggcgacgcatgttgacgcggcgcgtgtggaccgcgtactgggagcgattaaagattccgaccgtctgctatgcgcggaagtaaacattaccgacaaagccagcatcaatcaggtactggataaaattgaagccaaatggggcgtaccggacggtctggtgaacaacgcgggcgttgatacccagccgagtgcgccgccggaagtttccggtccgttcgaagatttccctgaagaggtgttccgtgaggtggtggaagtgaacctggtgggtactttcctgatgacccagcaggtgggcaagcggatgcgcctagccggcaaaggcggctcgatcattaacgtcggctcgatttatggcgtggtttcgccagtacaggatatctacagctacaaaaaagaggacaccggcatcccgtttgtgaagccggttgcctacgcggcggccaagtccgggctgtataacttcacccgctattgcgccacctactggggccgcgacggcattcgcgttaatacactgacgctttccggcgtggagcgtagcgaccaggacccacgttttcagaagaactacaccaaccgcattccaattggccgcatggcgcaaccacatgagtacaacggcgcggtggtgttcctgctctctgacgcttccgtgtatatgaccggctccaccgtcaccgtggatggaggctggaccgcatggtaa

SEQ ID NO: 19553 - DNA, 906 bp, Escherichia coli
atggtaaacgaaaaatggtcggcgtttcgcggcattatttccgcggtagtcacgccgatgcacgcggatgaatccgttaactacgcggcgctggagactctggcgcacgcccagctggcacgtggcgtggaaggcttttactgctgtggctcctccggggaggggccgctgttgcgcttcgacgaacgtaagcaggtgctggcgacgttggtcaacgcggcgcaaggaaaggtgccggtgattgcccacgtcggcacaccgcgtactcaggatgccgtggagctggcgaaaagcgccgagcaggatggggcgagcgcggtttcgctggtgccgccctattactataaatacagccgcgaggagattatcgcttactaccgccgggtactggacgccatctcgatcccggtgattttgtataacatcccgcaatttaccggtgtggagctggacagcctgagcgccgaagcgctgctgggcgacgagcaggtgctgggggtgaagcacacctctcataacctgtattcactggaacgcatgatcgctcgttatcccgataaagtgttctttaacggctttgatgaaatcttcctgtccagcctcgccgccggggccacagccaccgttggtaccacggtgaacctgcaaccggagctgttcctagcgctgcgtaccgcattacggcaaggcgacattcccaaagcgcagcgtttgcagcagcagattaacgaggtggtggaaaacctggtggcgcgtggcgtgttccagtcggcgaagtatctggcgggcaaaggcgtggtggacaccgggccgacccgcgagccgtttgtggcgctgacggcaacccagcgggaagatctggacgcactgcatcagcgtttgcaggggtatatcgctgatgtctga

SEQ ID NO: 19554 - DNA, 429 bp, Escherichia coli
atgtctgacaacgcgctctgtacgccaccgcgactgaacgacagcgcgatctgcctgcggctggcgcagtttttacaggagacggaagcggccccgcagagcacgggcctggcgattgcggtggtcggtatcgacggtgagctgatcgctttcggcgctcatgcccgctgtccagctctgccccggcaactggcacaacgcaaagcctggagcgcattgcgctttcgccgcccaacggcgcgactggcggaagaagtatgtcagggaaccctaacgctggacatctttgacgataaacggttgctggcgatgcccggtggcgcaccagtactggtggaagggatggcgattggcggtgtaggcatcagcggattgccgccggaacgggacgcggagctggctgaacattttgtgcagcttctgctttaa

SEQ ID NO: 19555 - DNA, 1029 bp, Escherichia coli
atggataacgaagaggttatggccaaaaccgttgagcaagtcgctaaggcgctggatatctccatcaccactgtgcgcctagtcctgggcggcaaagcggaacagtaccgcatcagcgccaaaacgcagcagcgcattaatgattatatcgccgagaatggactggtcgttaaccacattgcccgcagcttaaaactcaataaaaccgaaaccttagggctggtgataccgcgcctgtcgaacctgtttttctccaccttggcagagaaactggagtcctgctgccgccaggccggctatcagttgatgatcgcctgcacctacagcgacagcgagcacgaaaacagtctggtggaagggttgctggcacgcaatgtcgacgggatgttcgtggtgccctcaacccgcgaaacccagttacatcatcagaaggtggcgcgcaaacgcccgttggtgatcctcgaccgtgatttcggcgagagcgacaccacgctggtggtgagtgataactacaacggcagcagaaaactggtacaggccatgacgcaagcgctggacgtctcgccgctgttctttatcgcgggggatacccaacagccttccatccagcaccgtttacagggctatcttagcgaattacccgtgggaaaagactgggtgctgtccgccagccataaccgccaggaggagggtaaacagttaatgctcgacttcctcaggcagaaccgcgagccgccgcaggcctttatctcatcgtcgttacccatcctggaagggacgctcagcgcactgcgggaaacctacggttttatcccctcggatatctcaatcggcaccttcgatgaacatcaaatgctgggatttctgcccaatgcggtttggtcgatgcgccaggacgaagacgcttgggcgcagcatgcgtttcggctgatgcagcaaaagctgcaaggggaaaacagcgacgtcaaaattaccgtgccgatgacgctgattcagcgtccgctgtcggtggaaaaacgtaagggataa

SEQ ID NO: 19556 - DNA, 552 bp, Escherichia coli
atgtactgttccactgttgaagccgccggtggtcaccgcccagtgcagtgcctcacgatcacagcagtccagcgcgaatgtgacacgcagtctctctccgttatcacagcggaactcgaccccgtcagagcaccatcgctgattactttctttcacggccactctgccggtatgtgcctgtttcgatggcggtacagcgggttttcgctcaagcaacagcgcattctggcgcatgttccggtaaacacgtttggcattgatcgcagacataccatcaagttctgcctgtctgcgaagcagcgcccatacccgacgataaccatacgtgggcaactctccgatgatatgatgtatccggagaagcacatccgtatcatcagtgtgaagactgcggcggccatccttccagtcatcacttcgtctgagaatgatgtgcaactgctcatgcgacacccggcgacaacgactgacgacgtttactcctcatccccgggcaataaggggcgtgcgctatccacttttttgcccgtccatattcgacggcttctttaa

SEQ ID NO: 19557 - DNA, 519 bp, Escherichia coli
atgcagcagcgaatagagggagcgtgggggcagcaggatgaaatgtgttgtgatgccggtacgctggcattgtgcaaaatgccgacgctactattgtggaaatcagccctgtccctggtgctggcgatactccctgcagacattctccggtcagccaataggttgttgctctttcctgatcgattcgtcattccattctttttgtttataatgggcattacattggtgttggcgtgtttacctgcgtgtctgcaccggttcagtaaaattagaaaagttcagagtcggggaaaatccggcgttttgttcagcaggcggtggatcactggccaaatctgttggcatttcacttcacgttccattcaacagaaggaaacatctacgggcaacagattcatgcattctgcacttccttttaccaacagatacacaaacgtattactgcacgtactcacacgaccagtccatcatcgccgttggtgttacactggctgctggaacaacatggaggagcagtaa

SEQ ID NO: 19558 - DNA, 204 bp, Escherichia coli
atggtcgccacttctgacccggaccatgctcctgatatgtcggaatataatgtgatgttaggcatcagagaggaatatttcgatgcccctaatctggggcgtttgattctggatgtctggagcaatccgggctttgtgtcaccggacgaatcaaagcagtaccacccgggatgtggcgctggatcgtcattcaccggactgtga

SEQ ID NO: 19559 - DNA, 600 bp, Escherichia coli
atgaagacttacaacaccaatcccggttacgaaatggatccccagctcctgacacactttaaccagcatctggattcattattcggggtatattcgaaactgttaccgttcagaatggattttgcttaccgaaaaaacaccctcagctacagatgtgcctgcaggtacgccatgtgcgcggagatactgcgactgattaacgaagtgggagagaaactggtcgggtatgcctgggtaatggaatatacggaacgtaaagggcttcacattcattttgtgggctatctgaacggtcagagccacaggagttcgtatctggtatccagattgatgggagatatctggaggcgggttaccgggggggatggttactaccactggtgccggtttaataaaaattatccggtaaacattaaccacgtcattcactattcagatcacaaagcggtgaatgccttacgctatgccctcagctacctggccaaacgagaacagaaagaatgtggcatcatcctgaaatgcagcgggcttcctgaaaaaagtaaccggggtcgaccgcgactgggcagcaccctgccggagacttattctctggtgtaa

SEQ ID NO: 19560 - DNA, 792 bp, Escherichia coli; identical to SEQ ID NO: 9021

SEQ ID NO: 19561 - DNA, 1026 bp, Escherichia coli
atgaaagtcaaagctgtgtacatcaataaacctggtgaaattgctacccgtctggtcgattatccagtaagaaaagataatgaagttttaattaaagtggatgcagcgggaatttgtggttctgacatcggtgcatttcgtggtactaacccactggtaacttatccgagaattattggacatgaagtcaccgggattgttctggaaaccggtgagggggtaccacaaaatatcaaacagggcgaccgggttattgtagatccctatgtttattgcggtcactgttatccatgttctgtaggtagaactaattgctgcgagaacttaaaagtcatcggcgtacatattgatggcgctatgcaagaagtggtttcgcatccggctcacttaattcacaaaattcctgacaatgtaccgtcagagatggcgccactggctgaacccttaactattgccctacacgcattacatcgagcgcaattgaaagcaggtgaacatgtcgtcattattggtgcaggcgctattggacttatggcggccctgagttcgttgaactataaagcaactcccattctggttgatattgtcgatgaacggttgcaatacgcgaaatcgctcggcgtaccttatgtagtaaactccgcaaaagctaatgttattgaggcagtgaaagatattacacaagggacgatggctcaggttgtggtggaagcctctggtgcaaatagcgcaatcagaagtaccctggatctggcctcatttgcagggcgtatagcctatactggttggccaaagcaggaaacatcgttaccaactaatctaattacctttaaagaactagatttacgtggttcccgtaccagtgccggtgaatttgaagaagccctgcaaatgttatcaacgctgaatattaatccggctgatatcgtgagcaaagtcgtgacaatagatgaagttcctgaggctgtaaaagagttagatcaatttccggaacgctatctgaaaattaacgtgaaattcatttaa

SEQ ID NO: 19562 - DNA, 1290 bp, Escherichia coli
atgaaaagaaaaaccatggggtggattatcgtttttcttctgtttatagtttacatgctgaactatatggatcgttctgcattatcgattacggccccacttatcgaaaaagagttaggctttaatgctgctgaaatggggatgattttcagcgcatttttcgttggttatgctttatttaacttcattggcggttgggccagtgacaaagttggacccaaaacagtatttttggttgctgcactgttgtggtctgttttttgtggtatgaccggtctggtcaccggattatggacaatgcttgccgtacgtgttttatttggtatggcagagggcccggttagtgcagcaggaaataaaattattaataactggatctcgcgtaaagagtcggcaacagctatcggtatttttagtgctggttcaccacttggcggcgctatttctggtccggtcgttggcttgctggcaatatcacttggctggcgtccggcgtttgggatcatatttatatttggcctagtttgggtattactgtggtacttctttgtcagtgataaaccgtcaaaaagtaaacgtctggcagcggaagaacgtgtcgatttcgaaaaccatgacgatattattctagccgaagatggtaaaggtacaccttcgcttggttattacatgaagcagccgatggtatgggcgaccacgctggcattttttagctataactatattctatttttctttcttacttggtttccaagctatttgaatcattcattacacattgatattaaagaaattagtattgcaactgttatcccgtggtttattggggcaattggcatggtgttaggtggcgtctgctctgactttatttatcgtattacgggaaatgccttactttctcgccgtttaattctcggcagttgccttgcgggggccgcggtttgtgtcgctgtttccggaactgttacctctattggtagtgcgattacgctgatgtctgtttccttattcctgctttatctaactggacctatttattgggctgttattcaggatgtagtgcataaagataaagtaggtagcgtaggcggtgcgatgcacggtctggcaaatatttccggcattattggtccattggtaaccggttttattgtccagttcagtggtaaatatgattacgcattctatcttgcaggtgccatagcaatcatttcaagtctgctggtattcatttttgttaaaaataaaggattgaaagtcaatgaaagtcaaagctgtgtacatcaataa

SEQ ID NO: 19563 - DNA, 159 bp, Escherichia coli
atgaaacaaatccccacatgcgctgaagcaaaagcccacgccaaatacctttcacggtcgctcaatatcaatctaagctacgcccgggatgcagtggcattacgttataactaccataactggtcggaactcagcacagtatttggtcagcttagctga

SEQ ID NO: 19564 - DNA, 1317 bp, Escherichia coli
atgtctgtaacacgtataagagtgaaagagcgcgacgctattattcagtcacttaagtcgggagtaacgccaaggataggtattcagcatatccaggttggccgcgtgaatgagataaccgccctccatcaggatattgaacggattgctgatggcggggcaagcttcagacttatcattggtgagtatggttccggcaaaacgttctttttaagtgttgtacggtctattgcgttagagaaaaagctggtcacggtcagtgcagacctttctcccgacagacgtattcactcatcgggaggtcaggctcgtaatctctactcagagcttatgaaaaatatgtccaccagaaacaaaccagatggcaatgcattacttagcgttgtggaaaggtttgttactgaggcaaggaaggaagctgatgcgaacggctcccaggtctcatccgttattcataaacgccttgctgctttgtcagatatggtgggtggatatgactttgcgaaggtcattgacgcattctggcgcgggcatgagcaggataacgaaaccttaaaatccaatgctattcgctggttgcggggcgagtacaccacaaaaactgatgcccgtaatgatcttgacgtccgaacgattatctcagacgcctcgttctatgactctttgaagttgatgagcctttttgtccgtcaggcaggctatgccggacttttagttagcctcgacgagatggtgaacctcttcaagttgaataatacgcaagcgagaacggccaactacgaacaaattttgcggatcctgaatgactgcctgcaaggctccgccgaaaatattggttttatcctcggggggacgccagagtttcttttcgatccacgtaaggggctctacagctatgaagcgctccagtcgcgtctggcagaaaatcgattcgcacagaaagctggcgtgattgactactcgtctcccacgctacatcttgccagcctcactcctgaggaactgtatattttactgaaaaatcttcgtcatgtttatgctggtggagatcccgcaaattatctggtgccagatgaggctctgaccgggtttctgcatcactgcagcaaaaccatcggagatgcttactttcgaactccccgcaataccataaaaggttttctggatatgctggctgtgctggaacaaaacagaacgatgaactggcaagctctcattgagggggtggcgattgaagaagacaagcccagcgatatgggggatgccattgtggaggaaagtgatgacgatgatggcctggcgaatttcagactatga

SEQ ID NO: 19565 - DNA, 2199 bp, Escherichia coli
atgagcagtgcctacaatagtctcgatccccgtgtccgtaagtggatttataagcagggctggtcatcattaaggcccttgcaggagagctctattccggcaattttagcccgtgatcgtgatgtactaattagtgcaggtacagctgcgggtaaaacagaggctttctttcttcctgcctgttcagcgattgcagatctcactggtggatttggcattatctatatctgtccgttgaaggcattgattaacgatcagcaccgtcgtcttgagagcctgggggaagccctggaaatgcaagtgacgccctggcacggggatgtaccacaaagcaaaaagaagaaagcacggacaagcccgtcaggtatcttacttatcacacctgaatcacttgagtctttgctcataaactcattgggttggctcaaacaggcgttttcttcagtggcatacattgttattgatgagttccacgcttttattggctcagagcgtggtatacaactgctttcgctgcttaacagaattgaccatgtgctgggacgccagttaaatccagttccccgtgtcgcgttgagtgccactctgggagagctggaaaaagtgccagaattattgcgtccggataagagattaccttgtgaaacggtaacagacagtaatagcaccgctacactacaagttcaggttaaaggttatcttgagcgggtgcccgaaaaaggggaagagctccagagctctgctgaacagctcgtctgcgcggatattttcaggctctgtcgtggcgattcccacctggtctttgctaacagtcgaaagcgtactgaaagcatagcggcaatactgagcgacatgtgtgaagcaaatgtcgttcctaatgaattctttcctcatcatggctcccttgccagggagttacgtgaggcgcttgaagtccgactgcagaaagggaatttgcccacaaccgctgtttgtacaatgacgctggagctgggtattgatattggtaaggtgcagtctgtcatacaagtgacacctccgcattctgtttccagtctgcgtcaacgcatgggacgttcagggcggcgcgattccccatcggtgctgagaatgttaattactgaacctgaacttaccgcaaccagcagcattgtggatcatttacggctgcagttggttcaggcgatggcaatgatcaggttgatgatctctaagcgctggttcgagcctgcagatatccggcagaaacattactccacactactacaccagatcctagctattactgcgcaatggggaggtgttcgtgccgatcaactctggtcacaactttgccagacaggtccgttccggaatgtggatataaatgactttaaaagtctgcttaaacatatggggacatgtggcctgctcagtcaactagccagcggtgaaatagttgtcggggctgagggggagaagctgactaatcactacacgttttatgccgtattcaatacacctgaggagtttcgcattgtaacgggaaaccgaactcttggcacagtgcctgtagactccccacttttgccggagcagcacatcatcttcggcggacggcgctggaaagtgacagagatcgaggttgaaaaaaaggttatctatgttgaggcgactaaaggcggtcagccaccactattcagtggtagcgggatgtctgttcatgatgttgttcgccaggagatgctcgctatctacagggaaaatgattaccgtatcgcggtaggcaacaagagagtcgattatgctgatgccgcagccagaagcctctttgcggaaggaagtgacaacttccaacgctacaatctacacaatgactgttttattgccagtggtcagaactgctacgtgatcccgtggatgggggataaaattgtcaatacaattacgtccctgcttatacgttgtggctttaaagccagttcatttgcaggtgtgatagaggtagaggactcaggcgttgcctctgtccagcgtgtacttaagaaaatgctattgtcggggttaccttcagagtttgagcttgctgcagttgttcctgacaagtatctggataaatatgacgagtatttaccagagactttgcttgctaaagggtatggggcacaggcgtatgatatagaaggaacgtgcacctggctgcagaaacaccttcagtag

SEQ ID NO: 19566 - DNA, 1017 bp, Escherichia coli
atgagcagtgtaaggacagacaagttcattaggtatggttttgcggttgtggcgatagttgccatactcattactactatcacaacccccaatcccacaccttatcaatatatagtttaccgaatagttctggctctggctgccggatgtattggtgcagttctgcctggtttccttgaagtaaaatttaatgggtggttaagagcatctggcgcagtggcgatcttcgctatagtgtttttcataagcccagatttgcttcaacaaaatcctgaatctgcaagtaaacctgtaccgcctactgtgattgatgcatatgccgttaatacttccaatcgcgacagatacctcgaattatttcgaacaggacagttcggtcagcgggacaagctgcgcatcggttgtgttgagtggagtgaatcatcgtgcgtggctgctggtaattttttgcgattgttaagcgaagctggctgggaaatcgattctgacgctgtattcagaatgcaaccatccgtgccagttgagggggtatcgattgtaagccgtggcgatgatctggtcggtttgccaaaagtaccaccccacatgggccgttggagtcgatcagacattagttatgaaattttgacagcggcatttaaattgatgggagttccggtttatttttccagtgacccgacattacaaccaggtactaccggagtgtactttggaccgaaaccgaaactggatgcaccagtcatgcaaaaagacgagaatgtgcgacgtgagcttctccgctacgtcggtttgggaatgactattcagcgagcctgctctcagcagcccgtcgaactttgtgggggtgaaatcttttcttgggaaacgtcggtatcttcgttcctaaggcagcagagattcaactccgatgccgtaaacagatggcttgccttgccgcaggttaatgcggcttcggcaactgcagacatgaaaataaagctagatttgttaatgtcatttgttctgggcatcgagtaa

SEQ ID NO: 19567 - DNA, 2361 bp, Escherichia coli
atgaaaagtatgcaatcaaaaacgggctctccactcgttcgaactgaagccgagctagaaagccggcttacttcagcactaaacatagcatttcctaacattcctcgcgaagatcttatcgaacagcgccattttaccgttcggctaggccatggaacttacaaaatagatagcgccgcacactggaaaaaatacgggcgagcggatgttttgatctttcatcgggagagaccacttgcggttattgaactgaaacgtgaagacctgacactgacccatgatgattatgaacaggctcaaagctacgctaaccagttaacaccacgtccgcctctcgttgtagttacgaacggtaaagatacgcgcgtttatgactcaagtaatggacaacagtggtcgggtggacaggatgcctcggcagcggtaaacaagatgctcgccaattctgcaaagttggcggcggctgacatgcgctgggctattgaagccttgatggggcgagaaactaatgcttgggtgccagctgtgcgagaagaaacagcccggctgctgattgatataactgatcagcctgggcattcagaacatccatttgccaacaacctactttttcctcgcaaaatcacgtctcttgtaattgaatctgctgtgatgggtacagctttcactatcattgagggtgatgcacaaagcggaaaaagcagttgcctccgtgaaatttcgctaaaaacggaaagtagcgatcttttggctgtcctgatattacgaggttccggaccaggactatttcaggctctggccaatctttttgcagctgaatttgaatggaatttaacctcaaatgatgcacgtaactggttaagacgaatgtctaactgcactgaaggtccatcgcttatgcttgctatcgacgacgttgaaccaggctcccaaatggctactgatcttgaggaacttgcgggtatacgttttggcaacaggctggtggttgttctgacgacctatcatgccaacgcgttactgaaaaatccaaacggacgaactccgtctgcaattggtagccggtcgaaggtatttaaaacatcgcctatgtccctagatgaatttaagctggcgcaacagattctctcggaccagcggatagtttttcaacagggagcagaatacgccgatgactaccgctcgccttgggttcttcgcactatttatgatgacattgtgcgcaatcatcaataccagaaaacggatcttatcgcctatcttcctccatcacccggtatggaacttatagatgctgcgcaaaagagctatgagagtcagtatgatcttcttcgttattatcgggttcttgcacgctgcgcactagctgacacaaactcccactcagtagaattaatgtttgctaaagcgaatggatttgtcgtgcggtatgacgcactttctgacgaagctcgtggtgtagtgaatgagttaaaacatatgggggcagttcgtatttttcgcctttcaggatgggaagatgttgtggtgccgacagttcccgcagcttaccttctggaactgtcggatgctgtttgtgatgaactggttttacgggcagaacaagaccctcaagacgccggggcttggcttggcgaacggctagacgccacttatcttggagatatgatcggtgctcaagccatacgccgtatggcagctaaagagagatatttcagctttggaattattcagggccttctcagcattgagccatataaagaacctataaaaaacggattgtttactttagccatgccagacaaccaacaagtcaatctaaagattgaggatggattagcgtggatttctaaacacggggatgatgcaaagagtgttctggtgaatttagaggatcaaatcccaaaggtcatttctaaatcaaccagttggatgatactcgggcaactagcgaaactgccgtcagcagaggtgggtgacgatgatcagcgtatagacgcctatattttactgagcattgggcgctgcccatttcctctaattcgcacgaatatagaaggattgccttactttgagcataattttggcgatcagggtgatgttctttgcctagaaaaagcgtctattgaagttgctactcaggcgatggctgatttattttcagccccatggctctatgcggaccagtgggtggatacagctatcgcgaccggttctatacatttactgcatcgtttgtttgctgctttaaacacagtgatattgcgtagaatacccgtgcaatccgactgggctaatgaagcacttaatcaacgtgtctcaccagcccttaaggaagccatacgatcattatcttcgtga

SEQ ID NO: 19568 - DNA, 156 bp, Escherichia coli
atgacaaaggggaatatatctgaaagagactttgatatcctgatcaagctatcaggaatacatagcgagaaggcaattcttgctttgaaaaaatactatgtcgatggggtcatcaggaaaattgatcctacccacgtaatgtggacacggccctaa

SEQ ID NO: 19569 - DNA, 249 bp, Escherichia coli
ttgtttgaatatctggtcgagaatgcatctctttgggatgcaaggaacgtgacagagcgtctgatcactgcaaccgatcgcctggctgattaccccaggctgtatgaaacggatgaacgctatggtgaaggggttcgccgtattagcttacttggacagcatgtactttatgaagtgaatgatgaggccagtcgtgtcaatatcctggcggttgtaggccagcgtcagaatccccgattcattctttga

SEQ ID NO: 19570 - DNA, 177 bp, Escherichia coli
atggcggcgacaggtgcggtaacctttttgaataaactcaccgactttacgatttttgaagtccagcagacgccagccttcatcaatgacgttcagtttcttgagggtacgcggcgtgcggtacatccggttctcgatgtaaatgataaggctgaacatcaccgcaaccagcagtga

SEQ ID NO: 19571 - DNA, 435 bp, Escherichia coli
atggaaacattagttaagttagctacgattgcttctccattagtaagtgctggggtagctatttgggcaattttagttgccaaatcaactatcagtgaaaacaaagaaatcgctaagaaaaccattgcagatacggcctaccaggcatatttgcaactagtgatggagaaccctcacttttcgaaaggttatagtgcagattgtcgacaggagcgagaccctatgtatgaccaatatgtttggtacgtggccagaatgatattctgttttgagaaaattattgaggttgaaggaaacctaaaagatagctcttggacgaatacgctggaaaaacatttgaagtttcattctgaacattttaagaaaacaaaagttgttgaagagacactctacatttccccaattttggatcttataagatgtgcgactaactaa

SEQ ID NO: 19572 - DNA, 1254 bp, Escherichia coli
atgatgaaaaaaatatattgggtttgcagtgtactaagaagtgctgctttaggtaatgtagattacacacagcgaaatgatttaaagcctgatagagtagagtatgatggtatccattctcagttttacaagcgacgtatgggaatgttacataccccagagtcaattgttggttcatatgcaactataactgattggtttgcaagctttcttcagcatggattgcaatggcccggcttttcatcttcatatataaatcaagaagatatattgtcaattaccagccttggtgagtttaaaaaatgcttgttggaaaggttaggctacctgaacacgcaaatatgcacttcatcgagtgttccgaccttacctactgttgtcaacagacctgaattggcatctaactattttagaattgttacggttcagcaattatttccgaaggataagcattttcacccttctgacgtaacacttgataatccagaggtgcgttggaaacacagagagcaccttgcagaaatttgtaaactgacagagcagactttagatgcaaaacttaaaactgagtctagggatcatacaagtaccgctgatctgattgtcttttctgaattggctgttcacccggaagatgaagatatagtaagagcactggcatttagaaccagatccatcattttttgcggttttgtcttctgtgaacaagatggtcaaatagttaacaaagctcgctggattattccagattcgtccgaatcggggactcaatggcgtgttcgtgatcaagggaaatttcatatgaccagtggtgaaatgtctctgggtgttcatggatatagaccatctcaacatattatttctattgagggtcacaccgaaggaccatttaaattaactggtgcgatttgttacgatgcgacagatataaagcttgctgcggatctgagagatttgactgatatgtttgtcattgcagcgtacaataaagatgtagacacgtttgacaatatggcttcagctctacaatggcatatgtatcagcatgttattattacgaatactggagaatatggtggctcaacaatgcaagccccatacaaagagaaacatcacaaactgatttctcatgctcatggaactggtcaaatagcaattagtactgctgatatagatttagcagcatttaggcgaaagattaaagaatataaaaaaaccaaaacccagcctgctggatttaaacgaaaacattaa

SEQ ID NO: 19573 - DNA, 2490 bp, Escherichia coli
atgaaactacttaataaaaagtattacaacctcgaaccaaactttgactaccttaaggactcatttattttagggctggcttggaaaaaaacggatcgttttgtaagaactcataattggtatgcagatcttttagcgctagacaagtgtgcgtttgatattagtgatgaggtcactagttggtcaagtgaggccgtaaataggaatctgtctaaaagtgatattgaattaataccagctccaaaaagagcaagctggttctttaataaagggaagtggactactaataaagatgatagaaaactaagacctttagctaatatatctattaaggatcagtcttttgcaacagcagtaaccatgtgtcttgctgatgcgatagaaacgagacagaaagactgctcattgcgtaatcttggctatgctgagcatgtaaataaaaaggttgttagttacggaaataggcttgtctgtgattgggacaatgaaagggcgagatttcgttggggcggcagcgagtattataggaaattctccaccgattatcgaaactttctacaaagacctgtctatataggtagggaaactgtaaataaaattagtgaaattgatgatgtttatattatcagtttggatctgaagaactttttcggttctataaaaataagcacattgttagaaaaacttaagaaaatatcttctgaccattatgaccataatattataaatgagaatgagttttggggtttagcgagtcagattttaaattgggagtggcctgaagactctttatctttacttaaaaatttggatattgaagaagaaaatgttggactcccacaaggtttagcatctgccggagctttggctaatgcatatctcattgagtttgacgaatctttaacttctaacctccgtactaagatagacggtagccaaattgtactgcatgattattgtcgatacgtcgatgatattagattggtgatttctggagaagcattaacaaatgaggaaattaagaaatccattcatgagttagttcagaggatcctcgatgaaacgttagatcaagatgagtcagataacgaaccatatttaaaaattaatgataaaaaaacttatatattgggactctcagatattgataacggaagtagccttacaaatcgaatcaatgaaatccagaatgaagtaggaacttcgagtattccagagcgtaatggattagataataacataccggcgcttcaacaattattattgactgagcaagataattttttagaagatgcagatggtttattttctggatttaacaatgataaatcgattaaattagaatctttacgtagattttctgcccataggctggaaacaagtttggctaataaaagcaaactaatctcacctgcagaaagaaagcagtttgataatgaatctgcgttgattgcaaaaaaattattaaaaacctggttaaaagatccatcaattatggttattttccgcaaagcgataaccataaaccctaatctagatgcttataaaacaattcttgaaattatattcctaagaatacaacataatcgtgaaaaatgcgatagatatatcatgttgtatcttctctccgatatatttcgtagcgttgttgatatctatcgaaaactgtccccagagtgtacctctgattatcagaaattgatgagtgaagttacatcatttgcccataaactactttcttgtagatccgttattccaaactacgcatatcagcaagcactattttatcttgcagtgatcaataagccatttatagctagtaaaaaatcttcttctgatctttcaaagcttcaacatgtcttaattaaacgacatttagagccgttgagtagtagtgatggatacctatttgaattatctgctcagattagtaaagactaccaagcaaatgttgcttttctactttctcatacaaatactactgaagtagtagactcaatcgtcgagaaatttgcttaccgtggtggtgagttttggaatagcatttggaaagagtttgttaggacgaaagataaagttaggatcaacaaatttagatgggccataccaaaaaatgagtcgaaaccaaatggttcggaccactatctttcatcagtgataagttttaaggaaaatccatttaaatacgaacatgcgcttctcaagctaggtatagcattagttaatcttttagaagatacagagaaaaacgtatggcaatctgatggaaagcagtattccccacatgaaataaaagtgaaattagaaggccattcaacatcatggactgaattatggcgccaaaattctattatttcatgttcgatagataaaatagctcaagatcctcgctatgaaagccctaaatggttggtgaattgtcaacaagccaaaaatgatgaaaaaaatatattgggtttgcagtgtactaagaagtgctgctttaggtaa

SEQ ID NO: 19574 - DNA, 1191 bp, Escherichia coli
atgccactgacagctcgacaagttgaaacagccaaacccaaagataaaatttataagattgccgatggtggtgggctctaccttcaggtcaatcctaacggctcaaagtactggcgaatgaagtaccactatgcggggaaggaaaagaaactatcatttggcacctatccaactattacattggctgaagctcgcaaacgtcgggatgaagccaagaaaatacatgccgatggtaaagatcccggtgaagtcaagaaagctgaaaatcttgagaaaaacctttccgaaggaagaacttttgccgcaatcgccaccgagtggtacaacgcaaaagtttcaggctggtctgccagctacgctgattatgtcgacagagcattcaaaaataatgtgtttccctacattggaaacagacccattagtgaaatcgaacctcttgaacttctcgcagttcttcagcgtatcgaaagccgaggagcctgcgagctagctaataaagttcgccaacgatgtggtgaagtgtttcggtatgccattgttacaggtcgggcacgatacaatccagcttctgatctggttatagcaatgaaaagctataagcgaacacattaccctttcctgcttcctcctgaactaccagagtttttatacaaactcgaaaactacaccggcagtattgtaacccgtgaagctacaaaattgttgatgctcacagggctgagaacagtagaattacgtatgggggaatggtgtgagatcgattttacccaaaagatatgggaagttcctccgacccggatgaaaatgaggaaggagcatatcgtccctctgtcagatcaggcaatccagtctctgcaaatcctcaaagaactgactggaagatacagatacatctttgccggaagaaatgatgttaacaggcctatcagcgatgcaagcgtcaatatggttttgaagaagattggctatgacaaaaaagctaccgggcatggatttcgtcatacaatgagtactgttctacacgagcaaggattcaatagtgcatggattgaaatgcaacttgcacatacggacaaaaacagcattcgtggtacatacaaccatgctcgttaccttgaaggaagacgagaaatgatgcaatggtacgctgactaccttgatgctcttcgaaaagagtcaccagctatataa

SEQ ID NO: 19575 - DNA, 2970 bp, Escherichia coli; identical to SEQ ID NO: 5727

SEQ ID NO: 19576 - DNA, 510 bp, Escherichia coli
atgaaggcaattgacttatttgcgggggcaggagggtttagtttatccgcccacaatacaggcgctatagatgttgttgctgctatagaattcgatagcgcggctgcaaacacctacagaaaaaatatgttagaaaggcttgagcataagaccgaacttttacaggaagatattttactcgtaggcccaaaaaagttaagaaaaaaaataaagctcaagaaaggcgagcttgatatgatacttggtggacctccgtgccaaggtttttccagtcatcgaattaatgatgctggtgttgatgatcctagaaataaattacttttaaggtatttcgattttgtttgtgaatttaaaccaaaagcttttttggtagaaaatgtctccggtttgttatggaagagacatgaagcccatttgaaacgctttaagtttttggcttccaaaaatggttatactttaattcattgtgatgtattaaatgctcgtgattatggtgttccgcagaaataa

SEQ ID NO: 19577 - DNA, 483 bp, Escherichia coli
atggatgaaaaacagttacaggctctggctaacgaactggccaaaaacctcaaaacctctgaagacctcagtcagtttgatcggctgctgaaaaagctcagcgttgaagccgctctcaatgctgagatgacacaccatcttgggtatgagaaaaatcagcccagactaggagctaactcccgcaacggttattccacaaagaccgttatcacaggcgacggtccactggaactgcgtactccgcgcgatcgtgacggtaccttcgaaccacaactggtaaagaaaaatcagacccgtattaccgggatggataaccagatcctctcgttgtatgccaaagggatgaccactcgtgagatagctgctgcgttcaaagaactgtatgacgcagatgtttcaccggcgctgacagccgaagctggcaggctaactggccgaatcttgccacgttcttcgcttatccaacggacatccgcaaagtga

SEQ ID NO: 19578 - DNA, 189 bp, Escherichia coli
gtgatctatacgacgaatgccatcgagtcgctaaacagcgtgatccgccatgcgatcaaaaagcgtaaagtgttcccgacagacgactcggtgaaaaaagtggtgtggctggcaatccagtctgcgtcccagaaatggacgattccgttgaaggactggcgaatggcaacgagccgcttggaactgtaa

SEQ ID NO: 19579 - DNA, 741 bp, Escherichia coli
gtgagtgcggcgggcagtgcccgggacatcgtggtgtacgactgccgtccggggcgtgcggggcagtatgcgtgtgagatgctgagcgggtggtcggggactctggtggctgacggttatgccggttaccgggcgctgttccgtgacgggcaggaaggggcccctccggcggcaccgggtatctgtgaggcggggtgcatggcgcacgtgcgcagaaagttcatggagctgtacagaatgaacggcagtccgggggcgaaggaggcgctgaaacagatacgggcgctgtatatcctggagcagaccatccggcagcgtccggcagagcagaaacggcgatggcgacggcggtacgcgaagccgcagatggaggcgttccacagctggctgagggcgacggaaaagacgagcgcgccgggtggcaggctgcacggtgcggtgacgtatgccctgaagcgttggccggcgctggaaacatacctgaatgacggacgggtaccgctggacaacaaccggagtgagcagatgatgcgtccggtggcgcaggggcggaagtcatggctgttcgcgggttcgctgcggggagaagagcggctggcggagctgctgacgctgctgcacacggcgaggctgaacggtctggagccagtagtctggctgcgtgatgtgctggagaagctgccgtcatggccggcgtcccggctggatgaactgctgccttaccgccatccggcggactga

SEQ ID NO: 19580 - DNA, 918 bp, Escherichia coli
atgacagatgacatcctgaacaccacacaaaaccccgatgaactgcgccgtctggcaacagcgctgctgacggcacaggcatgcgaatatgagcagcgccttcataacctgaataccgtcaacaccacgctggaacagcgcctccataacctgaataccgtcaccaccacgctggaacagcgtatccatgaccttaatgccgccatgcaggcagaaaaaaccgcatatgaacagcgcatccgggagctggaggaggccctgaagctggcccaccagtggcgcttcgggcgtaaaagcgagcgcctcccggccagccagaaaccactggcagatgaggacgcggccagcgatgaggctgatatcacccggcaactgagcgacctgctgccggtgaaggagaaaaccgggaagaagccggcccgtcaccccctgccgcgacaggaaaccgtactcatgcctgagaccggtagcacctgtccggactgcggaagtgcaatgcgacatatccgcgacgaggtgaatgaggtgctggagtatgtaccggcacacttcgtggtgaaacggaccgtgagaccgcagtacagttgcccgtgctgcgacacggtgcacagtgccgtgctgccgccggcagtcatcgacaaagggcagccgggtccgggtctgctggcgcaggtggtgaccgcgaaggtgctggatcacctgtcactgcagtggcagcagaagatatacgcccgtgaaggggtacagttgccggaaagcacgctgacggactggttcgggccgacggcggcggtgctgtcgccgctggcggcagccctgaaacgtgacctgctcaggcaaccggtgctgcaggcggacgagacgccgctgcagatactggatacgcggaaagggaaagtccggaaagggtacctgtga

SEQ ID NO: 19581 - DNA, 339 bp, Escherichia coli
gtgctgagccctcattccctctggctcgtccgcgagcctgctgacatacgcgccggcatcgactccctgacgcgactcgccactcaggccgccgggcatccgccccgggaaggcgaagccttcctcttcaccgggaaaaaacgcacccgcatgaaactcctgatgtgggaccgccacggcgtctggctctgcacccgccgcctgcaccagggcgccttccgctggccccgcgacggcgacaccacctggtcgctcacggcggaacagttcgcctggcttaccgccggcgttgactggctgcgtctctctgccagccccctgcagaggtggactgaataa

SEQ ID NO: 19582 - DNA, 288 bp, Escherichia coli
atgaccccggcgcagcgacgccagcactacgacgcctggcgcgtcagcggcatgtcccggaccgcgtatgcccggcaacacggcatcaacaacaaaactttctggcatcactgccgcgccttctccgctgacgacgcccgtggccccgctccggctgataacagaccagccatcctgccggtcaccctctccgtcagtgacactgccaccctgaaacttcagtgcgcctgcgtcaccgcctctccggccggcatcgccgccatcatccgggagcttaacctgtgctga

SEQ ID NO: 19583 - DNA, 360 bp, Escherichia coli
atgatttgtgagcatattctcattagtgcttatgttttcctctatggtgccgaaggatttattattttgtttgtcgaaacagaattatcacacgctaaaatcattctcgaaaatctacgtaacaaaatggctggtttgcgtatccaagccttagtcagtgaaaggttttcggtcacggacaatattggcgtcgacgaatatgatttttatcctgactataacctattgatagaaagggagggcgttttattacgccaaaagtcaggatcgaaaccggatagacgtctttctgctactgatgacaaactgctgatttttcgtcattgtcacgcgaaaccagtagatccgaaccaagtatga

SEQ ID NO: 19584 - DNA, 672 bp, Escherichia coli
atgttaattccagaaattaaacaggaaaggctctatcaaaagatagcgaatcttattattaagctcatcaatgataatgtctttccgccaggtagttttttacctccagagcgtgagctggcgaaacaactgggagttagtcgttcatcgctgagagaagctcttattgttcttgagatatctggctggattattattcagtctggtaatgggattattgtcagtgataataaacactctccagtcgattacactatcgaagaaattctttatgtccgtgatttagttgatagtcattgtgcccgacttgcagcactggctaataatgaaacaataattaataaaattgagttactccatttccgaatggaaaattccattcatgaaaataatgtggctgaattttatatgcttgataagcagtttcatctgaccatttctgaagccagccataatagggtgttgttagatatgtcacggatgctttgggagcagcgtgtcaatataccttatgctgggctggataaacgttccggcgataagaatgtacttatcaaacttaatcaacagcataaagcaattattgaggcgattcgtgcaggaaatgcagacaatgccttgcaacgggcactgctacatttgaagtatgtgcgagaaataattggttattaa

SEQ ID NO: 19585 - DNA, 255 bp, Escherichia coli
atgtgcatgcaagagtgcccaccgatatcacccctgcagcgtatcggtgaactgtatgccatcgaggcagaagtccggggatgtacagcagaacagagtctggcggcaagaaaagccagagctgcgccactgatgcagtcactgtatgactggatacagactcagatgaaaacactgtcgcgtcactcggatacggcaaaagcgttcgcatacctgctgttacagtacctgattcggcaaggcaacgagagatga

SEQ ID NO: 19586 - DNA, 567 bp, Escherichia coli
gtgccttcaaaacccattgtacgcagttatgccggaccggggcttctggtccatgttatcaccgggaagtatgcggaccatctggcattataccgtcaatcagaaatataccgtcgtcagggtgtggacctgagtcgtgccacgctgggtcgctggaccggtgctgttgctgagctgctggagccgctgtatgacatcctgcgccagtatgtgctgatgcccggtaaagtccatgccgataatattcccgttccggtccaggagccgggcagcggtaaaacaaggattgcccgactgtgggtctacgtccgtgatgaccgtaacgcagattcggaaatgcctacggcggtctggttcgcgtacagcccggaccggaaaggcatctatccacagaattatcttgctggttacagcggagtgcttcaggccgatgcttacggtggttaccgggcgttatacgaatccggcagaataacggaagccgcgtgtatggctcatgcccggagaaaaatccacgatgtgcatgcaagagtgcccaccgatatcacccctgcagcgtatcggtga

SEQ ID NO: 19587 - DNA, 519 bp, Escherichia coli; identical to SEQ ID NO: 14017

SEQ ID NO: 19588 - DNA, 159 bp, Escherichia coli; identical to SEQ ID NO: 10991

SEQ ID NO: 19589 - DNA, 351 bp, Escherichia coli; identical to SEQ ID NO: 6245

SEQ ID NO: 19590 - DNA, 249 bp, Escherichia coli
atggtacatgaccgcatagcggaggaactcgaggcaaaaggcttttaccggagggcggcggcacgatggggtgaagtcatgcaactggtggagacaggcaaggaacggcatcaggttacgatgcgacggctggaatgttccaggaaggcacagaggccaccggagccgccaacggagaactatgcagacctgagaaatgcagtaaatcgcacttacgcagacatggggctgagcaaattagcagagtag

SEQ ID NO: 19591 - DNA, 411 bp, Escherichia coli
atgacagcacagatagcggcttacgggcggctggtggacgacccgcaggtaaaacagaccagcaagggcacaccaatgacgctggcacgtatggcggtatcgttgccatgtagtcaggcgcaggatgggcaggctacgttatggctatcggtgatggcatttggtaagcaggccgacttcctggctaaacatcaaaaaggcgacgttgccagcgtatccggcacgatgcaggtcagccagtggaccggacagaacggggaaacgcggcagggttatcaggttattgcagacagcgtaatcagtgcccgtgcggcacgtcctggcgggaacagacgcaaaaccacaggcacacagggtaatcagccaccagcgggaggcgatgacccttacggtgatgatattccgttctga

SEQ ID NO: 19592 - DNA, 279 bp, Escherichia coli
atgcacacttcagggaaatttaataaatcactcaaaaaacgcagagacagaacagaaccgaaatatcgcgcgttagacatgacagagcacgctttaaaggtggcaatcagaacgatagaccgccacgcgggggaaggatacgcgaaagcacatcccgaactgataagcgcattcatgaccacgacggcggcaaattttgccacgctgacagagcgggagattgcggaagctgaacaggtgacaaccatcaacgttaaaaacgtagaggtggaatcatga

SEQ ID NO: 19593 - DNA, 1200 bp, Escherichia coli
atggaacttagccgcgaaatggtggcgatctattcagagcacagggccactttcagcaagcgcgtaatcaataacgccgtggaagcgttaaaagttattgccgaaccaatgggcgagccgtccggcgatttgctgccgttcgccaatggtgcgcttgacctgaaaacgggggaattttccccgcacacgccggagaactggatcaccacgaacaacggcattgagtacacgccaccagcaccaggggagaacatccgcgataacgcgccaaactttcataaatggcttaagcacgcagccggaaaagacccgcgcaagatgatgcgtatatgtgccgcgctgtacatgattatggcgaaccggtacgactggcagatgtttattgaggccaccggagacggcgggagcggtaaaagtacattcacgcacatagccagccttctggcagggaaacagaacacggtaagcgctgaaatgacatcgcttgatgatgctggtggacgtgcgcaggttgtcgggagtcgtcttatcgtcctggctgaccagccgaaatatacaggcgaaggaacgggcatcaagaaaatcacgggcggtgaccccgtggaaattaacccgaaatatgaaaagcgttttacggcggtaatcagggcggtggtgctggcgaccaacaacaacccgatgatattcaccgaacgggccggaggtgtggcacgtcgtcgcgtgattttccgtttcgacaatatcgtcagtgaggccgaaaaagacagggagctaccggaaaagattgcggctgaaatccctgtcattatccgccgattgctggcgaactttaccgactctgagaaagcacgggctttactactggaacagcgtgacggtgatgaagcactggcaataaagcaacagacggatccggttattgagttttgccagttcctgaattttctggaggaagcacgcggcctgatgatgggcggcggtggcgattcagtgaagtacacgaccagaaacagcctttaccgcgtctatctggcgtttatggcgtacgcaggcaggagcaaaccgctaaacgtaaatgactttggcaaggctatgaagcctgccgcaaaagtttacggacatgaatatattacgcggaaagttaagggggtaacgcagactaacgcaataacaacagacgagtgcgacgcgtttttataa

SEQ ID NO: 19594 - DNA, 561 bp, Escherichia coli
atggggtcgaatatcatcacaacgttcttaaaacaacaaggcgtatcagtcaatgttattggtattgctataaaggacaaaaataattcattattaagtgaatctgtgattttgtcgccactatatgatagtgctatttctttagctaattctttagtaggtgtccaaagcaatggaaattcggtagagttcgcagagaattcattctcattgtcgcacaaattgagttatttagaagatccttcagcataccttgctggctatggtgttgggggagccgctattgctgagctgtacatagttggtggttacttggcttgtttaattggaggtatgcttacatatatttttatctctatactagaaaaaatcgccaaaaaatccttttttaattttatttttgttatgttgataactggaaaaatattatactcacctcgaggggagtttctttcatttatgtctgctgacagaatgttaatattatttttaatttttacgttttcttataaatttctattggcaacttcaaataaaaaaatgagttttaaaaatgaatga

SEQ ID NO: 19595 - DNA, 801 bp, Escherichia coli
atgaatgaacttgtatctataattataccgttatacaaccaaggagagtatatcgaggaaactctgaattcggtcaagcaacagtcttattcaaattatgaattgatcattgtagatgatggcagtaacgatcaattcacaattgaaaagataaaagaactcaggttcaaaggatatacgattatctcaaagcaaaacggcggattagcatcagcaagaaatgaaggtattagaaatgctacaggcaaatatattattgttcttgattctgatgatataattcatcgcgattatattaaaaatcttcttgaagttataactaatacaaaagcacgaatcgtatatagtaaggctttattgtttgaatacagaacgggaatgtggatgctaccatcatttacaatgcgaagaatgctgaaaagtaatattattttttgttctgctatgtattatcgtgaagattggtttaatgtgggaggctatgatgaatctttaagaacaggccttgaggactgggatttttggctatcattaataggtttatacaataatcataacgatatcgttgcgagggtaaataagcctctgtttttttatcgaattagaaggaattcaatgctaagatcgataaattacactgaaaaagaaaaaattgttaattatatacataaaaaacacattcaattatttgaactgtataaagttaagccccttatttatagtaaacagaatttaatatccaaaatttttaataaaattgcctccaaaatatgtggaataggatacaatgttaaacgataa

SEQ ID NO: 19596 - DNA, 201 bp, Escherichia coli; identical to SEQ ID NO: 5078

SEQ ID NO: 19597 - DNA, 822 bp, Escherichia coli; identical to SEQ ID NO: 5768

SEQ ID NO: 19598 - DNA, 528 bp, Escherichia coli
atggcagttcgtggcattaacaaggtcattcttgtcggtcgtctgggaaaagatccggaagtccgttacatccccaacgggggcgcagtggcaaacctgcaggtcgccacgtcagaaacctggcgcgacaaacagacgggggaaatgaaggaacagacggaatggcaccgcgtggtgctgttcggcaagctcgcggaagtggcaggtgaatatctgcgtaagggcgcgcaggtctacatcgaggggcaactccgtacccgtagctgggaagataacggtattacccgttacgtcactgaaatccttgtgaaaaccacgggcaccatgcagatgctggggagtgcaccacagcagaacgctcaggtgcaaccgcagcctcagcagaacggccagccacagagtgctgacgcaacgaaaaaagggagcgcgaaaacgaaaggccgtggacgtaaggctgcgcagccggagcctcagccgcaaccaccggagggggaggattacgggttttcagacgatatcccgttctga

SEQ ID NO: 19599 - DNA, 432 bp, Escherichia coli
gtgatatcccgcttcatcaatgccctgaaagcccgaatcgacgcttaccagaaacgtaagcatcgggaaggtaaacgcgtgcatcccacaaccctgcattacgtctgggcccgggagtttggggagtgcaaaggtaaaaaacactatcacctgatgctgctggtcaaccgggatacctggtgtcgtgccggcgattaccgcgctccgggatcactggccgggatgattaaacaggcgtggtgcagtgccctgggagtggatgccggacgttatgacacgctggcacattttccggtcaggccggcggtgtggctggaacgcgatgatgacaccggctttcagcaggtgctggagcgtgctgactatctggcgaaggagagtaccaaagtttacggcaccggtgagcgcaactttggctgcagtcgtggctga

SEQ ID NO: 19600 - DNA, 234 bp, Escherichia coli
atgacagcgcttcccgaccatgccgccagtcccctgatgacccgcctgcaggacgagctgcgcacggaatctgtccggtctcaggcccgtgaacagtttaccggtgcggtggaccggatatttgacactgcggagagcgtctgtattgcctctgttgcacgcgcggttctgcgtgccgtccgtgactcggtggtctctgttgcccgcgctgtatggaactggattttcttctga

SEQ ID NO: 19601 - DNA, 279 bp, Escherichia coli
atgcttcgcctggttcgtgcagtgatcccggttgctgttctgatgatgttgttccctgagttagctatggctgctggtaaaggcgacctgatggctaaaggtcaggaaacggttaaggcgaccttcggtaagaactccagtatcgttaaatggattgttctggctgaggtgctggtcggtgcggtcatgtacatgatgaccaaaaacatcaagttcctggtcggctttgccatactctctgtatttattgcagtaggtatgtctgttgccggattctga

SEQ ID NO: 19602 - DNA, 486 bp, Escherichia coli
atgaaaaccatttcacataattccaccacatcttctgtttccgtaaccgctgcatcagggaatgaccagcctcagttggttgccaccctcgtccctgatgaacagcgcatcagcttctggccgcagcattttggcctcattccacagtgggtgaccctggagccccgtgtcttcggctggatggaccgtctgtgtgaagactactgcggtggtatctggaatctgtacaccctgaacaacggcggggcatttatggcacccgaaccggatgacgatgatgacgaaacatgggtactgttcaatgccatgaacggtaaccgcgctgaaatgagtccggaagctgccggcattgctgcctgtctgatgacgtacagtcatcatgcctgtcgtacggagtgttatgccatgacggtccattattaccggctgcgggattacgccctgcagcatccggaatgcagcgccattatgcgcatcattgactga

SEQ ID NO: 19603 - DNA, 141 bp, Escherichia coli
atgctgaaaggcggaatttcaggtcgcagcgctagaggaaaacgtatccatacccgtgccattcacagcattgacactgacattaagctcaaccgcgcattgtgggtgatggcggaaaccctgctggagagcctgcgctga

SEQ ID NO: 19604 - DNA, 807 bp, Escherichia coli
atgtgtcaggtatttggtgtatccaggagcggttattacaactgggtacagcatgaaccctcagacagaaaacaaagtgatgagcggctaaaactggagattaaggtggcacatatcagcactcgcgaaacatatggaacccggcggctccagacggagctggcagagaatggcatcatcgttggtcgtgaccgactggcacgtcttcgtaaggagctaaggctacgctgtaagcagaaacgcaagttcagagcgactacgaactcgaaccacaatctgccagttgcgccaaatctgctgaaccagacgttcgctcctacagtaccaaatcaggtctgggtggcggacctgacgtatgttgccacacaggagggatggttgtacctcgctgggatcaaagatgtttatacgtgcgaaattgtcggctacgccatgggagagcgcatgacaaaagagctgacaggtaaagccatgtttatggcgctcaggagccagcgcccacctgccgggctaatccaccactccgatcgaggttcacagtactgcgcatacgattaccgggtcatccaggagcagtttggtctgaaaacatcaatgtcgcgtaaaggtaactgttacgacaacgctccgatggaaagcttctggggaacgctgaaaaatgagagcctgagccactatcgttttaatagccgggatgaggccatctcagtaatacgggaatacattgagattttctacaatcgtcagcgtcgtcactctcgtctggggaatatctccccggcagccttcagggaaaaatatcattag

SEQ ID NO: 19605 - DNA, 459 bp, Escherichia coli
gtgtccaatctgtttggtctggtcaccgggatggcggaagacctgcagagtctggtgggggccacggtggtccgccgccgggtgtatgcccgttttctggatgcggtgaatttcgttgcgggcaatccggaggcggacccggagcaggagctgagtgaccgctgggtggtggagcagatgtcgcagctgacagccatgacggcctcgtttgtgctggccacaccgaccgagacggacggggcgctgtttcccggtcgtatcatgctggcgaacacctgtatgtggacctaccgctctgatgagtgtggttacacgggcggggctgtggcggatgagttcgataaacccaccacggatatccgtaaggacagatgcagcaagtgcatgcgcgggtgtgaactgcgcaggaatgtcggcaattttggcggtttcctttccattaataaactttcgcagtaa

SEQ ID NO: 19606 - DNA, 459 bp, Escherichia coli
gtgtccaatctgtttggtctggtcaccgggatggtggaagatctgcagagtctggtcggcggaacggtggtcaggcgtaaggtttacgcccgttttctggatgcggtgaatttcgtcaacggaaacagcgatgccgatccggagcaggaggtgatcagccgctggcgcattgagcagtgcagcgaactgagcgcggtgagtgcctcttttgtactgtccacgccgacggaaacggacggcgctgtttttccgggacgtatcatgctggccaacacctgcacctggacctatcgcggcgatgagtgcggttatcacggtccggcggtcgcggatgaatatgaccagccaacgtccgatatcacgaaggataaatgcagcaaatgcctgagtggctgtaagtttcgcaataacgtcggcaactttggcggcttcctttccattaacaaactttcgcagtaa

SEQ ID NO: 19607 - DNA, 264 bp, Escherichia coli; identical to SEQ ID NO: 7651

SEQ ID NO: 19608 - DNA, 234 bp, Escherichia coli
atgacagcgcttcccgaccatgccgccagtcccctgatgacccgcctgcaggacgagctgcgcacggaatctgtccggtctcaggcccgtgaacagtttaccggtgcggtggaccggatatttgacacggcggagagcgtctgtattgcctctgttgcacgcacggttctgcgggccgtccgtgactcggtggtctctgttgcccgcgcggtatggaactggattttcttctga

SEQ ID NO: 19609 - DNA, 234 bp, Escherichia coli
atgacagcacttcccgaccatgccgccagtcccctgatgacccgactgcaggacgagctgcgcacggaatctgtccgctctcaggcccgtgaacagtttaccggtgcggtggaccggatatttgacacagcggagagcgtctgtgttgcctctgttgtccgtacggccctgcgcgctgttcgtgacacggtggtctctgttgcccgtgcggtatggaactggattttcttctga

SEQ ID NO: 19610 - DNA, 219 bp, Escherichia coli; identical to SEQ ID NO: 19526

SEQ ID NO: 19611 - DNA, 366 bp, Escherichia coli
gtggcagctgcgcgccgcagtcgtgttgaatgggaaaacaaacagcgcaaaaagcaggggctggataccctgggtatggatgagctgatagcgaaagcctggcgttttgtgcgtgagcgtttctgcagttaccagacagagcttaagtcccgtggaataaaacgtgcccgtgcgcgtcgtgatgcgaacagggaacgtcaggatatcgtcaccctggtgaaacggcagctgacgcgtgaaatctcggaagggcgcttctctgccagtcgtgaggcggtaaaacgtgaagtggagcgtcgtgtgaaggagcgcatgattctgtcacgtaaccgcaattacagccggctggccaccgcttccccctga

SEQ ID NO: 19612 - DNA, 261 bp, Escherichia coli
atggcgcttcatgaacataacgactatcagccgctgttacgtgcaatggcaaacgtgccatgtattagcgtcgataatgctcgtgaaatcctgaacatgaccatagagcaggagcgcccaaaggttgcgccggagcttaccgcagcctttgaaaactttatggacatgcacagcccgaaagccgtatcacccggcatggcatacgacggcagaaaccagggcgatgaaggcgacgtcgatcgcatactgaaaaccatctga

SEQ ID NO: 19613 - DNA, 258 bp, Escherichia coli; identical to SEQ ID NO: 11054

SEQ ID NO: 19614 - DNA, 261 bp, Escherichia coli
atggcgcttgatgaatctggcgactatcagccgctgttacgtgcaatggcaaacgtgccttgtatcgatgttggtacggctaaaagcatccttagcatgaccatagagcaggaacgtccgaaggttgcgccggaacttaccgcagcctttgaaaactttatggacatgcacagcccgcaagccgtatcagctggcatggcatacgatggcagaaaccagggcgatgacggcgacatcgatcgcatactgaaaaccatctga

SEQ ID NO: 19615 - DNA, 270 bp, Escherichia coli
atgcagcggctggacgatgcctttgagcatggtgctgatgtcagcattgttcacgacgttgttcgtgaactgatggaggaaaagcgcgtaaaccgtcttgtaacagtccctgcggtgctgctggaaaaagtgatggtgatggctggtagtgaaatttatcgcctccatgctgtagggagcgagaacgggggcgacggtgacgcatttgtcagggaagaacgtgagattatgcgggtgatgcgtcaggcgctggacggggagaatgggtaa

SEQ ID NO: 19616 - DNA, 234 bp, Escherichia coli
atggcccccgaaccggatgacgatgatgacgaaacatgggtactgttcaatgccatgaacggtaaccgcgctgaaatgagtccggaagctgccggcattgctgcctgtctgatgacgtacagtcatcatgcctgtcgtacggagtgttatgccatgacggtccattattaccggctgcgggattacgccctgcagcatccggaatgcagcgccattatgcgcatcatcgactga

SEQ ID NO: 19617 - DNA, 222 bp, Escherichia coli
gtggaaaaccattcctcctggcaccgtctgtttgtggacccgttaagccgtgccatgtacagctctgacggcccggattttgagtttgtgcagcagaaacgcagagagggtatgagtattcatgaggcggtgtggcagctggcgtggaagaaatcggggccggagatggcttcgctggaggcctggctggaagaacatgagaaatacaggagtgttgcatga

SEQ ID NO: 19618 - DNA, 1050 bp, Escherichia coli
gtgcgggtattacttagacctgttctggtgcctgagcttgggctggtggtccttaagccgggccgtgaatccatacagatatttcataatcctcgagtgctggtggaaccggaaccaaaaagcatgcgtaatctgccatccggagtcgttcctgccgttggccagccgctggcggaagacaaaacattgctgccgttttttagtaacgaacgggtgattcgtgctgctggcggcgttggcgcattgtctgactggctattacgtcatgttacatcctgccagtggcctaatggagattaccatcacactgaaacagtcattcaccgttatggtaccggcgcaatggtgttgtgctggcactgcgacaaccagctgcgtgaccagacatcggaatcactggagctgcttgctcaacaaaatctgacagcatgggtgattgacgtcatccgtcacgcaataagcggtacgcaggagcgggaattatctttggctgaattatcctggtgggcggtctgcaatcaggtggtggatgcactacctgaggctgtatcgcgtcgttcgctgggattaccagcggaaaaaatctgctcggtgtaccgcgaaagcgacatcgtaccgggagagcagaccgccaccagcatactgaaacagcgcacaaaaaatcttgcgccgctgcctcacgcccaccagcaacagaacccaccacaggaaaagacggtggtcagcattgccgttgatcctgagtctccggaatctttcatgaaacgacctaaacgtcgccgctgggttaacgagaaatacaaacgctgggtgaagacacagccgtgtgcgtgttgtggtaagccagccgacgatccccatcacctgattggtcatggtcagggcggaatggggacaaaatctcacgatattttcacgctaccgctgtgtcgggagcatcacaacgagcttcatgcggatcctctggcgttcgaagaaaagcatggttctcaggttgatttaatttttcgttttcttgatcacgcctttgcaactggcgtgcttgggtaa

SEQ ID NO: 19619 - DNA, 213 bp, Escherichia coli
atgctagacacatgtaggttagcctcttacgtgccgaaaggcaaggagaagcaggctatgaagcagcaaaaggcgatgttaatcgccctgatcgtcatctgtttaaccgtcatagtgacggcactggtaacgaggaaagacctctgcgaggtacgaatccgaaccgggcagacggaggtcgctgtcttcacagcttacgaacctgaggagtaa

SEQ ID NO: 19620 - DNA, 300 bp, Escherichia coli
atgaatgagtatacttatatcacgggtttttccattccgtatccaggaggaattcaggtgagcaatcgcagaagtcaggcaagtcgtgatgagttcgctcttgatagccgtgttgcacgaatggagtctgatatctcatacatcaagagagatattgaagagctgaagagcgatctcaaggatgtgagaggcgatattgataagatacgcacaacagatttcaggctcatgtttggtgcgttgattactacagccttggggttagctggcttaatggcgagaggttttcactggatttaa

SEQ ID NO: 19621 - DNA, 384 bp, Escherichia coli
atgaaagatattgaacattcaggggaaatggaaaagaaaaaacgggagtttattaaaaaactggaatcgataacgccaagagaattcttccgttttttaaatgaaaaaaacgtcactgtggtttgccctgggtgcgggctgaaagatacccagataactgccactacaggtaagttaaatctccaacaactcctggatggtgaaaaaggggaagagtttatgacgtacttcaggcttgaaccaggtcacccaggtgatagtgatgcgaattattactacaaatctttttgtgagaactgcggttatataactatgcatgcagtgactccggtattgaactggttgggatcgcaaaaaaaccaggaagggtcaggtgatgaatga

SEQ ID NO: 19622 - DNA, 312 bp, Escherichia coli
atgtcaatagagatatcaaagaagctaaaagcaattcgagaatctgaggggcttagtcaggcaaagttcgcggattcaataggtattgcggttggtacggttaagcaatacgagactggtattcgaggtgtgggaacggaggttttactgaaaatcacaatgcacccggaatttaaaaaatacactatgtggttgatgagtaacgaaacaaatgaggctgctgggcagatcagtccctctctctcccctgatgggccagaaaacacatcgtcttctcaaaagccccgcaagactggtacacagcccggctaa

SEQ ID NO: 19623 - DNA, 279 bp, Escherichia coli
atggcaaaagtccttaacacatacgaacaagcggattttgagcgtttggcggcgttctacccataccgtaatgaacatgggctaccggtacttgaagaaagcctagaggattatgcgaaacgcacaaatcaaagcattctcgctgtaagaaggcaggctgatagatcggtaattcccgttactcaagaaggaagaaacacaaaacgcaaagtaaatctcttcgcaattttcctgaaaaccatcaggagcgcagaaaaatacgtgcagatgacaaaataa

SEQ ID NO: 19624 - DNA, 138 bp, Escherichia coli
atgagtatatttatctcatggcttgttctgattatttcggtggcctgcgccattgggattatgcgaattattaattcagtgaaaaagatcgagcgtttttctctgatgaataacgatacaaataaaacatcaaattaa

SEQ ID NO: 19625 - DNA, 411 bp, Escherichia coli
atgcacgcaaaagaagaaggtatcatcagagcactgaaagaaatttcaaagatggaaagcgaagtagcgaaaaaagccgtggccaatgctcacatggacgtcgcaacccacacaatgatagtcgcaaaagtcacggcagaagctgccaaaatcatcgaagaacagggtgtggaacttgcgcttctcaaaactaaaccagtcaccggactggatttatctgacaccggacgccttatttacactattggctcggagccacagcgatacaccattatcgccggattacagaacaaatacctgatcactcctcaccccataagggaatcagcgcttctgacaaatctccgcctgatagagcgctctcaagttgcattcattgatgacgcccgacacaccgtatttaacgcatag

SEQ ID NO: 19626 - DNA, 2658 bp, Escherichia coli
atgagcacgaaatttaaaaccgttatcactactgccggagccgcaaagctggctgccgccactgtccccggcgggaaaaaagtaaacctgtctgcaatggccgtgggtgacggtaatggcaaattaccggtgccggatgccggtcagacgaaactggtgcatgaggtctggcgtcacgctctgaataaagtcagtgtggataataagaataaaaactatattgtggctgaactggttgttccgccagaagtgggcggcttctggatgcgtgagcttggtctgtatgacgatgccggaacactgattgcggtatccaacatggcagaaagctataagccagaactggctgaaggctccggacgtgcgcagacctgccgcatggttattattctcagcaacgtggcgtccgttgagctgagtattgatgccagcacagtgatggctacgcaggattacgtcgatgacaaaatcgcagagcatgagcagtcccgccgccatcctgacgccacgctgacagaaaaaggttttactcagttaagcagtgcaacaaacagcaccagtgaaaagctggcggcaacgccaaaagcggtcaaggctgcaaatgacaacgcaaattcacgtctggcgaaaaatcagaacggtgcagatatccaggataaatcagcttttctggacaatgttggcgttaccagcctgacgtttatgaaaaacaatggcgaaatgccgcttgatgctgatctgaatacgtttggtcctgttaaggcttattcaggtatctggtctaaagcaacatccaccaacgcaacactggagaaaaatttcccggaagataatgctgtcggtgtgcttgaggtttttgctgccggcaattttgcaggtacgcaacgctttaccacgagagacggcaatgtatacatgcgtaaactcgccaataagtggaatggcactgatggtccgtggggcgtatggcgtcacactcaatctgctacccgccatttgagtacgactatagacctgaatacgcttggagccgccgagcatcttggtttatggcgtaacagtagctcagctatagcttcatatgaacgcaattatccagaggaaggcggctttgctcaggggatgcttgagatcctcgaaggcggaaattatggaagaacgcaacgttataccactcgccgtggaaatatgtatgtccgctgtcttgcggcaagctgggatgcatcaaatccgcagtgggaaccgtggttaagagtcggtcatcagtcagagagtcgttattacgaaggtgatttaaatgttctaaccgaccccggtatttacagtgttacaggaaaggcaacaaacggtccgatgctggacaccgttggcgcgacactacttgggatactggaagtaatcagacgttttgatggtgtgtctgtctggcagcgttacacaaccacagggaaatcagaaaccacacagggacgcacttttgagcgcgtctacgccgggagcaaatggaccgaatggcgagaagtatataactccttttcgttgcctctgaatctgggcatcggtggcgcagtggcaaaactatccagtctggactggcagacctacgattttgtgccgggcagtctgataaccgtgcggcttgataacatgaccaacattcccgacggtatggactggggcgtcattgatggcaacctgataaacatcgcagttggtccgagtgatgattccggtacggggcgctcaatgcatgtatggcgcagcactgtaagtaaagcgaattaccgcttttttatggttcgcatttcaggaaatccgggaagccgcacgattacgacaagacgtgtgccaattatcgacgaagctcagacatgggcggcgaaacagacattcagcggtggtctttctggcgaactatccggcaatgctgctacagcaacaaagctgaaaacggcaaggacaattaacggcgtaaaatttgacggctcggcaaatattgaagcgtttccgccaggtgttccgctgccgtggccatcagatacgccacctgcaggttatgcaatcatgcaggggcagacgtttgataaggcagcatatccgaaactggctattgcctatccttctggtgttattccagatatgcgcggctggacaatcaagggcaaacccgccagtggtcgggccgtattgtctcaggaacaggatggcattaaatcgcacacccacagtgccagcgcatccagtacggatttgggtacgaaaaccacatcgtcgtttgattacggtactaaatcaacgaataacactggtgcacatacccacaatgtatctggtactgcaaatagtgctggcgcacatacacataccgttccattaaggagaccaaacagtggaggtatgaatttcgactggcttgatggtgcatcaagtggcacggtggtggggaatggaactgtgccttcttctggcgcacatacccactcagtatcaggtaccgctacaagtgctggggcacatgcacacactgttggtattggcgctcatacgcactctgttgcgattggttcacatggacacaccatcaccgttaacgctgctggtaacgcggaaaacaccgttaaaaacatcgcatttaattatattgtgaggcttgcataa

SEQ ID NO: 19627 - DNA, 618 bp, Escherichia coli
atggcattcagaatgagtgaacaatcacgtactgtaaaaatttataacctgctggccggaactaatgagtttattggtgaaggtgacgcatatattccacctcatacagggctgccagccaattctacagatatcgccccaccggaaattcctgctggctttgtggcagtttttaacagtgaaaatgaatcgtggaatattgttgaagaccatcgtggtaaaacggtctatgacgtggcatcgggggacgcgttgtttatttctgaacccggaccgctaccagagaatgtcacctggttgtcgccagcaggggagtatcagaagtgggacggcgtatcctgggtgaaggatgaggaagcagaaaaactgtttcggatacgggaagcggaagagaaaaaggcaaggttgatccaggaagcaacagataacatcgcaattctgcaggatgcagttaatcttgaaatagcaacaaacgaggaaaattcacaactggattcctggagaaaatacagagtattagtgagtagaattgacaccagtacagctccggatatcgtatggccagagctgatgaatcagggttatgtgcgggaggacgagcagataacttcagactga

SEQ ID NO: 19628 - DNA, 1155 bp, Escherichia coli
atggtcaccatgaagataactaagacaaattttggtataactattaatgatactttaataacggattttcgcgatgtagttaatgaaagagattttgtttatagttacttcataaacagaaatggtaaaaatcagttcagccctatttgttcatgcatggattggattactgtttctgtacgctatcttatgaacatccctgaaatatctgaagacattgatattaaagctatgcagatttatactattatatcatcaatcgatataatagtggaagcggtgcggcaactccatcgtattattgaaagtgacaataattttatgaaatggccctttaaaggctctgttgatatttttaaggataaaatacattatctttcgcatgaggatgatgactcttattttaagagtattcgcgctatttttggtgctcaccctacgaatcttaaaaataaccacggggagagattgtttgcgagttggcctcatttttatgcacttaataataatgattttactataagtctttataataacaaacccggtgtggatgatgttatttttggtattaaatttaacgagcttatctcatatgttgaaagtaggtataaatatctagaaaaactaatggactctatagtggtaattcgtaacaaccattacgatgttttgtccgcgcaagttatatcatccaccgataacatttatgatgagttgaggctgcttctttcagaagtcgctatacgaggtaataatgattattaccgaatgcaattggaagagttaattcatttgtttgatggttgtgttaaagagaagcatcttcaagatgaagtaaatgagtttttgagtaaactctatccgatcgttttagagattagaaataatcttcagaaaatgaatattgaagatttaacaactacttgtgatgtgattatttcgaggcttcctacaggtgaattaaattatattcttcagaagatgttttcttgtctccactcagatagggatgatccattgaaggattattactttgatactttaaataaatatactgaaggttggtataatttttgctctgcagataatgatagtacaaccttgctaaaacttagaatgatgctgtatcggtatcatcagcaaaaacttgattaa

SEQ ID NO: 19629 - DNA, 150 bp, Escherichia coli
atgcagcaatttttaagaaacgccatcgataaaaacctcgatggtgagtatcagctctatgacagtaagctgagatttttgacctcttccaatcctgaccatccaacagggaatatttttgatcctcgtgaactggccttgctggcgtag

SEQ ID NO: 19630 - DNA, 192 bp, Escherichia coli
atgcgcgaaataactaaagggcaaccgccggccagtttgcaacagtgggtgagagcaaaaccacgggataaaaatgccaatcagtggtttcaggaactttatgcgcaaaaaaatgggatatcgttggcgatctcagccagcagtgcgctcaggagcaattttatctctgtgcttattgctgcgatcgcgtga

SEQ ID NO: 19631 - DNA, 915 bp, Escherichia coli
atgcagcaatgtctctcagtaacagtacgcaatatcaatgagttcagtgcactggtagctgttaagccaggggcggtagcgtggattgatggaatgaaaaataagtgcccacgaattgcagtaataatgtcggtttatattaatgataaatttaatgagtttaaagaggcttttgacagtattattaatcaaacatactctaactttgttttctttatttatgccgatggcaagataaatccagatattgaaagttttttgcaaaattataattcgcaacatgtgattttcattagaagtgaaaaaaataagggattagcttatgctttgaataaattaatatcagtggcgctagttaataatgaatttgattttattgccagaatggatgctgatgatataagtttagaagatagatttcaacgacaaatagatttttttatggctaaccctgagttagatgttgttggtgggttgtgtcaagagtttggtggtgagtcagcaagagaaaaatgcaagatctattttacagatgaagccattaaaaacaatgcctttaaaaaatgtcctttcgttcatccaaccgtgatgtttaaatcgtctgtatttaataacgggatgcgataccctgaaaatcagccactgacagaagatatgtgcttatggctcgagttaatatccgcgaataaaaagtttgcaaatattgactccgttcttctaaagtacagaattaatgagcagacgctaaaaagaagaagaggtttgaataaggctgtaaccgaattatccacaagattgtattacgccaagaaacttaaaatgcttagcgtacggaatttgttatatatattaatccattttggtgtcagagtccttccttcaaatatatttaaacttgtacataagttaaattaa

SEQ ID NO: 19632 - DNA, 1767 bp, Escherichia coli
atgaataaaactgtttatacatatgatgtatgggatactattttaaaacgtcattgtttaccatcatatacgttagaggtttcgttgtactggctacttttgtatcttggaaaacctgagaaacataaggatgtgtataaaaaagtaaaagcactggagagtgatttttttaatcgaaaagaagaatattttattgaagagcttattgttgggatattaattgaaaataatttaatgaatggattttgcaataactctgtgactgctgcttgggaacaaatatattatttcgtagagagaaattgtacatataaaaataaagaggttatagagttaattgggagtgactatggggacaaattatttatttctgatttttatactgactccagtttcataaagaaattgctacaccaccaccaagtatcggttttagatggtgtgacgtcagctgagtatggcgtcagtaagcatatgggttcattgtatgaaaaaatagaactattgaagcaaaggaaatggatccatactggagataatgaattagctgatataaaaatggcaaagcgtgcaggtgcccaagttagacttataaaatccaaaaagaagaaaataaataagttaaaaataaaaaatgactatgagcggttagcatttattattttgtcctttagcctgtttatattaaaaacttccagaaagaaaaagtgcaataagatctacttttttacaagggagggggtttttttcaaaaaaaactttgatcttctactaaaccaaatacctaacatattcccatctataactacggaaatattgccaatcagtcgagtagccagcttagcattgaagtttaatgagtctgatgaatttttaggatttaatgatgcattaacccagtatggctatggagtgtctacgtttcttagtttctttcatcttgatgattgttactccgagctcacaacaaagtatcatgatgtaaatgatttattatctcacagaaatgatcctttggtaaaacaactaataaaaagtatagaggataaaaaaaaacgaacagaaaattttcttacatccattgagttcgattctgagccaagtatcatcgtggatattggttggcggggtagcatccaagataatttaatgtcgcggaaaaataattatattcaacatggatgttatctcggattgtttgatttttacccaggccagtcaggtcagaataaatcatctgtaatttttgataacaacagatttagacaaaaatggaccatgaaaggtgtagcttttatggagacggttttcaatgctttggacggaagtgttgtcgattatgtaaacaataaaccgaaaagaaaagaaaattacgctgagatagaaaattcaaaacatttaatagttatgcaagatgctatcattgaggaatttatgaatctatctattatgttaaaagagggaaagttaaatatcaatgatattgaaagattagctattgaaagttacaaaaaaatagtaactaacccatctaaagaaatagctgatttttatgttggcagtatccaaaatgaaagcttcggtttgaatgattttatcgacaaagaatttaacattagcgcagtagatgttttccgaagttttttttctaaaagtaaaagaaatgaaataagaataaaattgcatagaaatggatggcgtgagtcgatacttaaatcctctaaagtatcgctgagcgcaaaattatgttcacttttaattagataa

SEQ ID NO: 19633 - DNA, 873 bp, Escherichia coli
atgaatatttcagtaataatttgttgctataactcagaaaatagaatcgtaaacaccctttttcatctttcacaatgtgtatctctatccaaggggttaattgacgagattattcttgttgacaataactcatctgatgaaactgttaaaacagctgaggatttttggcgtaatacgggggaggagcaaatctttaaaattgtttttgaatcgattccgggccttgttcatgctagacggcgagggctggacgagtccaaaaatgagattgttgttttttgtgatgatgataattggctggtaccatcttattttacaaaactagagaaatattttgaaaacaaacaagtaggcgctgtcgggggacgcggtattcctattgctaataccgttattcctgagtggttttttgagaatctggatgcatatgcatgttctgcacaaacttctaacatgttgtatggtgctagcttggctattcggtctagtatcttaaaaaaattttatacggatgctttatcagtaaagctaaagggtagaacaaaagacagtctggattctggggaagataacttattgtgtaattttgtcaaaaaacaaggatacactctgatacctgacaatacaccattttgccatttcatggaaagcaagcgattggatgtcgattatctatataaactggctgaatcatttggaaaagcaacggcatcaatgaaaaacaattccttcaccaccgattatgtatatttgacagcaaaaatgttattagctatatctaggatcttctctaaaaaaaataaaaagatatatttaaaacgtgagatttcctttctcagaggttatttgaggtttagaaaggaatcgaagtaa

SEQ ID NO: 19634 - DNA, 1179 bp, Escherichia coli
atgagagggggaatgcttgtaattgcgtggtattctatttttctgttgatttcagctacgggcatgaccggtctaaataagctgagtactgaagctattctgtgctatattgcatttttattctgttttttctttggcatgatgttaggtggtgtttcgctcccaaacggaatgaaaatgttgcaacaggagcaaaagataaagaaaaggcatgcttctgccatagttctaatttattgcttttttattttttattctttaattgctcttttaaatatatattatttcaataaggttgatctatcatcttatagacaagcattttttgatggttcaagagataatgttaaatacttctatggcgtgtttggcttttacttctattatttacttagcctgttagtattcgccttagttccttatactattataacgaacagcaaaaagactatttcattatgtttctttgccttgctgctatacgatattattttcctttcaagaactggtgtttattactttatattatcttatatagtatcgagtattcttctcaagaaaggaatcaagaaaattataattgtagggatggttgccttattattctcattgataatgagttacacaagggatatgaagagtgacatcattggtacattatttagctcaattataaattatcatatagctccgtttgtcttgtttgatgaaaatataatatcaaatcatttgattaaatataatggggctggcttggcatcgttggggatatataatatcattttttatcccattgattcgtctatcatgtcatcaataaacgattttagagcacagttgaatgaattctatgatttgggagtaaatcgttatttgccatataatgcctattatacttctttgggtggggtatatatagatagcggcctgattggtagcatgatggttagttttatgactggttttattattgtcggaatcgagaagagtgcttttaaatcaactaagttcttagtctcttctgtgttttttactacattatgtatggaatctatattttccccaataacactaaatatttttgcctttacaataattgtctacttagttgttttgatggtccttaaatatgaaaatagcgatgataataccatctttaaaaaataccgcgccaaataa

SEQ ID NO: 19635 - DNA, 1026 bp, Escherichia coli
atgaaaatagcgatgataataccatctttaaaaaataccgcgccaaataatatagccctttcaatatgtgaaggggcaaggaagcatggtgtcaatatagatatttattatcttgatgaaattgtagagttggatatagacgagtcagaactgaatataaataggctaaatgatagaaccattttaaacagttatgatattgttcactctcatggcttaagacccgatgttattaattgtaagaccagcaaaaatgtcattaatgtaagtacgcttcatagttttattttagatgatcttaagaataaatatggaataaaaggatatctgatcgcttttgcttggcttaaattattaaagcgatttgattcatgtattgcaattagtgaggcgactaaacggttttatgttaaacatggtcttaaatgccaccatatatataatggaatcgactttcctgacatcgaattatatcaagataactcaaggctaaataacggcaaaataaatatagtatcgatcgcgcatctggaaaaaataaaaggcttagagcaactcctatatctagccgcggagcgagaagagttccatgttcatataattggtgaaggaacttaccgtgggaaattaacaaatattattgataagtttgatttatctcagcgtgtaactttgcatggatatatatcaaatgcgagttctatgttggggaaatttgatgtttatgtgcaaccatctaaaagtgaggggtttggcattgcagtcattgaagctcttgtaaataaaatcccaacagtttgctcagacattgaagtgttcagagagttatttggctcaggagaagttgaatttttcaagttagacgatattaattcactttacgatgcaatttcaagtgcattaaccaagacagatatgtctcgagatgcaagtgccacagcgataagccaaaaattttcttcagaagtgatgtcattgaactatttaagttggtataaaaaattatatgaagaaagaaatttataa

SEQ ID NO: 19636 - DNA, 1179 bp, Escherichia coli
atgaagaaagaaatttataaatatggcacaataatattatgctatggaattaactttatactacctattcttttctttaaagaaataagtttaatattatctccaatagtattatcatcatttttctttgttttggcattgctaatgtattgtcaattcattgttgaatacgggttgcaaatatcattattaagaaagttaaatgaaaataagagtgatttaagtcggcttttatctactattcttggactaaaagtaatactattcgtcctatgcgcagtattcatttattgtattttgctatataataatgaagttatattttttatacttgttttcattctgctaggaaacgtattctcatgccagttcctctatcaagtagttgatcagctccattttttttatgtattaaattcgcttgttaagctaattttcatacccctcatttttatcaatgataattatatctatctgatgatatgttatagttgtttcaatatcctacctaacttagctgcacttgcttattttttatataagaataaagttaaggttgtaaaagttcctgcttgtgaaatttataatttatctaaggaatgttttagctattttatctcgaatatttcgataacattatacactaatttttatcagatcttattaggcattatatcgcccgcttatctggccgcgtatgcattaagtgacaaaattattagggggatcgtgtcagggaattatgtgtttatacagatagtacaagtacaatacttaaatgatgaatcaaagttcatcaatggtacatggaaaacgattgtttcattattattactgggggggatggagtttttatttattttctttggagcggattttttctctcgttatttattccctacaatatctttactgccaatttttctaaaactaatgtcattgctaattgttgttatcttgttgagtaacttttttgcaatggtttatcttccgtgttcaggcaatactttattcctctcacgtgttctgatttttgtttctattgtgtccgtagtagttgccccgatactaatatggctctatgcaggttatggtgcagtcatttccgctatattttcagagttattagttctgattttatgctatggtttatatttgaaattaaaacacaaactctaa

SEQ ID NO: 19637 - DNA, 441 bp, Escherichia coli
atgaatttattgattgttttttgcttttatatttcggttctgcgtagtaataaaataagtgtatttaaattaatcactatcacaactgtcttgattgtatatgtattctggctaatagccgacagttttactggcgttgggataaatgattcagtttatttccatatgttaatgccgcatgagggggcatcggttgaaaatttaacatattatggatttctgattgtaagccttgttatttcaattttcttgattgcttatgtttcttggaaaaagaagcataatagaggattaagtaaaaattactctttttacgtactcttcgctattgtattagttactccatttatgcgtaatttcctggggtcaattaacaatttaatttccgaacagttttctactgaagatataagtaaagagtatgtaatcaatagtaggtga

SEQ ID NO: 19638 - DNA, 447 bp, Escherichia coli
atgcagatggttacactgtttaagcagatccttatcaatgtgctcggcagtaaacaaaccgcaggcgctgttagggatattaaagacgaaatcccgctgctggggattttgataactcacgaacgccgtacctgtgacggcattgttcataacatggatcccatcggtaatgacaccttcatgacggagacgctctataatgagtcggccaaaatcatcattaccaacacatccaaagaagatggcccgatgggacagttttgccacctgagcagcaaaaattgctggcgcaccgctgggaaatggcccgataaactccccaggctgagtgaatttttgatgtgggttgcgggacaaaaactcggccagcaattcgcccatagcgcagatagttattgtcacaaaacccctctcattcctgaagcctttcgcgattggaccaggtaa

SEQ ID NO: 19639 - DNA, 267 bp, Escherichia coli
atgacgggcaaagaggcaattattcattacctggggacgcataagagcttctgtgcacaggacgttgccgcggtaacaggtgcaaccgtaaccagaatcctggtcgttgatggtaaggtctggcgaacggtgtattaccggttcgctaccagagaagaacgggaaggaaaggtgagcacgaatctgatttttaaggagtgtcgccagagtgccgcgatgaaacgggtactgagggtatataaaagaacatcaatgggaacacaatga

SEQ ID NO: 19640 - DNA, 207 bp, Escherichia coli
atggaacgcttcttccgcagtctgaaaacagaatgggtgccgacggatggttacgtaggcaaggacgaggcccggcaacaaattagcggttatatcctgaattattacaatagcgtcaggcctcaccattacaacggtgggttgacgccggaagaatcagagaacagataccgtttttactgtaaaaccgtggccaatattacttga

SEQ ID NO: 19641 - DNA, 348 bp, Escherichia coli; identical to SEQ ID NO: 18868

SEQ ID NO: 19642 - DNA, 384 bp, Escherichia coli
atggaaaagcacggagctgaattgcttttacagcggatgttaggaaataccaccgctactttcagggaagggcaatgggaagccatagatgcagtggttaatcagcggcgaaaactgctggttgtacagcgcaccggctgggggaaaagtgccgtgtacttcatcgccagtaaaatcttccgcgatcgcggcgctggcccgacaattatcatctctcctttgcttgccctgatgcgtaaccaggttgccgccgctgaacggttaggtattacggctgaaacgttgaattctacaaacagggaagaatggcagcgcattagcgataagttgctgcaaggtgaggtcgattgcttgctggtttccccggaacgtttggcaaactag

SEQ ID NO: 19643 - DNA, 567 bp, Escherichia coli
atgcttaaaagacgtgatgcttttttaaagaaaagcgcgctggcagtgagtgtggccctgctgctctcggctcaggctcaggctgttttgacagggcctgttgatgctaattcttccagcttactgattggagaaaactcttttattacgaattcaactggtacagctaataacactttccttttgggaggtggcgcttttaacatggattcaccaggaagtcttcagtttggctctttttcgggagtgtataattctccacacagtgtcaccctgggaagggatgccggtcaggctgagtcaaaatatggtgttgccataggtaagagcgctgaggtacttaattcacagcagagtgttgctattgggggatgggctggaatagaaaattcttcaggctctgtagctctgggccatggctcacaggtgtcgggagaaaataacgtggtatctgttggtgccgggcctgagggatatggagagagtgtcaaaggagcaccggaaacccactctattgtaaacaagacatttttatcttttatattcaatggcttattttcctgctaa

SEQ ID NO: 19644 - DNA, 1800 bp, Escherichia coli
atggtcgctaaattaaaaccagatgtttttgttaatactaatccttttttagaagcaatgtataaggagaggcttagtcataaaggctattctgataaaattgctttaagtattaatgataagaaatataatgtaaactctaaggatattgaaaatattcttgatggcaaaggggatttatttaaaaaacgtacactgtgggagtttgttcgcgatctttttcctggatctcatattaaagaagtcaaaggtttaatttacgaatttgtcacgaaagttgataataaagccgaggtgttcgataagattaaatctctggcaaaaaaagaacaacaatggcgatttagtactaagacagactttaccacaaatgaaaataatgaagttattgtgagtagatcctttaatctctacacgggggctacttcgaatgataacgaaaaaaaacaggtttcttcagagagattaacgcttgataattatattgatgatttacattttgataattctcccttgaagagatttacgtttgatgattatgctgtaaaacttacgacactgattaaaaataaaattcctattattaatacaacaatcaatttatcatcgttgtctaaggatgttttaaattcattaaaatattgtagttttaaaaatgtaattttttcaggagtgataaacagccctaaccttgaaggtccggtttttgaaaattgttatttcgaggattgtaaattcaacaacatacagctttatgagactaatgatgatactgtggggtcaggaaataaaaaaccaataaaaggtatgtttaaaggttgttttatttctaaatgcaaaattgaaaattatagatgtgagacgtctaaaatctacaccgttacacaacctgatagtattcaagaaaaattaggttcttatctctttatgcagtctttcgttcaggattgtataattcagggaggacgttgtcctggttcgagtatacttctgagtcatttttataactgtacgatagcgaaacttgatgctcatgggatggattttttggcaaacgcattcaataagtctggtgataacgaaaccagggcgcaggatcagggaactgtgtttgattgttgtaatttgaatagtattaaaatgaactgtggtcttggtaatgtgagttcagatgaatataagtttaaccccgaagagtatttttctgattacattgaaagaagatcgagaaatcttaagttggatgataatttttctaactgcgtagagaatatcgagaaggctgttacaacttcatttagcaaggaaaattcagagaatgataatatctcctttaattgttgtgatttgaggagggccaatttagacaattattacagagatgatttgtgcaaagactgttctattgatccagattcaatttatttagaagatggtgttacaccgataaaatatatttatatgaatctggacggagctataagtaaagaccaaatacctaatttcttaaaaaaggtaagtgctatcaatagcgatgtaaaagatttttataatactgagctaaagattaaggaagaatataataacgcattttcagatttagagtcgtttttgtctacactttatgttgaaaataaatcgtacaaagagaaatatcattttaataacggtagggctgagttttttattttcaaagatatgcagtataaagcacaaaatatcattactaatatgatagaaagtgaccgaattaagtttattgaatctatcataaaaaaatcattccaccggcagatgtaa

SEQ ID NO: 19645 - DNA, 618 bp, Escherichia coli
atgggttgccagaaagatattgcagagaagatacaaaaacagggaggtgattatttattcgctgtaaaaggaaatcagggtcggctaaataaagcctttgaggaaaaattcccactgaaagaattaaataatccagaacatgacagttacgcaattagtgaaaagagtcacggcagagaagaaatccgtcttcacattgtttgcgatgtccctgatgaacttattgatttcacgtttgaatggaaaggtctgaagaaattatgcgtggcagtctcctttcggtcaataatagcagaacaaaagaaagagccagaaatgacggtcagatatcatatcagttctgctgatttaaccgcagagaagttcgccacagcaatccgaaaccactggcacgtggagaataagctgcactggcgtctggacgtggtaatgaatgaagacgactgcaaaataagaagaggaaatgcagcagaattattttcagggatacggcacatcgctattaatattttgacgaatgataaggtattcaaggcagggttaagacgtaagatgcgaaaagcagccatggacagaaactatctgacgtcagtccttgctgggagcgggctttcgtaa

SEQ ID NO: 19646 - DNA, 201 bp, Escherichia coli; identical to SEQ ID NO: 11564

SEQ ID NO: 19647 - DNA, 873 bp, Escherichia coli
atgaatccgtctgatgccattgaggcaattgaaaaaccgctctcctccctgccttactcactttcccgtcacatcctggaacatctgcgcaaactcacccgtcacgaacccgtgattggcattatgggtaaaagcggggccggtaaatcctcactctgtaatgcactgtttcagggggaggtcaccccggtcagtgatgttcacgccggcacccgggaagtgcggcgcttccgtctgagtggccacggtcacagcatggttatcactgacctgcccggggtgggcgagagccgggacagggatgcagagtatgaagccctgtaccgtgacattctgcccgaactggacctggtgctgtggctgattaaagccgatgaccgcgccctgtctgtggatgagtatttctggcgacacatcctgcaccggggacatcagcaggtgctgtttgtggtgacgcaggccgacaaaacggagccctgccatgaatgggatatggccggtattcagccttctcccgcacaggcacagaatattcgcgaaaaaacggaggcggtattccgtctgttccggcccgtacatccggttgtggccgtatcggcccgcaccggctgggaactggatacgctggtcagtgcgctcatgacagcgcttcccgaccatgccgccagtcccctgatgacccgcctgcaggacgagctgcgcacggaatctgtccggtctcaggcccgtgaacagtttaccggtgcggtggaccggatatttgacacggcggagagcgtctgtgttgcctctgtggctcgtacggttctgcgtgccgtccgtgacaccgtggtctctgttgcccgcgcggtatggaactggattttcttctga

SEQ ID NO: 19648 - DNA, 282 bp, Escherichia coli
atgaaagatttaacactcaaatttgcagacagggccgacttttcggcctttatggagagtattggctattatgatgacgagtcgatgcaggatgatattcttattgacgtgataggtaacgtgtacaaagaaaccggagaactgactgaagatggcgaaccggtatgtgttaaggaagacggatattttgtaaacgtgcgcatcattaatgatgtaaaaaaatcgtcaatattcgataaatacgcggttgttgttgagcatcaacttcgtggctggatgtga

SEQ ID NO: 19649 - DNA, 450 bp, Escherichia coli
atgatttcaactgacgataattttaatcataagttcagaacgatatcgaggtatcgcgattttgtaaactccccatcagtactgaatataattgcaactattattgcctataacgaatgtgagggatggttaaagtcattaaaggcacatattgcctctaacattcaattcacccagcagtatctgaatgaaaatattccagaattgatcgtaaggccagctgatggttgctatttttcctggatagattgttctgctattggttatccttttgatgaattttacagtcgattaattcatgaaggcaaagtgggcattatggcggggcatgtctatggaacggagggggagggctaccttcgtctgaacctggcctgcggtcgagaaaaattatatatggggcttacgcgtcttgtgagtgtaattaaaaatattaatcagggagaataa

SEQ ID NO: 19650 - DNA, 1041 bp, Escherichia coli
atggtttctgaaactgtaacgattacgttctataaaattcaaaaatgtggttactaccgttacggtgttgtaagccctgcatttggtggttgtgacgagttgctcacagatcttgctttatgggcagaagggaaaaaactcaaacagacaaagacatatgaagcaaatgatgaggttttacctgcttatcttctggatatgaaacgtgctggtgacaatgtggttttgttgctctggaatgaggttccttctacagatcaaagtgttccatcggttcaggaagatacagaatttggtacggacccaacagtaatacttaattcaatccagaagggaagtattcctggttttgctacttacttttggtttattccatccatggatttagtggctagcatcaagtttaaccatgctttgacgggacagaaggcgatgcaatgctatctctatcattttttaaaacagtcatcaagccacgttgtggcggaaagtgtggagaaggaagatggcacgcatgaggtggttatcaagggctataaaattaacccaacagatgatgtgctgccaaagaaaaaacactatccacagttcgtagctggtttagtaagaaatcctggtaaacatgaagttattaggcagaatgctaatattgtttctaaaattgaaaaggttgttgaacttgatgtgtcaaaacctgacgagtttagcctgtggcaaaaactattgattaatatgaatattagccatccacaaactgcaaatacctcaacaaaaattagatatgaactttctccgaatgttgatattgatgacatcgaggggatgattgatgattggaataaacatagcgatacaaactcttgtgattatggttttgtatttaaaggagatccaacgacatattggctcagtcgttcattagcacgaaccaaattccacttgaatttggagcgacaggacgccgagtttgtgtcctcggaatctcttctttctgaacttgtaggcaaaagggagctcatattacgcgaggcgggaatgtag

SEQ ID NO: 19651 - DNA, 483 bp, Escherichia coli
atggtcgttctgattttttctgcctattttgggaagaatgttcccttctcatcccagtggcctctttatgaggccctgcgaactacagcatccattatctttgcagttgtgggagcttggtttgcgataatctatcctgaacgattaaaaaaatcatttagaggtggcagttcagcgagtgaatctaatggcagtgggattacaaggttatttacaccaattgtacattctactgctattttagcatcagttttaattattggcgttgttgcgccattagtaaaacagataccgttttttatagatcacaaggacatttttaggggcgcgtcatatgccattttggtttttttaactttatggcaactgttgacagtaatttatagtctcattggtcctgatatggttaaaagacataactcgttccaagagagagagaaagatgctgctaattctatattacctgtcaataaacgcaaataa

SEQ ID NO: 19652 - DNA, 1527 bp, Escherichia coli
atgattttgataaaaatcattaggggattcatcagggcattaggtattctgggtactttcattggtattattattgggttactcaattttaatactgaaagtattgataccagcatccccgtattattaggcggcctaaaaacagcattcattacaagcattgtaggtatgttttttgccattttatttaatggaatggatgctttcttttttgccaataaacgaagtgcgttagcagaaaataaccctgaatctgttacacctgaacatatctatcatgaattaaaagagcagaaccagactctgactaaattagtctcgggtattaacggtgatagtgaaggttctcttattgctcaaataaaattactacgtactgagattagcgattcctcgcaggcacaattagctaatcacactcatttcagtaataagctttgggaacaacttgaacaatttgcagatctaatggcaaaaggtgctacagaacaaattattgatgctttacgacaagtcattattgattttaatgaaaatttaactgaacagtttggtgaaaactttaaagcacttgatgcctctgtaaaaaaacttgttgagtggcaggaaaattataaaacgcaagttgagctgatgtcagaacaatatcaacaaagtgtcgagtctctggttgaaacaaaaactgcggttgccgggatttgggaagaatgtaaagaaattcctctggctatgtctgaactgcgtgaagtgcttcaggtgaaccaacatcaaatcagcgaactctcccgccatttagaaacctttgtcgccatccgcgataaagctacaaccgtattacctgaaatacagaacaaaatggctgaagtgggtgaactgctgaaatccggagctgcaaatgttagtgcatctcttgagcaaaccagccagcaaatacttcttaatgcagattcaatgcgcgtggccctggatgaaggtaccgaaggattcagacaatcggttacccaaacacaacaagcatttgcctcgatggcacatgatgtcagcaattcctccgaaactctaaccagcacgttaggtgaaacaattactgaaatgaaacaaagtggtgaagaattcctgaagtcactagagtcgcactcgaaagaattgcatagaaatatggaacaaaatacgactaatgtaattgatatgttcagtaagactggtgaaaagattaaccatcaactatccagtaatgccgataatatgtttgattcaatccagacatcatttgataaggcaagtgcagggctgacttctcaagtcagagaatcaattgaaaaatttgctctatccatcaacgagcagttacatgcttttgagcaagcaactgaacgtgagatgaaccgtgaaatgcaatcattaggtaatgctctgctttcaatcagcaaaggttttgtcggtaactatgaaaaacttattaaagattaccaaataattatggggcagttacaagcattaatttctgctaataaacatcgagggtaa

SEQ ID NO: 19653 - DNA, 147 bp, Escherichia coli
atgtctgaaatcacagcctcccgtccggaagtggtcaacggggacattatctgctccacctcagtcagccacattctggctgtacaaaagagtacacagctgcaaatcgacacacttatccggcatcaagtgagcgatatcagttaa

SEQ ID NO: 19654 - DNA, 2172 bp, Escherichia coli
atgctaccgatcaaaacaaagctgttaagatatgtgtccacattgccatttgttgcaaaaaaatttgaaaaagcatggctatttattgataacgaaataagagcagatgataatgcggagcatttttatcgttatgtttcaaaggttcatcctaagggaaaaatatattttcttttaaataaaaaatctgccgattggaaacggcttaaaaatgatggctttaaattaattaagttcggaggtttctttcatagagttttattaataaactctcaatatcttctttcatctcatgctaatccagctatcgtaaattatcttccgcgaaatcattattccgatataatgaaatacaaatttgtatttctccagcatggtattactaaagatgatcaatcagaatggttgaatagccgtaaaatagattatcttgttaccgcatcgacgtatgaatatgaagatatatcaagaagaggtcgataccgatatacaacgcaagaaacagtactaacagggttccctagatatgataatttagttaaaaatactatatctaaaaaacaaatcttaattatgcctacctggaggaaagatcttgctggagagcttcagaaaaaaagtagtaaacgtgtaaaaaatccacaatttagtaattccattttttgtgagatgtggggtggttttttaagatctgacaatctaaagaaagcatgtttcgataaaggatatactgtaattttttatccccaccctaatcttgttgattatattgaggatttgaatatacctgattatataaaaataggtgatttatctacaggaagcattcaaactgcttttaaagatgctgatttgcttataacagattattcatctgtagcatttgatatcgcttatatgaaaaagcctattatatactttcaatttgatagtgatactttttttgccagtcattcttattcaaaagggtatttcgattattataaacttggttttggaccagtagttaaagacattgagatgttaaatacacaattattgtccatattagatagtaattgtgttatatctccatattatgaagagcggatagacaattttttcccttataatgatcgtgacaattcctctcgcctatatgaaatattgagtcacgcaataacacaatcttatgatgttaatacgctgttggattatctacatttatttacgcatcaacttgacataaatagtatcatatttatatttaacacatttagtgtggagttgaacagtatacctaccaattatcatgagcgtttacttggtatatttgaaggattggattttattaatattgagattgagtgctctgagtttactaaggaaataacgtcactttcaaattcattgtctataagaattgcaccaaaagaaaacctcaagaaatttaatgttggtgatgatttatcctgctattctaattggataggtagaaaacaagaaaaactgatgcgtgcttttcagtctccagaaaacagccgattaataaattatataaatagtattaaaatattcttatcaaattataccaaacatgcttattcacaggcggttttgatttatgagaaagagttacttagttacaaaataccattaagctcgcgaattacaaaaatttacattatatcattagttcgaagtgataaaattaatgcggctattaatattataaaaaaaacacagttagataacatagataagcataaaattcttatggagctttatgattatcatgctcccattcataaatctgctttggatatagaatgtttaatgcctacagataatggaaaaaaagaagctttggaagccttcttaacattgagtaaaacaattccaaatgatttttatttgaactttaataatgtaaatgaaatgccatatatggtgttggagtattatctcaataatctatactataaaaaacaatatgcggatttttattctgcgctcaacagaacgacaaataaagagcactatctggattcaatagaaaatacttatagatatttaactactgttttcaaattattaggaattgatgttttcataaaagagttattccataagtatggaaaagaaaatcttgtgaaatctttagatgaattattcataaaaaataataattga

SEQ ID NO: 19655 - DNA, 789 bp, Escherichia coli
gtgactcatgtaagttttcaaaatatcaacggctatatagatgacattcgttattgtgtcgctaattttgatattgagctgggtaattataatatgtttacaccaagtcaacttaaaatgaagggggataatactaataaaatttatcttaagggtaataaagttccagatggaatagatctgatttttacagaaaaggccaaaaactgtaatgtttttattgatgatggtgttacagccaaatcaagcaaaatatcattaaaaaatgataataactttctttatttaggtaaaaatacggcacttaataaagttaacgcagttttgttaggtcgtggcgattttattattgttggtgaaggtatatccataacatcaaacaatatttggagtactggttataattcaggaaagcctaataatggcctaattatcggcgatcattgtcttatagcatcggaagtgatcattcggccagctgatgggcatttagtcattgatatagaaactgaacagcaattgaatatatctcatagaccaattattattgaaccttattgttggatttcacaacgagtatctattctaaaaaatgttcgcgtaggtgcctgttctattatttctttaggttcagttgtgacaaaatcttgtgaaaaatttagctcgctttatggcgtcccagcaaaacctattccattagatgggaaaatgtggctacgaggtcctggaaaggaagcaaaattaattcaacagtattataaagaaaggttttataataaaaacaactaa

SEQ ID NO: 19656 - DNA, 522 bp, Escherichia coli
ttgaacgatagatatacaacaaacgaaattgcagaacgtatgggagttaatgacagtactgtaagccgtgaatgggcaaaacgaggaatgccacacccaaagaaagcaagtaaaaaagaaatagatcaatggatactaattaatattatccaaccattgcgaaatactgatgtaaaagaacagattgaaaaagagaaattacgcaagatatcacttgaagcagatttagttgagattgaattaaatatcagtactgaaaaggtattgagtactgattatgtaactcaaacactaactggttattttgcagcactacgcggagtactaagaagtattccggcatctatctatgtagaactatttgaaagtgaagatgcggatacattgcggataaaactagaagaaaggattgatgagaaactaaggggattaggatcatatgagtacgaagaacagccagaagaagatgatgaagattctgaaccagagtctgaaatcaatattacccccaccgaagattaa

SEQ ID NO: 19657 - DNA, 504 bp, Escherichia coli
atgaatcagaagctcatccaaacagtcatttctgagtgtcatcgtatagaagaggacgctctgtactcttctaaatctcattataatgtttctgatagatgggataagctgaatctgtggttcggtgtaccattagcaatcttaaccgctttgagtggtattgccgcaatcaagagtacagccaatgctgttgtagctatttccataactgctacaattctaactgcattaaatacgtctcttaacccaagtaagcgtgctgcacttcataaatcagcagcaaatgaatataataaattaaagaatgaagttagaatatttagggaaatattgacttctaattttgattttactgataaaactttgattgaaaaacttacgagttactctgatcgacgcaatcaacttaattcaagttcgccaaatattcctcggtgggcttatgagaaaactcaaagagatgttaaccaaggctttactaagtataatattgacaaggaataa

SEQ ID NO: 19658 - DNA, 777 bp, Escherichia coli
atgacagtcagtacctatcttgagtctattaaaagcaatgcttatcaaagagatattacaataacgaattcaattgcaaccataaaaaacagactgaatggttattttgctggtgaacttgttagtcattttgtatttggctcatattcacgtaatacaatgcttcctcgtagctatgatccttcttctgatgttgattatatggttgtattcaaaaatgtaatatatcagcctcagacctacctaaacaagctaagggattttgtaaattattactatcgtacatctgaaataaagcaaagccaccctactattcaattgaaccttaatcatattactttcgagcttgtccctgcatctcataatattttatttggttatcaaatcccttccaaccaggattttttgaaccgttggatgaataccgatcccaatgcgttcaatactgatttaactaattgcaataaaaataataacaatttaattaagcctcttattcgcataatgaaatattggaatgccaatgcaggttatgtctttgagtcgtatcaacttgaaaaagatattgttagctttaactatttttggtgctctacccttaaagaatatttttactctgctgtagaacaactttcaggttcctattatctcgcacaatggaaaaaagataagattcagcatctaaaaaattcagttatgatgtcaaaatattatgagcagttaaacaatcattttgccgccgaaaatgaaataaagaaaattttacccataaaataa

SEQ ID NO: 19659 - DNA, 675 bp, Escherichia coli
atggagtggaagaaagagcttagagcaaagtttgaaagagacgaacttagaagattaatttctaatgtaaactggattatattcaaacctaaaataaaaaagcaattagaaatactatcaacccaattatcaggagagcatgtaagatttaatataattgatatgcaagatgaaccagatggttatggttttgattgcctgacatttcagatcgctgatcgtatgactggaaatatgcggcaggaaaaaactaccgaaagcataaagtttaatcatcattggcaaaaaggagccgcactttcaattacatatagtgcgacgggggctgtgcatataattctttttccgtctacttcagatgattcattagcaacacatgattccttgattgtccatcattcatataacgttaaacacataacaccaaaaaaaatagagaaagcagtaaagaatttacttcattatcaccgtgttacaggtgttttacacaaggccgcattaaaagatttaattttaatccgcttactgaaaattaagatgttttttattcagtataacgacaaagagaacaagtttagaagagttacagcattatatatacctacattaagtcttatagtttcgttggctgccgcagtagcatctattctggcattagtatctgttaaatcatga

SEQ ID NO: 19660 - DNA, 804 bp, Escherichia coli
atgaaatttgtctctgaaagaattgaccatgtaaaaatagctaatggatattgtgtaatatgtggtaattttggaaaattaaaaaaagaccatgttcccccgcaatgtgcatctaaaccttcacctatgttacaaaaaacgatttctgagtatttctctaatactcgagtaccaccaattaaagcaaaaagcgggacaacttttcgtaccatttgtcacaattgtaactcgaatattttaggatcaatggatgcagaaataggccgtgttacaactgaattcatcgaaaagttaaatgattattttagtggtaagttcttttacaaaaattatatttcattaaaatttgatgcggataaatttctaagagcaatgattggacaccttctggctgcaacttcagtaaaagattgtatgaagcctattgttgatagtcctttttatactccattgagaaattttgtattaggcaggaatccagacattggggcaactcataatatttactattggttttatccattcagaaaacaaattactgctcagtcagttacattctacaataatggacatcatagtatatgttcttgcttacattttttcccaatatcttttttggttacactgaaggagcaaggaacatttcctattcatgcaactgaaatgactcaatatgatcaatctcttcattttaatatgacaacggctaatattgattatgcttcatttccctttgtaggtttaaagaataatcaatttatgatggtaatttctggtcatacttgtgttagttatcctaaatga

SEQ ID NO: 19661 - DNA, 552 bp, Escherichia coli
atggaagctgaaaccattacacaactcattgcagtcggtggtactttaggcggtgcattaatagctgcgggtgtaacattggcaagccaattaatcactaaaaaatatgagaacgaaaaactaaaaaaacaacttttattcaaaatactcgaagatgaattaaaagaaaaaaagcaaactattaaacctttcattcagtttattaattctttgaatcttccagaaaattttaatttttatgatgatggtgatcttttagatcaaattatgctttataaacaggatttaattaaaagtaaagcaagtgacttccttctcgattatacattatacatgacaccacaaattcacgatgcgatttgggcggttactaatgctataaatgattttgaagaattgggagcacggttttatgattcatcattgagtaaacaagaaaacgatgaaatattacttaaaaattgtagcggtaagccaactgaaatttgggaggctttgatgaaattgaaaggcttgctctatagtgaagttaacatagctgataaattatga

SEQ ID NO: 19662 - DNA, 702 bp, Escherichia coli
atgaatataaaaactataaactctactcttgtcggcattgttgcagtacttctgtttttagcagtcttagtactcgttaaggttctattcgctggtagcagggggtttgaatgggggaacgcagctgatttaacaagtgcgttatgcaatatcgtgattgcgtctacagctctttgtgctgcttttgtagcaaataattggttcgttcagaataaaaaattaaaatccctttctacctcacatcagttggctatgaaatttgagatgcagttatgggaaataaattcacgtttatataatgatggtatagttcgtgcttccatcaggaaatatgttcaggataataaagaactgacagatgaaataaaatctaaagttgctgctgaaattaataaaaaggccacaagtgatttatctgaacttgctaacctatatacgacaaggtcaatgctggccaggtttgatattaagttaagcgaacggcttgaaaatttatttaaagatatattagagttaaggcagtcatatttagacaatcaatatatatatctattgaccatatgcaaacatattaattgccccaagcatgaggacgtaattgcagctacagaaaatcttgaaagtgttaaaagagagctagctgccatatttcagtacgagctatgtgaaacaaatattgatactgattattcgttcagctaa

SEQ ID NO: 19663 - DNA, 822 bp, Escherichia coli
atgcttggggagtcatttaatcaattcatggtagagtcttatttgtccagtacctcaataggtggtgggcttactgctgtgcggaaatgtagagcacatgataaaggtagcttctatagcagcttctttcaattatcaattggcatagaaaggttttttaagattatcttcatactcaatcatatgatcgaaaataatcttgagaagccagacttccgtacacttaaaaaattcagccataatattgcggagcttcataaaaactgttcaagctatggtgccagccatttacccaatttggagtgggaattaaactggcagcaaaacctcatattagaaatgctttctgaattcgctgatgcttcaagatattataatcttgataaaattgtaaaaggcaaaaaagaagtcaaagatccgttagcacagtggaacgaaataattaattcttgcttccgtaaacacattactgattctagaaaacaaaaactagaaagagaattaaatttatgggccgacaaatacaaagcatacggttacacatggaatagaggtcttgatggtgcgattttaagccaaattgatgagtatatactttcctggaaaataataaacgtttcaccttatattgtgtttgaaatcattgatatgttgcagccttattattatctaatttctaaatttaaagatgatattgacaacattgagcacagtaaagggataagagaacctctggttccatatctccatgagatatttgtatttctacttgtccataagaagttagctttgagtagaaaaacatggagtttccgttattaa

SEQ ID NO: 19664 - DNA, 744 bp, Escherichia coli
atgcttaatattaaaaaatataatttaatactactaagtaccgtactattactgctgctaattgctatattagttggtgtaaaaatattattttctggttcgaaaggatgggagtgggtaactttaattggaacattatgtagtgctgtaggtacattaggtacactatgggtagcctaccaagcatacctaaaagcacctgaatggttgtcgcaaaaacattatgatgtagtatatggtgttattgagaaagcaatttatcaagatcttaataaagtacgtacttcaaccttaattttaaaacatcaattagtgacattctccaaaaaatatcgcaatcatttaaaaaacgagaccataccccaagattcacatgatgagtttatgaaggaaacagatgctcttgtttccgatttattcttcacttcttactccgttattaattccttaaaatctattgatagaactaattatgctttaagcgaatacacaaaaaacattattgctgaacttaaattaaatattgatgaatataacggactgagtatcgatttctatattgcaagttctgaggttcctgcacttatacaggccgatgaatgtgtgagggatcaaactagtagtgagcttttcgttatacagtcaaaagcaatttcacttcacaataagatttcatctttcataaaagatatatatgatgataactatccaattgataacttcataactctaaagaaaaaatga

SEQ ID NO: 19665 - DNA, 2601 bp, Escherichia coli
atgagcacaaaaccactcttcctgttacggaaagcgaaaaaatcatccggtgaacctgacgtcgtcctgtgggcaagcaacgattttgaatcgacctgtgccactctggactacctgatcgttaagtcaggtaaaaaactgagcagctattttaaagctgttgccacgaattttcctgtcgttaatgacctgcccgctgaaggtgagatcgattttacctggagtgaacgctatcaactcagcaaagactccatgacatgggaactaaaaccgggagcagcaccagacaacgctcattatcaaggcaataccaacgtcaacggcgaagacatgactgagattgaggagaatatgctaatcccaatttctggccaggaactgcccattcgttggcttgctcaacacggcagcgaaaaaccggtaacgcacgtttcacgcgacggactccaggcattacacattgctcgggctgaagaactaccggctgttactgccctggctgtttcccacaaaaccagcctgctcgacccgctggaaattcgcgaactccacaaactggttcgtgacactgacaaagttttccctaatcctggtaattcaaacctgggactgataactgcttttttcgaagcatacctgaacgctgactacaccgatcgaggactgctgacaaaagagtggatgaagggtaatcgtgtttcacacatcactcgcacggcttccggtgctaatgctggcggcggaaacctcaccgatcgcggcgaaggtttcgtacacgatctgacgtcactggcgcgcgacgtagccactggcgtactggcccgttcaatggatctggacatctataaccttcatccggcacacgctaaacgcattgaggaaattatcgctgaaaataaaccgcccttttctgttttccgcgacaaattcatcaccatgcctggcgggctggattattcccgcgccatcgtggttgcgtccgtaaaagaagcaccaattgggatcgaggtcatccccgcgcacgtcactgaatatctgaacaaagtactgactgaaaccgatcatgccaaccctgatccggaaatcgtggatattgcctgcggtcgctcctctgccccgatgccgcagcgagtaacagaagaaggaaaacaggatgatgaagaaaaaccgcaaccatctggaacaacggcagttgaacagggagaggctgaaacaatggaaccggacgcaactgaacatcatcaggacacgcagccgctggatgctcagtcacaggtaaattctgttgatgcgaaatatcaggaactgcgggcagaactccatgaagcccggaaaaacattccatcaaaaaatcctgtcgatgccgataaattgcttgctgcatcacgtggtgaatttgttgacggaattagcgacccgaacgatccgaaatgggtaaaggggatccagactcgcgattgtgtgtaccagaaccagccagaaacggaaaaaaccagcccagatatgaatcaacctgagccagtagtgcaacaggaaccggaaatagcctgcaatgcctgcggccagactggcggggataactgccctgactgtggtgcggtgatgggcgacgcaacataccaggaaacattcgatgaagagagtcaggttgaagctaaggaaaatgatccggaggaaatggaaggcgctgaacatccgcacaatgagaatgctggcagcgatccgcatcacgattgcagtgatgaaactggcgaagtcgcagatcccgtaatcgtagaagacatagagccaggtatttattacggaatttcgaatgagaattaccacgcgggtcccggtatcagtaagtctcagctcgatgacattgctgatactccggcactatatttgtggcgtaaaaatgcccccgtggacaccacaaagacaaaaacgctcgatttaggaactgctttccactgccgggtacttgaaccggaagaattcagtaaccgctttatcgtagcacctgaatttaaccgccgtacaaacgccggaaaagaagaagagaaagcgtttctgatggaatgcgcaagcacaggaaaaacggttatcactgcggaagaaggccggaaaattgaactcatgtatcaaagcgttatggctttgccgctggggcaatggcttgttgaaagcgccggacacgctgaatcatcaatttactgggaagatcctgaaacaggaattttgtgtcggtgccgtccggacaaaattatccctgaatttcactggatcatggacgtgaaaactacggcggatattcaacgattcaaaaccgcttattacgactaccgctatcacgttcaggatgcattctacagtgacggttatgaagcacagtttggagtgcagccaactttcgtttttctggttgccagcacaactattgaatgcggacgttatccggttgaaattttcatgatgggcgaagaagcaaaactggcaggtcaacaggaatatcaccgcaatctgcgaaccctgtctgactgcctgaataccgatgaatggccagctattaagacattatcactgccccgctgggctaaggaatatgcaaatgactaa

SEQ ID NO: 19666 - DNA, 1206 bp, Escherichia coli
atgatcctagatgccagttatacattattagtcgcatgtatcgcgctactcataggaatgtttgtcgtaaaatttaccccgttcctacaaaaaaaccacataccagaagccgtcgttggtggctttattgttgcaattgttctgttaattattgataaaacatcaggttattcgtttacttttgatgcttcattgcaaagtttattaatgctcacattcttttcctctatcgggctaagttctgacttttctcgactgattaaaggaggaaagccgttagttctattaactattgcagtaacgatcctaatcgccattcaaaatactgtcggcatgagtatggctgtcatgatgaatgaaagtccatttattggcttaattgcaggttcaattactctaacaggtggtcatggtaatgccggagcatggggccctattctcgctgataaatatggtgtaacaggcgccgttgaattagcgatggcttgtgcaacacttggattagtgttgggtggtttagttggcggccctgttgcccgtcatcttttgaaaaaggtctctattcctaaaacaaccgagcaagagcgcgacactatcgttgaagcttttgagcaaccaagcgtcaaaagaaaaatcaatgcaaataacgttattgaaaccatttcaatgctgattatctgtattgttgttggtggctatatcagtgcattgtttaaagatacttttctgcaactgcctacttttgtctggtgtttatttgtcggtattattatccgtaatacactgactcatgtatttaaacacgaagtgtttgagccgaccgtcgatgtattaggtagcgttgctttatcgcttttcttggcaatggcgttaatgtcattaaaatttggtcaattggcaagcatggcagggccagtattaattatcattgctgtacaaactgttgtcatggtgctatttgcctgctttgtcaccttcaaaatgatgggcaaagattatgatgctgtcgtgatcagcgcgggtcactgtggctttggtatgggagcaacaccaacagcaattgcgaatatgcaaacagtcacaaaagcatttggaccatcacataaagctttccttgtcgttcctatggtcggtgcctttattgttgatatttcaaacagtatcttaattaaaatatttattgaaattggtacatactttacctaa

SEQ ID NO: 19667 - DNA, 126 bp, Escherichia coli
atgaaattaagacatctcgatatcttttatgctgtaatgacttgtggttccttaacgcgtgcggctgaagttttacatatttctcaacccgcggcgagtaaagcactcaaacatgctgagcactga

SEQ ID NO: 19668 - DNA, 1107 bp, Escherichia coli
gtgaacaccgttggcaaatcggcattcgtggaggctgttggtcagccgagtgatgatgcatccggctatctggattttttcaaaggcgagatagggaaaacccatctggctcaggagctgtggacgcagattgataacggtcagcttgcgcctgacctggctgaaatcaggacgtccattacggatgtcagcaatgaaatcacacagaccgtcaataagaaactggaagaccagagtgcagcgatccagcagatacagaaggttcaggttgatacaaataataacctgaacagcatgtgggcagtgaagctgcagcagatgcaggacggacgcctttatattgcgggtatcggtgccggtattgagaacacccccgacggcatgcagagtcaggtgctgctggcggcagacaggattgcgatgattaatcctgcgaatggcaacacaaagccgatgtttgttggtcagggcgatcagatattcatgaatgacgtgttcctgaaatatctgacggctcccaccattaccagcggcggtaatcctccggcattttccctgacaccggacgggcgactgacggcgaaaaatgcggatatcagtggcagtgtgaatgcgaacgccgggacgctcaacaacgttacgataaatgagaactgtcagattaaagggaaactgtcagccaaccagattgaaggcgatattgtcaaaacagtgggtaaggctttcccgcgggactcccgggcaccggagcggtggccatcagggaccattaccgtcaggatttatgacgatcagccgtttgaccggcagattgttattccggcggtggcattcagcggtgctaaacatgagagagagcatactgatatttactcctcatgccgtctgatagtgcggaaaaacggtgctgaaatttataaccgtaccgcgctggataatacgctgatttacagtggcgttattgatatgccagctggtcacggccacatgacgctggagttttcggtgtcagcatggctggtaaatgactggtatcccacagcaagtatcagcgatttgctggttgtggtgatgaagaaagccaccgcaggcatcagtatcagctga

SEQ ID NO: 19669 - DNA, 1107 bp, Escherichia coli
gtgaacaccgttggcaaatcggcattcgtggaggctgttggtcagccgagtgatgatgcatccggctatctggattttttcaaaggcgagatagggaaaacccatctggctcaggagctgtggacgcagattgataacggtcagcttgcgcctgacctggcggaaatcagaacgtccatcacggatgtcagcaatgaaataacacagaccgtcaataagaaactggaagaccagagtgcagcgatccagcagatacagaaggttcaggttgatacaaataataacctgaacagcatgtgggctgtgaagctgcagcagatgcaggacggacgcctttatatcgcgggtattggtgccggtattgaaaacacccctgacggcatgcagagtcaggtgctgctggcggcagacaggattgcgatgattaatcctgcgaatggcaacacaaagccgatgtttgttggtcagggcgatcagatatttatgaatgaagtgttcctgaaatatctgacggctcccaccattaccagcggcggtaatcctccggcattttccctgacaccggacgggcggctgacggcgaaaaatgccgatatcagcggtaacgtgaatgcgaactccgggacgctcaacaacgtcacgattaacgagaactgccgggttctgggaaaactgtccgcgaaccagattgaaggcgatctcgttaaaacagtgggcaaagctttcccccgggactcccgtgcaccggaacggtggccatcagggaccattaccgtcaggatttatgacgatcagccgtttgaccggcagattgttattccggcggtggcattcagcggcgctaaacatgagagagagcatactgatatttactcctcatgccgtctgatagtgcggaaaaacggtgctgaaatttataaccgtaccgcgctggataatacgctgatttacagtggcgttattgatatgcctgccggtcacggtcacatgacgctggagttttcggtgtcagcatggctggtaaatgactggtatcccacagcaagtatcagcgatttgctggttgtggtgatgaagaaagccaccgcaggcatcagtatcagctga

SEQ ID NO: 19670 - DNA, 1281 bp, Escherichia coli
atggatggctggcgaaacaacgcagaagtggcgcgcggaacaagccgttcgccggagatatggccgggacggcgaattgcgctgacggggcatccgcaggcgaacctgaaccgggaatggcaggtggtggcaagtgaactgcacggcgagcagccgcaggcggtgccgggacgcagtggttcaggtaccacgctgaataaccactttgcggtaataccggcagacagaacatggcggccacagccgttgctgaaaccgctggtggacggcccgcagagcgccgtcgtgacgggaccggcaggagaagaaatcttctgtgatgaacatggccgcgtgcgggtgaaatttaactgggaccgttataacccgtcaaaccaggacagttcatgctggatccgtgtggcacaggcgtgggcaggcaccgggtttggtaacctggcgataccgcgtgtgggtcaggaggtcattgtggacttcctcaacggcgatccggaccagccgattattatggggcgcacctaccaccaggaaaaccgcacccccggcagcctgccgggaacaaagacgcaaatgaccattcgttcaaaaacctataagggcagcgggtttaatgaactgaagtttgacgatgcgacagggaaagaacaggtctacatccacgcgcagaagaacatgaacaccgaggtgctgaataaccgcaccacggatgtgataaacaaccatgctgagaccatcggcaacaatcaggtgattgcggttaccaacaatcagatacagacggtgggcgttaaccagatagagacggtgggcagtaaccagatcattaaagtgggctctgttcaggtggaaacgattggacttgttcgtgcgctgactgtgggcgtggcgtatcagacgacggtaggtggcattatgaacacctcggtggccctgatgcagtcctcgcagatcggtttgcataaatcgttgatggtcgggctgggttatgacgtcaaagtcggaaataacgttaccttcaccgttggtaaaacgaaaaaggatgataccgggcagaccgcgatttactccgccggtgagcatctggaactctgctgtggtaaggcaaggctggtgctgactaaggacggacaaatttttctcaacggcacaaaaattcatttgcagggtaaggagcaggttaatggtgactcactgttgattaactggaactgtgcagcctcgaaatccccaccgaagacccctgatgaaaagcaggatacgccggatatgagagagtactga

SEQ ID NO: 19671 - DNA, 1041 bp, Escherichia coli
gtgaacaccgttggcaaatcggcattcgtggaggccgtcggtcgggcgagcgatgatgcggaaggttacctggattttttcaaaggcaagataaccgaatcccatctcggtaaagagctgctggaaaaagtcgacctgacggaggataacgccagcagactggatgagttttcgaaagagtggaaggatgctaacgataagtggaatgccatgtggggcgtcaaaattgagcagaccaaagacggcaaacattatgtcgcgggtattggcctcagcatggaggatacagaggaaggcaaactgagccagtttctggttgccgccaatcgtatcgcgtttattgacccggcaaacgggaatgaaacgccgatgtttgtggcgcagggcaaccagatattcatgaacgacgtgttcctgaagcgcctgacggcccccaccattaccagcggtggaaatccaccggtattttccctgacatcagacggaaagctgaccgctaaaaatgcggatatcagtggcagtgtgaatgcgaacgccgggacgctcaacaatgtcacggtaaatgaaaactgtacaattaagggcatgctggaggcgactcaggtcagaggtgacttcgttaaagctgtatccaaatcatttccgaaacaggctggtacgtggggtaacacggaaacaccaaacgggacggttacagtcaccatcagcgatgatcataactttgaccgtcaaatcattattccgcccattatctttaacggaatagcgtatagcgatccgggaagtggtaataacccgggaggtacaagatacacgggttatggttttgaagttcgcaaaaacggtgtattaatcgcatccagagaaactaaaggggccattcccggtagctacagtgcggttattgatatgccgagtggcaggggaagcgtcactctggagtttaaggttttccataaaggcaatcagtgggcaggtaatatcaccgactgtacggtgattgtgaccaaaaaagccgcttccggcatcagtattcgttga

SEQ ID NO: 19672 - DNA, 486 bp, Escherichia coli
atgacaaccgtttcgcataattccaccacaccttctgtttccgtaaccgctgtatcagagaataacccgcctcaactggttgccaccctcgtccctgatgaacagcgcatcagcttctggccgcagcactttggcctcattccacagtgggtgaccctggagccccgtgtcttcggctggatggaccgtctgtgcgaagactactgcggtggtatctggaatctgtacaccctgaacaacggcggggcatttatggcacccgaaccggatgacgatgatgacgaaacatgggtactgttcaatgccatgaacggtaaccgcgctgaaatgagtccggaagctgccggcattgctgcctgtctgatgacgtacagtcatcatgcctgtcgtacggagtgttatgccatgacggtccattattaccggctgcgggattacgccctgcagcatccggaatgcagcgccattatgcgcatcatcgactga

SEQ ID NO: 19673 - DNA, 1209 bp, Escherichia coli
atgtgcgaactcgatattttacacgactctctttaccaattctgccccgaattacacttaaaacgactcaacagcttaacgttggcttgccacgccttacttgactgtaaaactctcactcttaccgaacttggccgtaacctgccaaccaaagcgagaacaaaacataacatcaaacgaatcgaccgattgttaggtaatcgtcacctccacaaagagcgactcgctgtataccgttggcatgctagctttatctgttcgggcaatacgatgcccattgtacttgttgactggtctgatatccgtgagcaaaaacggcttatggtattgcgagcttcagtcgcactacacggtcgttctgttactctttatgagaaagcgttcccgctttcagagcaatgttcaaagaaagctcatgaccaatttctagccgaccttgcgagcattctaccgagtaacaccacaccgctcattgtcagtgatgctggctttaaagtgccatggtataaatccgttgagaagctgggttggtactggttaagtcgagtaagaggaaaagtacaatatgcagacctaggagcggaaaactggaaacctatcagcaacttacatgatatgtcatctagtcactcaaagactttaggctataagaggctgactaaaagcaatccaatctcatgccaaattctattgtataaatctcgctctaaaggccgaaaaaatcagcgctcgacacggactcattgtcaccacccgtcacctaaaatctactcagcgtcggcaaaggagccatggattctagcaactaacttacctgttgaaattcgaacacccaaacaacttgttaatatctattcgaagcgaatgcagattgaagaaaccttccgagacttgaaaagtcctgcctacggactaggcctacgccatagccgaacgagcagctcagagcgttttgatatcatgctgctaatcgccctgatgcttcaactaacatgttggcttgcgggcgttcatgctcagaaacaaggttgggacaagcacttccaggctaacacagtcagaaatcgaaacgtactctcaacagttcgcttaggcatggaagttttgcggcattctggctacacaataacaagggaagactcactcgtggctgcaaccctgcttactcaaaatctattcacacatggttacgttttggggaaattatga

SEQ ID NO: 19674 - DNA, 600 bp, Escherichia coli
atgtctccggaggactggctgcaggcagaaatgcagggtgagattgtggcgctggtccacagccaccccggtggtctgccctggctgagtgaggctgaccggcggctgcaggtgcagagtgatttgccgtggtggctggtctgccggggggcgattcacaagttccgctgtgtgccgtatctcaccgggcggcgctttgagcacggggtgacggactgttacacgctgttccgggatgcttatcatctggcggggattgagatgccggattttcatcgcggggatgactggtggcgtcacggtcagaatctctatctggataatctggaggccacagggctgtatcaggtgccgttgtcagcggcgcagccgggcgatgtgctgctgtgctgttttggttcatcggtgccgaatcatgccgccatttactgtggtgacggtgagctgctgcaccatattcctgaacaactgagcaaacgagagaggtacaccgacaaatggcagcgacgcacacactccctctggcgtcaccgggcatggcacgcatctgcctttacggggatttacaacgatttggtcgccgcatcgaccttcgtgtga

SEQ ID NO: 19675 - DNA, 510 bp, Escherichia coli
atgaaagatatgaaaatggataaacaagaagttaaaagagaatacaaggaacaagaaggaaatccagaaattaagtctaaacgcagagagcgccatcaagaaattctgtcagagcaattgaaatctgatgtcagtaatagccgtctgatgattgccaaccctacgcacattgccatagggatatactttaagccacatctgtcacctatcccattgatttctgtaagagaaactaatgaggtagcattagccgtaaggaaatatgcaaaggaaatcggaataccaattattacagataaaaaattagcacgaaaaatttatgctacccatcgtcgctacgattatgttagcttcgaaaatatagatgagatcttgcgtcttctgctgtggcttgaagatgtggagaatgctggacaacctgttccagatgaactgctcccctcagaagataaattcaaagaaggtgaagacacaaaaagcgagaataaagacaataatttaaaaaattaa

SEQ ID NO: 19676 - DNA, 516 bp, Escherichia coli
ttggctaacccatcttctataacaattctacaatcaaacgcctttaaaaaaattaatggttttgatgagtctttcaatggtcatggatatgaagattttgattttcttgtgaggctatacctacattattttatgttagaaaaacccattgattttttattagatgtaccttcacgatcacctttatttgtaacaggttttagaaaatacttgggaagacattgtttagatatcttattagataaagatattgcttttcatttatatcatgagaaggataacaacgacgcatattatactaaaagaaaggataactataatatttttgtaaaaaaacacaagcataatatttctacaaaaaaatatattgatgaaactttaataacattatttatttcacggtgttatgaaaggggacttaaaatacaagactatagtgtatattttgaaaataaacctgggcatattgatagatttgacacattaaaaaaacgaataaagtttttgttacactaa

SEQ ID NO: 19677 - DNA, 642 bp, Escherichia coli
atgaccaccaggtccgcgatctgcgccgtcctgacatcggcgataaacatcacgttccggctctggctgctgttgttgatggtcgcagtgactgcactgactcccgccgtctggctggtgactgagatctccaccgtaccgtcctgccctgtgatgacagtcggggcaaccgttgcgccgttgcctgccaacacgctgaccgtctgcccggcaagcgcattaccgaatgcatcggttaccctcgcccgcagcgtgttcgccgtcgcaccgtctgcctctgaaccgtccttaatgaccaccagatccgcgatctgcgccgtcctgacatcggcgacaaacgtcacgttccggctctggctgctgttgttgatggtcgcagtgactgcactgactcccgccgtctggctggtgacagggatctccgccgtgccgtccggctctgtaatcaccgttggggcaaccgttgcaccgttgcctgccaacacgctgaccgtctgcccattcagcgcattcccgaacgcatcggtgaccctcacccgcagcgtgttcgccgtcgaaccgtccgcctctgaaccgtccttaatgaccaccagatcagcgatcttcgccgtcctgacatcggcgacaaacgtcacgttctga

SEQ ID NO: 19678 - DNA, 690 bp, Escherichia coli
atgggcttgataaactctcctgcaaatggtgttgtgattaaaagaataatttctgatggattgaaagaaatagtttctctaaaagaacagatccttcttgaaaccaccgcaaaaattcagagtattgaggaaaagagagaagaaaaaattattcaaggttattatgatggctatgcgaaaggcattattgatgtgatggataattttatacccttgataagtttgctgagctcagaattagaaaaaaacagagtaaacatgataaacgatctgaagagcatattgttaaaatcttcagaggaagttgaagtttttatcaaaatttttgaaagttgggtaacaaaattaccgtcaatatcaggccctttaaatctctatatacctaccagtttcaaagataagtctattgaagtagagtcatattttgtcgacaagtcaatatggaatgtccatatttcatatcatgatgacaaacgttttattttttttacagatcaatttattgctgaatttagtccgcaggaatttgtggataattgtgagcaatatttaattagcaatcactgtttttcccctgacaaggttaatgaaatctgtgaacatgccagacattatttagttgaaagaatgtgtgaaatagattctttggctatgaataattctgatttgacgaacccagaggacttatag

SEQ ID NO: 19679 - DNA, 312 bp, Escherichia coli; identical to SEQ ID NO: 16811

SEQ ID NO: 19680 - DNA, 633 bp, Escherichia coli
atgggaaagattaaaattgtagtttcagatcagcagccgtttatgattgatgggataattggatttctcggacattatcccgatttatatgaggttgttgggggctataaagatctgaagaaagctatagcggagtgtaacaaatctgcagcccaaatatttattttaggagaatttgcaggtggaatgatggggtccgaactcataaaatgggttaaatcgcataaaatagatgctcatattattacatttgtagcaaaaatgccgtatattgattcaataaaattgcttgaagccggtgcgaaaggatgcgtatggaaaaccagtcacccggcgaaactaaatcgcgctattgattcgattagtaatggttacacttattttgatagtgtacatatggattgtgaaaaaatatcttcaagatattcctctgataatcaacttacaaatcgtgagtctgaaatactacaactcatagctgatggaaaaacaaacaaagaaatcgctaatttcttgcagttaagcaggaaaacagtcgaaactcatagactcaatatcatgaagaaattagatgttcacagtggtatcgagttgatcaaaacagctttacgtatgggtgtttgcactatataa

SEQ ID NO: 19681 - DNA, 309 bp, Escherichia coli
gtgatcagccgctggcgcattgagcagtgcagcgaactgagcgcggtgagtgcctcttttgtactgtccacgccgacggaaacggacggtgctgtttttccgggacgtatcatgctggccaacacctgcacctggacctatcgcggtgatgagtgcggttatcacggtccggcagtcgcggatgaatatgaccagccaacgtccgatatcacgaaggataaatgcagcaaatgcctgaatggctgtaagtttcgcaataacgtcggcaactttggcggcttcctttccattaacaaactttcgcagtaa

SEQ ID NO: 19682 - DNA, 141 bp, Escherichia coli
atgtcagcaagtgcgaaaccccttgcagttacgcaggaaagcgatgagaagcgtctttccctcagatttgtcggtgccggagaaccagtggtcgggaggctcctatgcttcaatcaaatcctccagtttgcgggcctttga

SEQ ID NO: 19683 - DNA, 1029 bp, Escherichia coli
atggatttattagctgagagtattactgaagtcgctgtctctggggaaattgctaacaccgatcgtgtgttaaatatcgcttacggtattgaccgcaactttttatttggtgcggcagtatctatgcaatcagttgttatgcataacccggaccttgcggttaagtttcatctctttactgactacattgatgaagattatctacaacgtgttaatgcttttaccagcaaaaatgctaacgttgaagtaagaatttataaagtatccagtgcctttattgatatcttccccagcctgaaacagtggtcttatgcaacattcttccgtttagttgcgttccagtatctgagtgaaactattgaaaatctgttatatatcgatgctgatgtcatatgtaaaggctcattagctggattgcttgatattaattttgatggcgataagttcgcggctgttattaaagatgtgccttttatgcaggaaaaacctgcgaagcgtctggctatagagggacttccagggaattatttcaacgccggtgtagtatatctgcagcttgaagcatgggcgaaaaatgattttatgaataaagccattgctatgctggcaagtgacccgcagcacacgaaatataaatgccttgatcaggatattttaaatattctgttctttagtcattgtatttttattagcggcgattatgattgcttttatggcattgactatgagttaaaaaataaaagcgatgaagattataaaaagaccattaccgatgatactaagctgattcattatgttggcgtaacgaagccctggaacgactggacgaattatccctgccagaagtattttaatgaggcttatcaggtttcttgctggaatgatgtggcgtttattccagccacgaatgaaaagcagtatcaagtgaaataccaacatgcaaagaaaaatggtgatacgtttaacgcttttatttacttcattaaattcaaattaaataagtataaaagaaaactatttgggcaataa

SEQ ID NO: 19684 - DNA, 2205 bp, Escherichia coli
atgctgcgatggaaacgctgtattattctaacatttatctctggtgctgctttcgcggcgccagagataaatgttaagcaaaacgaatcgttacctgatttaggtagccaggcagcacaacaggatgaacaaaccaacaagggtaaatcgctgaaagagcgcggagccgattacgtcatcaactccgccacgcaagggtttgaaaacttgacccctgaggcgctgaaatctcaggccagaagctatctgcaaagtcaaatcacctcaaccgcacaatcttatattgaagacacactctctccctacggtaaggtccgttcgaacctctccattggtcagggcggcgatctggatggcagttccatcgattattttgttccctggtacgataatcaaaccactgtttatttcagccaattttctgcgcaacgaaaagaagatcgtacgatcgggaatattggccttggggtaaggtataattttgataaatatctattgggtggaaatatattttatgattatgactttacccgtggacatcgccgtttaggtttaggcgccgaagcctggacggattatttaaaattctcaggcaactattatcacccactttctgactggaaagactctgaagatttcgacttttatgaagaacgccctgcgcgcggctgggatattcgcgctgaagcctggctacccgcttacccgcagcttggcggaaaaattgtcttcgaacaatattatgggaatgaagtcgcgctttttggtaccgatagtctggagaaagatcccttcgctgtcacgctgggtgtgaaataccagcccgttccgctcattgttgtcggtacagatttcaaagctggcactggcgataataccgatctttctgttaacgcaacgctgaactaccagtttggcgtcccgctcaaagaccagcttgatcctgacaaagtgagcgcggctcactcgctcatgggtagccgtcatgactttgttgaacgtaacaactttattgttctggaatacaaagagaaagatcccctctatgtcactttgtggctgaaagccgacgtcacgaatgaacatcccgagtgcgtgattaaagatacgcctgaagaagctatcgggctggaaaaatgtaaatggaccattaacgcgctcattaaccatcactacaaaatcgttgctgcctcctggcaggcgaaaaacaatgctgcctcctggcaggcgaaaaacaatgctgcccgcacgctggtgatgccggttatcaaagagaataccctgacagagggtaacaataaccactggaacctggtgctgcccgcctggcagtacagttccgatcaagccgaacaagaaaaactcaatacctggcgagtacgtctggcgctggaagatgaaaagggcaatcggcagaactctggcgtggtggaaatcaccgttcagcaggaccgtaaaatagagttgattgttaataacatcgcgaacgtgccagaagagaacaaccacagccacgaagccagcgctcaggcagatggcgttgatggtgtggtgatggatctcgatgtaaccgacagctttggcgataacaccgaccgcaatggcgatgcgctgccggaagataacctcacgccgcagctttacgacgcgcaggacaaacgagtgacgttaaccaacaagccttgctcgaccgacaacccctgcgtttttatcgctaaacaagataaagaaaagggcactgtcaccctctccagtaccttacccggcacctatcgctggaaagcaaaagccgcgccctacgatgacagtaactatgtggatgtcactttcctcggggcagaaattggtgggctaaatgcttttatctatcgtgtgggggcggctaaacccagcaacctgataggtaaagataaagaaccgttgccgctcaacaacacttatcgatttgttttgtggcgcgacaacaataaagacggtgtcttccagcaggtcgaaaaactgactgacgaagagatggtgcagtacgactacaagtgggaatttaccggcaagagcatcaatggtgaagtgggtgcacaggcgaacacttccaatgaggacattgtgattccggccactaaccgtgaagcggcgcaaacctatggcgcacaagcgggagatggcttgcagggatacggtttacgcgtgctgtataccaaaaaataa

SEQ ID NO: 19685 - DNA, 1539 bp, Escherichia coli; identical to SEQ ID NO: 8721

SEQ ID NO: 19686 - DNA, 405 bp, Escherichia coli; identical to SEQ ID NO: 8719

SEQ ID NO: 19687 - DNA, 666 bp, Escherichia coli
atggaaacgctggagaattcagaacgacactggcctgccagaagaaaacatatgttctttcagatttttatggcgcagcacatctgtcgtgatgctgtggaaattcactgggcgaacggtaatattcaggtcatcagacctgtgcgggggatcagtattaatggtgaagcgcagggcggaatacgtcccccttactgggttattcttgctttttgccggagtgccgatggcagaatcatctgcagtgaagggtatgctcatgctctttatcaactgacatgtccggtgcctgtggacagcaaactggaacgaaacacgctcactgctcttctgaatgtggccagctggcttaaaagaaagccaggtacgccggaattaagtctggaaaggcccctgtttgatacagaagtttatgttaatggtgaaaagaaatatgtcctgccggatttcattgtcacagcaagggctcctgacggaaagacggccagagtggtcatcgaaacgatgggatatgaagacagtgattactgcgcgagaaaatccaggcagcataccggcatgaagcagattggtgttctgcataccgatccaccgaaatggctggataacgatcatcccccttttgagaaacatatgtacggtgtttttatgcatctcaggtactga

SEQ ID NO: 19688 - DNA, 180 bp, Escherichia coli; identical to SEQ ID NO: 9255

SEQ ID NO: 19689 - DNA, 315 bp, Escherichia coli
atgtcggggagtgctgcggatattgctcaacgtgtgtctgagtgggaagaggagcttgctgtttccccggagggcattatgcactctgatgagagcggggctgatcaaaatcacacagacgatggtgagcagttgaacaacacggatgctccggatgatgttaaagccgtccgggtacggaagtgcctgcaagtaatggggtattgcccggagacaggtcgtcccgttgagctggcgttacggggtatgcgtgttctggtgccatcatcactggcaacggccatgatacagcacggaacggctgaatatgcgtga

SEQ ID NO: 19690 - DNA, 2970 bp, Escherichia coli; identical to SEQ ID NO: 5727

SEQ ID NO: 19691 - DNA, 213 bp, Escherichia coli; identical to SEQ ID NO: 5358

SEQ ID NO: 19692 - DNA, 222 bp, Escherichia coli; identical to SEQ ID NO: 12867

SEQ ID NO: 19693 - DNA, 429 bp, Escherichia coli
atgagccgaattatcgccaccatcgaaccattcttaactgatttctgtgaggactttatcgtgtcagacacactgcccgggacaacgcatcccgacgacaatcacgaccgcccctggtgggggctgccctgcaccgtgacgccctgtttcggcgcccgtctggtgcaggagggtaaccggttgcattaccttgccgaccgtgccggtatcagaggcctgttcagcgatgcggatgcgtaccacctggaccaggcctttccgctgctgatgaaacaactggaactcatgctcaccagcggtgaactgaatccccgccatcagcataccatcacactgtatgcgaaaggactgacctgcgaagccgacaccctcggcagttgtggttacgtttatctggctttttatccaacatccgaaacgaaaaagtaa

SEQ ID NO: 19694 - DNA, 819 bp, Escherichia coli
atggcgaagcccttctgcacccacgctgaaatccacggtctgcgtctccagcagttccgttttaatcagccacagcccggcgcggtgtgcctgcccccggctggtacagccaaaggcatccatcttcgtgacgttacgaccgtaacgggcaatggcctgcgtgtcctccacaagctctgtcgccgtctcccagccgttatccgggtcaatccagttcacctcaacagcattatggcggtctttcagggcgctgaagctgtagcggaacggcgcaccatcatccggcatcaccacattactgcggttataggtccacaccttatccgacggtcggtcctgcacgaacgtcagcgtctgcccgttccataccggcatacagcgcatcgccgagcagaaatcactgagaacatcccacgccttgcgctgtgtggtcaggtaggcattacaggtgatgcgcggctccgtgccaccaaagccatccggcaccgactggtcgcaattctggccgatgacatacagcgcccatttgtccacatccgccgcaccgagacgcttccccatgccgtagcgcggatgggtcagcatatcccacagacaccaggccatgttgttgctgtatgctggcttaaacgttccgtcccagataccgctgtattgccgcgtctgcgggttatagttcgacggcacctgcagaatgcgcccgcgaagatgataattacggctcacctgctggctgccgaactgttccgagtccacctgcacgccgaccagtgccgtgttcgggtagcactgtttcacatcgatgatttcggtgtatga

SEQ ID NO: 19695 - DNA, 771 bp, Escherichia coli
atgaacaaaacgctgaatgcactggtttgtcaccacgcccgtaacctgctgctggcgcagggctggccggaagagacggatattgaacaactgaatccgcactatccgggctggatcagcatttatgtgcgactggatgtatcccggctggcgacgttacttatcagccgccatgatggcgtgctgccgccggtcctggcgtctgccatgcaaaaactgaccggaaccgtggcggaacttgtactgtccggcagccagtggcaggcgctgccggtacttccggcagacggaacgcaggtgtttttcccgtatgccggtgaatggctgacggaggaagaaatcagggcagttcttgatgcggtgcgcaatgcagtacgaagcatctgttaccaggtggcagacgatgcgcggcgtatccgggcggcgctgaccaccaccggtcagacgttgctgacccggcagacgcgccgctttcgtctggtcgtgaaggaaagcgattacccctgctggcttgatgaagatgacgaaaatctgcccgtggtgctcgatgccattctgaaccgtggcgcccgtttttcctctgtggaaatgtacctggtctgtgagtgtgtggagcatatcctggccagtggtctggtctgtgatgtgctgcgtataccggatgaaccgtcccgtcgctggtttgacagggatattctgcgggaggttgttctggaggcacgggatgaaatccgcagcatggcggatgcactggcgaaaatcaggggctga

SEQ ID NO: 19696 - DNA, 537 bp, Escherichia coli
atgccgcacagatgcgtaaggagaaaatgcacgtccagccgcttttccgcttcctcgctcactgactcgctacgctcggtcgttcgactgcggcgagcggtatctactcactcaaaaacgaaatgctgttatccacagaatcaggggataacaccggaaaaaacatgtgagcaaaagaccaggaacaggaagaaggccgcgccgctggcgtttttccataggctccgcccccctgacgagcatcacaaaaatcgacgctcaagtcagaggtggcgaaacccgacaggacttaaagataccaggcgtttccccccggaagctccctcgtgcgctctcctgttccgaccttaccgtttaccggatacctgtccgcctttctcccttcgggaagcgtggcgctttctcatagctcacgctgtaggtatctcagttcggtgtaggtcgttcgctccaagctgggctgtgtgcacgaaccccccgttcagcccgaccgctgcgccttatccggtaactatcgtcttgagtccaacccggtaa

SEQ ID NO: 19697 - DNA, 330 bp, Escherichia coli
atgaaaaccttccgctggaaagtgaaacccgggatggatgtgacatcggctccttccgtcagggaggtgcgctttggtgatggctattcccagcgtgcgcctgccgggctgaacgctgacctgaaaacgtacagcgtgacgctgtctgtctcccgtgaggaggccacggcgctggagtcgtttctggctgagcacgggggctggaaggcctttctgtggacgccgccttatggttacaggcagataaaggtgacctgcgcaaaatggtcgtcgcaggtcagtatgttgcgtgttgggttcagcgcagagtttgaacaggtggtgaactga

SEQ ID NO: 19698 - DNA, 330 bp, Escherichia coli; identical to SEQ ID NO: 8750

SEQ ID NO: 19699 - DNA, 210 bp, Escherichia coli
atgacggatggctggccgctgtatgaatcacgcctgaagggaaagctgcacgttatcagcaagcgttacactcagcgcattgagcgacataatctgaatctgagacaacatctggcaaggctgggacggaagttactgtcgttctcaaaatcggtggagctgcatgacaaggtcatcgggcattatctgaacataaaacactatcagtaa

SEQ ID NO: 19700 - DNA, 477 bp, Escherichia coli
atgcaacagctttcctttctgccaggagagatgacgcccggcgagcgcagcctcattcagcgggccctgaaaaccctggaccgccatcttcatgaacccggcgtggccttcacctccacccgtgcggcacgggaatggctgcttctgaacatggcgggactggagcgtgaagaattccgggtgctatatctgaacaaccagaataagctgattgccggtgaaaccctcttcaccggcaccatcaaccgcacggaagtccatccccgggaagtgattaaatgcgccctgtatcacaatgccgctgccgtggtgctggcacacaatcacccgtccggtgaagtcacacccagtaaggcagaccgccttatcaccgaacgtctggtacaggcactgggcctggtggatatccgggtgccggaccatctgatagtcggtggcagccaggttttctcctttgcggaacacggtctgctttaa

SEQ ID NO: 19701 - DNA, 219 bp, Escherichia coli
atgattaagatgcctgtgacggttgaggtgtggggcgtggattccctggctgagtgtctggatgcagtggggccggagttgtaccgcaagttgtggtcgttcgtcccggcagaaggggaatcgcccaaagggaaggatatctggcacctgctgagtgaagatgaaaagcgggagctggtggacgcggtacacagcgagttcccgggcgacgaagattaa

SEQ ID NO: 19702 - DNA, 525 bp, Escherichia coli
atgagaacatcggacatcacctacggcataccggctgaagtctggccgcgagactacgaacatgctgaaaacatacttatgttctggcggaagaacaacattcctgtaagagtcacgcttgaagacggtcaggtattttgcatgtacgttcaggggacaatgccttcccgcaataagctagatttatgcccgcttccatatgataaagaaaatcgtataagactcccacttgagcgcattagcacaattgaatcaggtgtaatcgatggcattgctcgcgagttcaaaggtaggctaacaatacatccagactatgttgacaatcagccatcacgccgtgacttttttgcgatatgtcgcaaggcttatcaaaacgaccaatctataagggtctacatggcagacggtcgtgaaatagaaggggtgtcaagaggcgttgatgcttgccaggtcactcttaagttagaagacggcagaaaaatacttgttttcttcgattgggttgaacgaatccttccattttaa

SEQ ID NO: 19703 - DNA, 594 bp, Escherichia coli
atgaaacgttcgttacttcttgcttgtatatacctctcgtcattttccgcaaatgcgttgtcagatatcgtctccgacatgcaaaaaacgtacagcatgtatacttctgaagacgtactaaaatacgaatcacgaggtctgattcaaccagtctggttcagattctcagataacgcagaagaaacaatacttaatgcaggaaaagaaagattacggttgcaaattaacgggaccgctgtaccagaaaacgttaatgtaagctctgacgaagccatgaagccatctggaattgttttggaagttcaagacggcacactttactgtgatgaaatggctacaacaggttgccaagtaaacattagggttggcaatgaagagcctatcgttacttacgccaaggctgaagggaatacaagtggaaaggtattgtttatcgatgaaaatgcctcaaaacgtatcgttcgtgacatacagaaaacagcgaactctaaatccgtcgataaaaaaatctatgttgaggttcccttctttgtcgttggtaacaaagaatttaaatttgggttgctgaaaacacctctaagagtatcagaatga

SEQ ID NO: 19704 - DNA, 255 bp, Escherichia coli
atgcctgatttgaagatcgtagagctgaagccatcgaaagagactgataacaacaacgtggaagtcatccgcctgctggaagaagcacttcagcacgccagagaaggaaaaagccagagcctggcgctgttgatgatcaacaacgacggcagtgttcttgattgctggcataacggcgggcgcccgtatgtcatggtaggggcgatggagtctcttcgcctggatttcatcaatgccaatatcgagcgcaggtga

SEQ ID NO: 19705 - DNA, 420 bp, Escherichia coli
atgctaaattatcatgacaatacgcgttctatgcagacgatccgcaccaatactgcggttatcgacagctttcctatgcgtcttcacaacagtgaagacgcagtagaagtgcgacgtatgttgtgccgtgaatcagctaaccgccagcacttcatcgtcacttttaagagcgatgtggcgcgtgccgaaaaggtctctaattctacgtcactggttaaaccgttggccgaggttgtcgctaacggtaaacgaacctcttttgttttagatgttgctgaacaatatcctgacttgaagtgtttagatcgtgatatttcttcacgaatcaaacaagttgtagagtcttttatgaagaaattctgtaaaatcgatgatatggaaccatcaacggcacagaatacttcatggcaccatctctaa

SEQ ID NO: 19706 - DNA, 774 bp, Escherichia coli
atggcaccatctctaattggtcaggcgaacagattaatccctgaaatagaagactacagcaaggtcttgtctgaaatgccgagagcgacgagaattatcgctctcggtgagttctattttatctcccgaggtttcgatctaattcgatttaccgaatacgagcttgttgattcggcctatgaacgctgtattgttggcgagtgtcttgagtcatgtgatcctgattaccaagagcaggaagttaagcgactcaaacgtgctggttacacacctcttgagataggagcagaaattgaatcctacaagttgcatgtggggcagccagtccaaacagtcttccgcgtggcctactgcgagtttccaatcaaggataaatctggagtaaaagtcagcgccaagcagattagaggggtttttactcatgctgattatatgggattaggcatcgcaagttttgcttacctttatctcgtagataagtatcagtacttggtttgcgatacgttacagacgataaaaggcgcaactctttgggctgtgagtatgcgcaaacatggactggtcgaaatttacgatacgaagaacgaaaattttatagaggaattgggtgaggatgcctgtggcgtaagtggttttattccgtgggatatcggtaagtctgacggaggccagatgcgaagacgtgaagagtgggggactaataaaatcaatctcaccccaggtgcttgtactcatatagtgaacattctgagtaaacgatctatgaatcaataa

SEQ ID NO: 19707 - DNA, 1695 bp, Escherichia coli
atggaatcgatagaatcatttctaaaaaattttctagtttcagatcatcgggttgccgtcataaaaggagattggggcgttggtaaaactcattattggaatagtttttatactaagcattctgaaggattagattttaatgcatattcgtatgtttctttgtttggggttaactctattggtgatattaaaaaaactctttatcattgtgccacaccaattaatgaaaagaaatataaagaactaattttatctgaaacggatcgaactatgattcgttatagaaatgggttttggggatggttgaaatacaactccttgtcaaaatttttaatacatttcggaaagaacgatttttttgggttcaaaacagataacctgctgtcatctcttgagtataaatttgttaataattatttggtttgtattgatgatgttgaaagaaaaggtaattcgctagaagttaaagaaattatgggggtaattgatgaattagcaagaagaaaaggttgcaaagttgttctaattttaaatgaagataatttacatgatgaaactgcaaaaaaacagtttttagagtacagagaaaaagtaattgatgtcgaaataaaatacgatcctacgcctgagaagaacttacgtaaagttttttatgaaactgattctgattttcttttgttaaaagtcttagcaaatgacttaggcattaaaaatatccgtatattaaataaaataaaaacatctctggttaatcttaggaatgagctaagcttggcagaggataaggttagagaaagctttatcaatagattggttctgttttcagtggtttactattctggtgttccaggtgttgattatgccttgtttaaagaatcaattaaaaacatacatgtatttgattacatgttagatgataaaaaggatgattctgtatattcatttattaatagtcttgatgttatttatgaacgagcggaaattgctttcgatgatgacatagatttttatctcaagaatggttatctttctactgaaagcaatattcgaggtataatagaagaaaaaaataaacaatataaagaacacaaggctttatgtgatgttaacaatgtttgggatatttttagtgactcattcaaggacaatgaatctgagtttatttctaagataaaatgtgtaattaacgacaatctttcacacatacctgttgctcacttcataggcttgattgatatcttaaatagattggagattgattgtgatagttatatagaggcatatgcagatgcctttgttagccaagatgatgcttatactgcttttcggaatttgtatgtagagatatttggtaacgaaaagttaggtctgctaattcaaaaaaaattgatggataagaagcctgaagagactaatttagagaatgttttatacaaaataattgaaggcaaatttaatcatagtgacatagcatatcttaacagtttctctgaagatgattatttaaagtggatattatcccgcaatcaggatgctttggatttagtgagaaaggggttgctcagattcaaaagtatgcaagaactaacagaagaacagcaaaaaatcacgaataaagcaataggtgcattaacgaaactggcctctagatcaagtcttaacaaactacgtgtgagcagattgcttaataattaa

SEQ ID NO: 19708 - DNA, 1008 bp, Escherichia coli
atgttgtcgctattacttgtttcggggagtgcacatgcctatgaaatacaaaagctgatcgatgcggcaaaagcaggcgacgttgagtcacagagtgctttaggtatcgactatatgaaaggtattcatggtgtcgaaaaaaactacgatgaagccagaaaatggcttgaactggcgacttctaaggggaacaaagaagcgtttaatgctctaggtataatgtatgcccttgggtatggggttgataaaaatttcaaaaaggcagaggaactctttaagaaagctggtgatgcagctggaggcaactcttatcacaatctgggtgttatttatcataaaggacttgcgggtaagaaagaccaaaaactttccctgaaatatcacaaacttgcagtagaggctggcgaccctgaatctgcgtcatatttaggacagttatattatgttggcgcaggcgtgccaaaaagctacaaaaaggcaatagagtattataaaaaaggaatcgaactaggcagtgcatctgcattggcgaatcttggcattatgtatgagtatggtgaaggggttaaaaaagattataaaaaagcagctgagctttatcaggcagcttgcgataaagaagataaaaatggctgtgattacattgcagaactaaaagaaagcggtaaataccaaccatcagcagcaagatctaaagcaaaatcctccactcaacgacttattgctaaatccattgataaaggcgttaacgcaacatttacctggcagggtgatgatgccaccttcaccgctaatgatggcaaaattgactgcactttcctaaaggatttttcagagaaaggaggcaatctggctacctcgtttgtttgcaccgataacgttcaaatcatcctgaagcaattcagagataccaagaatgcctacctcgcggtaatgactgacaacttcaacacagaagttaaatcattttcggtcaatgtttacgtgactaatactggttcaaactaa

SEQ ID NO: 19709 - DNA, 783 bp, Escherichia coli
atgaaagacgaaattcagaaattagcctgcgacatcattgataaaactggtttagaaatcagcgagagcaatcggctagacatcattgaaaaagccgtcaatacggcaatggctcatatcgccactcgtttagtcgagatcccgctaccggggctaccttatctgaaggttaagttgcgcgtatggggcgaacctgcacatgcacgacgttctgcattagttgtttttgtacgcaaagaaaacttacgaactctaaaagtgcaggttggggcgtggtttgatggcagagtcatctatacagataccattatctgtcctccaggtgacgaacatattgaagccgtcattcgagaatcaattcgagctatgcgcagtttagctttgctggaagacaagcaaaactttgaagattacttgctgtcggtaaaagctgaaccaacattgtctctgaaagccgatttcgtcaccccgacaaatctgttggaggttttgattaataaaggggctaatgatgctgtaaacctaatcagggagagcgaatattcgactctttgcgacatgtgcaaaagccagttggatcttgtgcatatcattgttgatgcggggaaggcgtgtgatggcgtaatggcggaatttgctgggaagatggtcaggattgctaacgaattaccgatgatagagcaagaggccaaatcatacgccaccaatcatgtcacagagcttcttgccccctatcgcttagaaagcgatcagcgcaagatgattagctggggaagttggtaa

SEQ ID NO: 19710 - DNA, 849 bp, Escherichia coli
gtggcaaacgatcagggcatgagatatatcgaaagagttgctaacggaaatgctggtgagttttatttcgcatattggatttcaaataaatttgtatggccttgccgaattcttgatattgacatggggttggatgctcaggttgagatttatgatgacaactgtcattcaacaggtatgtttattggagttcaagttaaaacaacaagtaaaaaaatcgatgattcactaagagtttctgtacctattaaaaatttaatttattggcaaagtattaatgatccgattgtcattgttcgcgtttttctaaacgacaacggtctccctgtaatattttggaaacatttaggtaaagacgagttggcggaaatgattagtatttccaacgagaaaaaaagtgatagctattgtattacttttgataaagaaaataaccttttgaaagagtcggacaagaacaagtggatagaacttttcttaacgaaaaatgatatagatgccactgaagatgctgtattcattaagaataaacttaagtgcattggtgattatttaggtcctgctgatgatgaaaatacataccaaaatggttatccatataattttgctaatgaattgaatgggttgcttaacaagtatgataaggttattagtgctcttagagtcaatccacggttgatacaactatcatctgatattaaatctttgattgaatgctataatcaatatataaattcgatattgatagcatttgaaattggtgtcaaatgtcattcagttttaaaagacgacatagataaatacgaccaagttaaccctaggcttaatgaaatatttgttaaatattga

SEQ ID NO: 19711 - DNA, 207 bp, Escherichia coli
gtgaataaagcagagttatttcagaaaatatcggctctcgcgactgaatgtcacgctatagcatctgagcttgatgttggcggtgaacgaaccgagatgttcgaaatatacagtgtgctgcgcaatctctgtcggcgtggctacgctactcaggtagggcgaatgactaacccactactttcattctgtgatgaggatgacgaatga

SEQ ID NO: 19712 - DNA, 849 bp, Escherichia coli
gtggaagtaaacgatatctttaccgatgaagtggtacagctcggcggtggagtctttcttccagtattcgtcgaagctggtagtgtcgccgcgtttgtcgcacagattcttgaaggaacccatgtagccaatcggcgcgtccagccagacgtagaaatatttgcccggtgcgttcggaatttcaaaaccgaagtacggcgcatcgcgggagatatcccactgttgcaggccagattcaaaccactcctgcattttgtttgccacctgctcctgcaacgcaccgctgcgggtccatgcctgcaacatttcgctgaaagaaggcagatcaaagaagaagtgttcggaatcacgcattaccggcgtagcaccagaaactaccgatttcggctcgatcagttcagtcgggctgtaagtagcgccgcagacttcacagttatcgccgtattgatccggtgctttacatttcgggcaggtgcctttcacaaaacggtccggcaggaacatgcctttttccggatcgtacagctgagagatggtgcggtttttaataaaaccgttctctttcaggcgagtatagataagctcggacaactgacggttctcttcgctgtgcgtcgagtgatagttgtcatagctgatgttaaagcctgcaaaatcagtctggtgttcctgactcatttcgccaatcatctgttccggtgtgataccaagctgctgtgctttcagcatgatcggcgtaccgtgggcatcgtcggcacagatgaaattaacctcgtggccgcgcattcgctggtaacgaacccagacatcagcctggatgtgctccagcatatggccgaggtggattga

SEQ ID NO: 19713 - DNA, 1080 bp, Escherichia coli
atgtcattctttgttaaatataatacaaccgttatggaagcaattgataaggttggatctacttatcaaagtcaattcacacaagatataatgtcattagtgacagcatctgtcacgttatatgtactatggaaaggctatcaaatactcgccagtaaaactcagactccgatgcaggatttagtttgggatttatcaaaatttgcgatcataatcatgtttataacaaatgcagatggatatttgacagcggcaaccaatgcattgcaaggcatgaaagatgggctttctggcggagttagcgcatggcaaaccttagataacttatgggagaaaacacaaaatcttgcggaaaaggtatatcaaaaagacactgatttcattcctttggctggcgcattaggtatgacgcttgtttgggctggctcacttattttaatgacaattagtgctgttgtttttttaactgccgatattacgatgaaattccttattataacagcgccaatatttattttctgtctgatgtttggttttattagagttatgtttaataactggttgcaatcgctattttctagcatcctgactgtgttatttgccagtttagtaattcggatagctatggattttcagggggatatattgcaacaagtatctaatgcgacacccaatagtaatgttatgaccgtaagtgcaatgggatttttagccggattgttgggagctttattggttcttatagctaaaagttttgctgtccagttagcaggtgcaggtgttgaaggtgctgttcagggcgcagccatgatggggctgggtgctgctggtatggctactggtaagtctctgatgcttggcggtcgcgctggtttaggttttggcttagggatggccggaagaacgggcatgaattctttatctgggaaagcagggaatctgatggggcgtggtgcgcgaacagccgctgaatgggcgggtgaaaagggatatcaggcgctggctccgacaggtgctttggggatgaaggcgagaagacttgcatccctggaaaaagcacgagcgaggaatgccgcatga

SEQ ID NO: 19714 - DNA, 234 bp, Escherichia coli
atgagttatatgaaaaaaacaagaattctttcgttggttttgttctcaattgcattgagtggttgtggtgaggacatcaagaccgttgattggtggcgaaatcatccggaggaagcgatctcgaaggttgaagagtgtaagaagtcaggcgacgtatcggataattgtaaaaacgccaagactgcgttgtacaagaatcagcaacaagatgcgcctgtgcctcaaattaattaa

SEQ ID NO: 19715 - DNA, 168 bp, Escherichia coli
atgactaagcatgatgctatacgcatttcgcaacttcatcaaatctttccagaggttcagttaactgaacgacagaaagatattgcagtgatgtatgtaattggttgcacagttgaggaaattgcgtcagaaaaagggatcacgaccgatggtgttatgtatctttga

SEQ ID NO: 19716 - DNA, 348 bp, Escherichia coli
atgaaacatttaaaatataaaggatatttaggcacggttgaacccgattttgaaaataatgtcctgtatggaaaactggcgtttattcgggacctggtaacttatgaggcttctacattagctgaactggaacaggagtttaaaacatctgttgatctgtatttacagtcttgtgtggaggatggaaaggaacctgataccccgtttaaaggcgtgtttaacgtcaggcttgatccagaactgcatcgtcgggtagcagaaatggcgatggaagaagatttatcgttgaatgcctttgttaataaggctctggaaaaagaagtcagcaatcatcgcgcaggggcttaa

SEQ ID NO: 19717 - DNA, 249 bp, Escherichia coli
atggggaaaacagataagctactggcaaagtttttaaacagtaaaaaaacgtttgaatgggatgaactggtcgttttgttttcctctctggggtatgtcaaaaaggaaatgcaggggtcaagagtgcggtttttcaatgctgaaatcaatcacaccatattaatgcatcgtccacatccggaaagttatatcaaaggtggtacgctgaaagcaattaaacagaatctgaaagaggctggattattatga

SEQ ID NO: 19718 - DNA, 351 bp, Escherichia coli
atgaaaacgttaaaacaagccgcaatgcagtttgcatctgatctgcgtaataatcgctgttttaaagctgcttataatgatgctctgttagagcttgatcgggaagatttaaacgccattgtacaatgcacatttctttttgagccaaaacgaacattagccgaacttgataaattaattaaaaagatagaagtagaagaagattatgagttttgtgtatcccttgataaaggtaatggattacacgaagtcaggatatttaaaagtgagcgtgaggcgttggatgcttatcgcattttgactctttacggatacacagtaactatagaaaagaaggagggtaatgactga

SEQ ID NO: 19719 - DNA, 1008 bp, Escherichia coli
atggtcttaaagaataataaaaatagcgactgtaatgatgttcaaagtttgttggcacagggaaatcaattgctggaaggtgcatacgatataacgctaattgaaatgcgtcttctgtatctggcattgactaagattgatagccgtaaaccgcagcctgcaaatgaatatacattgtttgcgaaggaatacagggacactttttctttagattcgaaaaattgttatgaacagttaaaatctgctgcgagttctttaggctcaaagccaattgttacgtatgaatggaacgaggcaaaaaaaaggatcgatgcagtcaaacgattctggttttcttcaataagatatggtgttgggaatagtgaaagtgacataactttgcgtttttcagattcggtcagtcaatatctttatgaactgaaaagcgaatttacacaaatgaatcttgaacatatggtgaaactggatacaccattttcatttcgactttattcgtggttatataaatataagaatctgaaccgaaataagaaacatagtggagtgatctcgacagatcctataaccattgaatggatgaaggagcgaaccggccttacagggaaatatccagtatataaggattttaagaaacgggtgcttgatcctgctgttgatattatcaatgcaaatacgaatctgagtgttacctatgaaggtatcaagtccggcagaaagatcgagtctgttgtgttcacatatcttgtagagaatgaaacatatgatggaaaaaaaatagcaactaaaccgttacgtcctcgattgccatcaagaccaagggtcattaaaggaagctctgcggaggttgcctgggcaaaaaaatgtatcgatgttatgaaaaattaccttatctctttaagggaatatgatgataagttaaaattatcaaggccagatcttcagaaggttaagttatggcatgaaataaccggatgggatttcgaagagtcgttctggtttagtgattaa

SEQ ID NO: 19720 - DNA, 3243 bp, Escherichia coli; identical to SEQ ID NO: 7559

SEQ ID NO: 19721 - DNA, 210 bp, Escherichia coli
atgtggatggagttcgacagggtatccccgctgggtgatgagcgcggggatatccgtaatgcacagatcgtgaaagcggtttttggggcacaggggatgaatgttgcactgaaggacgccatgctctgctggggcgaggatgaggataagccggaggtggatccgtttgcggcgctggaagacgcgctgagcttcgcagcacagtcatga

SEQ ID NO: 19722 - DNA, 375 bp, Escherichia coli; identical to SEQ ID NO: 7561

SEQ ID NO: 19723 - DNA, 717 bp, Escherichia coli; identical to SEQ ID NO: 7562

SEQ ID NO: 19724 - DNA, 345 bp, Escherichia coli; identical to SEQ ID NO: 7563

SEQ ID NO: 19725 - DNA, 447 bp, Escherichia coli; identical to SEQ ID NO: 7564

SEQ ID NO: 19726 - DNA, 351 bp, Escherichia coli; identical to SEQ ID NO: 7565

SEQ ID NO: 19727 - DNA, 327 bp, Escherichia coli; identical to SEQ ID NO: 7566

SEQ ID NO: 19728 - DNA, 2586 bp, Escherichia coli
atgtggaaccttttacggcgaacccgaaaaaaccagaaatcaggacgtgacgtaagagaggcgggctggaccagcctgtttcaggcggtggctgagcccttttccggcgcctggcagcagggcgtgaaagccgatcctgaagccgtcctctcctttcatgcggtgtttgcatgtatttcgctgatatcccaggatatcgccaaaatgcggctgcgtcttatgcagacggatgcgcatgggatacgcagggaaacgcgccggggggatattgcccgcctctgtcgtcgtcccaacgcccagcagaaccgcatccagttttttgaactgtggctgaacgccaaactgcgtcatggcaatacggtggtgctgaaaatccgtaatgcccgggggcagatcaaagaactgcgtattctggactggagccgggttgaacctctggtggcggatgacggcgaggtgttctaccgcatcacgccggaccggaactgcgggatcacggaggcagtgacggtgcctgcccgggaagtgatccacgaccggtttaactgtttttttcatccgcttataggattgccgccggtgtatgccgccgggctggcggccacgcaggggcatcatattcaggaaaattcgacgtcttttttcagaaatggcggcaggccgtccggggtgattgagatccccggcagtattacggaagaaaatgcgaaaaaactgaagagcaactgggacagcgggtatacaggcgaaaatgcggggaaaacggccattctgagcaacggggcaaaatacaaccccacgacgttttcacctgtggatgcgcagacggtggaacaactgaagatgaccgctgaaattgtctgttcggtgttccgtgtcccggcctacaagattggcgtgggacaaccgccttccagtgacaacgtggaggcgctggagcagcagtattattcccagtgcctgcagacgctgattgagtccattgaactgttactggatgaggcgctggaaacgggggaaaacgagagtacagaatttgatgtcaccacgctgctgagaatggacagtgagcggcgcatgaaaacgctgggggatgcggtgaaaaatacgcttctcacgcccaatgaggcccgtaaacgggagaacctgccgcccctggccggcggtgatgcactgtatcttcagcagcagaactacagtctggaggcgctgtcccgtcgtgatgcccgtgaggatccgttcgcgtctgccgggaaaacagtttcatcacagctgcctgacggcgcatctgacggtaataaggcaatcagtgaaacagagcatgatgcggtgaaagcgatgttcaggggggatactgagaaaatgacggaacgggaactgtccattattcgtgcactgggagaagaattctccacagtgctggcggatttacagcgcacatttgaggggaagatggcctcgcaggcacaagcgtttgaagagaaactgacttccctgtcggcggtattacagaagcatgtgacggtggatgaggtgcgtccggttctgcaggcgatggtggatgacgctgtgggggccattccggtaccgcgtgatggtcgtgattatgatccggatgtactgcagcaggcggtgaatgatgcggtcgcaaatattccgcagccggcggacggtaaaagtctcaccccggatgatgtgcgtccgatgcttgaacagatggtgaaggaggctgtaagccatatccctgttccgcgtgatggtcgtgactacgatccggaagtactgcagaaggcggtgaatgatgcggtcgcaaatattccgcagccggcggacggtaaaagtctcaccccggatgatgtgcgtccgatgcttgaacagatggtgaaggaggctgtaagccatatccctgttccgcgtgatggtcgtgactacgatccggaagtactgcagaaggcggtgaatgatgcggtcgcaaatattccgcagccggcggacggtaaaagtctcaccccggatgatgtgcgtccgatgcttgaacagatggtgaaggaggctgtaagccatatccctgttccgcgtgatggtcgtgactacgatccggatgttctgcagaaggcggttctggatgcggtgagtgccctgccggctccgcaggacgggcgtgatgccacggctctggaaatactccccgccattgacgatcaaaaatcctttccccggggcacgtatgccacacaccagggcggactctggcgggcgtatgaaaaaacgcacgggatgcggggatgggaatgcctggttgacggggtggcggatattgacgtcagcatgacgggtgagcggttgttctctgtggtggtccggcagagcagtggccagcgtacggaaaaaacattttccctgccggtgatgctctaccgcggtgtgttcagagccggtgaaacctaccaccccggcgatacggtgacgtgggggggctcgctgtggcactgcaacagtatgaccgaagataaacccggagaagctcattcatcagcctggaccctggctgcaaaacgtgggcgggatgcaggaggcggaaaatga

SEQ ID NO: 19729 - DNA, 222 bp, Escherichia coli; identical to SEQ ID NO: 7568

SEQ ID NO: 19730 - DNA, 1938 bp, Escherichia coli; identical to SEQ ID NO: 7569

SEQ ID NO: 19731 - DNA, 564 bp, Escherichia coli; identical to SEQ ID NO: 7571

SEQ ID NO: 19732 - DNA, 366 bp, Escherichia coli; identical to SEQ ID NO: 7572

SEQ ID NO: 19733 - DNA, 351 bp, Escherichia coli; identical to SEQ ID NO: 17372

SEQ ID NO: 19734 - DNA, 1854 bp, Escherichia coli
atggcatttaaacactatgatgttgtcagggcggcgtcgccgtcagatcttgcggaaaagctgacacataaactgaaagagggctggcagccgtttggtagtccggtggccataaccccttataccctgatgcaggcgattgcagcagaaggtgatgtggtcgtcagtggtgcaactgagccggagtggtactacgtcatcgtactggccgggcaatccaatgccatggcttacggtgaagggcttccgcttccggattcatacgatgcgccccatccgcgcattaagcaactggcccgtcgtaacacagtgactcccggtggtgaagtatgcgtatttaacgacatcattcctgctgaccattgtctgcatgatgttcaggatatgagtacgattaaccatccccgggctgacctgagcaaagggcagtacggctgtgtcggacagggcttacatattgccaaaaaactgcttccgtatatccctaataatgcggggatcctgctggtaccatgctgtcgtggtggttcggcattcacccagggcacggaggggacattcagcgagtccacgggggccagtcaggattcggctcgctggggagtgggtaagccgttatatcaggatctgcttttccgcacgaaggcagcattgcagaaaaacccgaaaaacgttttgctggcgatatgctggatgcagggggaattcgatatgacgaatgccagttacgcccagcagccagcagcatttcttgcaatggtacagcagttccgtgctgaccttgccgggctggcggcgcagtgtcacggtggaagtccggcatcagtcccctggatttgtggcgacacgacatacgcgtggaaacaagaacacggtacgcaatatgaagtggtatatggtgcatataaaggtaaagaatcccagcagatttattttgttccctttatgaccgatggtagcggagttaatacaccgacaaacaacccgtcagaagatcctgatattgccgggtctggttattacggttcggcatcccgaacgaacaaaaactgggtatcatcaaatcgcccgacgcatttcagctcatgggcgcgtcgtggcattattcccgatcgtatggcaactgctattctgaacgtagccggtcgcaccttagccttcattagtggtaaggcaccggaaatcaaaccctcgcccggcggcgacacgccatcggggccgtctgaagatgcatccgtacgcacaatctccctgttgccgacagccggagatgctgctgcgcagggctggagcattaagaatggcggaattcagttgtcagatggtgtatttaagatcaccaagcagagcaataaagcctggtccctgacgcgcccggtggatgacgcagtctccctgctgacacggggtggcagactgagctgtaagtttcgactgtcaggcgcactgaccaacaatcagttcggtctgggaatttatctgtataccgatgtagcgttacctgacgtcgtggcgatgaccgggactggtaacccgttcctgatgtcgttcttcacccagaccacagacggcaaactgaatctgatgcatcacaagaaagcaggaaacacaaagttgggcgagttcgggaattacagtaacgactggcagacgctggagctggtgttcaccgccggcagtgccacggttactccgaaactgaatggagtggctggcccggcattccaggtcataaaagacagtctgacactggggctgaatgcgctgacgctgacggatattaccaaaaatgcaacgtatggcgttgagatagaaagtctggtgctggagataaatgcaccggcatcatcataa

SEQ ID NO: 19735 - DNA, 462 bp, Escherichia coli
gtgtcattcaatggtgaaaaaccggagattgccatcgtaccccagagcctgcaccggctgatttatggccctgacaaacgggccacgccgcccctggatgatgatctgatagtgaatttatgcaccagtgaacatctgctggttcatcatccgatgctggaaggcattctcctgtctgaatgtgaacgtctgaggcagcgttctctggcaaataaactgattagcctcttccgtcagtttggtggcacggagttgcgcctcaaactggtctggctttgctggcttgatttaatgaccggaaacagccttgaagactggaaagagaacctgaaacggaaatcagaaaaagagctggaggaatggatcatcaaccgtcagaggcagagcgcagcactgacggatctgatggatcagtacgtgctcctggcataccgcacaacggttgacgataaccgcaactga

SEQ ID NO: 19736 - DNA, 276 bp, Escherichia coli; identical to SEQ ID NO: 6180

SEQ ID NO: 19737 - DNA, 534 bp, Escherichia coli
gtggcggacgcgcttccggaggcagtattacgtcgttctctggggttacgtgcggaaaaaatccgctccttgtaccgcgaaagcgacatcgtaccgggagagcagaccgccaccagcatactgaagcagcgcacaaaaaatcttgcgccgttgcctcatgcccaccagcaaaacccgccacaggaaaagacggtggtcagcattgccgttgatccggagtcaccggctcagtatctccagcgccagaaatcacaacgggaagagatgcctgtatacacgcgttgggtaaaaacgcagaaatgcatgacgtgcggtaatcaggcagatgatccgcatcacatcattggtcatggactgggagggatgggaacaaaggctgatgatttgtttgttattccgctgtgccgtaaatgtcataacgaactacacgccggggtaaaagattttgaagaaaaacacggcagccagctgttgttgctgattcgttttttaatgcacgcgagaaattcgggtgtcctgaagtggaaagcatga

SEQ ID NO: 19738 - DNA, 369 bp, Escherichia coli; identical to SEQ ID NO: 4841

SEQ ID NO: 19739 - DNA, 207 bp, Escherichia coli; identical to SEQ ID NO: 8329

SEQ ID NO: 19740 - DNA, 156 bp, Escherichia coli
atgcggcatcttgtcgtgctggtggaggaactgcgcgaaagaggcatcaacttttgcaatctgacggattcaattgatacacagtatcttgttaacaccaacacatggctgcaggagggatattatcggtacccgatttcaggatacagcgcctga

SEQ ID NO: 19741 - DNA, 234 bp, Escherichia coli
atgagcgaatatttcagaatacttcaggggctgcctgacggtccttttacccgcaaacatgccgaagctgttgccgcacagtaccggaacgtctttatcgaggatgaccacggcgaacagtttcgcctggttgtccgtaataacggtgcaatggtctggcgtacctggaattttgaggacggtgccgggtactggatgaaccatgtcatcagggatttcgggattcttaagtaa

SEQ ID NO: 19742 - DNA, 336 bp, Escherichia coli
atgtcacagaccccatccgatacttttaaattgtcttatcccttcaccactgctgcaggcaccagaattgagctggttgaactgaaacgcctgacggtaaaagacctgaagcaggtgcgcaaaatcagcaaaaacccggcagactgggacgaaccgctgattgcccgcagtactggtcttctcccggaggatctcgacaatatggatctggctgattacctgcagttacagaaacgatttcagctcatcacggggatgggtgagagcaaccagggcgctgacgcaggcgcaggggctgctggcgagatggttccggtttcagccgggggagattga

SEQ ID NO: 19743 - DNA, 282 bp, Escherichia coli; identical to SEQ ID NO: 5799

SEQ ID NO: 19744 - DNA, 522 bp, Escherichia coli; identical to SEQ ID NO: 5800

SEQ ID NO: 19745 - DNA, 1428 bp, Escherichia coli
atggcagctaactatctgcatggtcccgaaaccattgaggtggaaaacggagcccgcccggttaaaacggtgaaatctgccgttattggcctgattggtaccgccccgatgggggatgtcaatacgctggtacagtgcctgtctgagaaagacgcagcggcatttggcagccagttcaccggctttaccattccgcaggcgctggatgcgatttatgaccatggtgcaggtaccgttctggtcattaacgtcctcgacccggcgaaacataaaacggcgatcgaggatgaggtggttacctttgacaaatcgacagggcaggccagactggcgcatccggttgtcgctaatgtggtggtgaaaaacagtgaaggcagcaccacccacacggcgaacacggactaccgtgttgatgcgcaggcgggtgtgctcacgaacctgggcaaggctattgaggccggtggcagcgtgaaggtgagctatgagtacgcggacccgtcgaaggtgactgcggcggacatcatcggcggggtgaacagcgccggaaaccgaaccggcatgaagctgcttaacgacagcttcaacctgtacggctatttcgccaaaattctgattgcgccggtgttctgcacccagaagagtgtcgcagttgagcttatcgccatggcagagaagctgggcgcggtaacctacattgatgcgcctgtcggtaccacctttgcacaggctctggcaggtcgtggcccggaaggcaccatcaacttcaataccagctccgaccgcgtccgtctgtgctatccgcatgtgaaggtatatgacccggtgacaaacacagagcgtctggagccgctcagccagcgtgcagcaggtctgcgtgccagagtcgatctggacaagggctactggtggtcatcctccaatcaggagattctggggatcaccggcgtggagcgccagctgtccgcgatgattgatgacccgcagagtgaggtgaacctgcttaacgaacaggggatcaccacggtattcagcagttacggcagcggccttcgtctgtggggtaaccggacggcagcatggccaacggtcacccatatgcgtaactttgagaacgttcgccgcaccggtgatgtgatcaacgagtccattcgttatttcagccagcagtacatcgacatgccgattactcaggcgctgattgatgcactgacggagtcggtcaacgcctacggtcgcaaaatgactggtgatggtgcggtactgggcttccgttgctggtttgatccggcccgcaatccggagacggagctggccgccgggcacctgttgctgagctacaaatatacgccaccaccgccgctggagcgactgacgtttgagactgagatcacctcggaatacctgttaaccctgaaagggggcaactga

SEQ ID NO: 19746 - DNA, 252 bp, Escherichia coli; identical to SEQ ID NO: 5802

SEQ ID NO: 19747 - DNA, 465 bp, Escherichia coli; identical to SEQ ID NO: 5803

SEQ ID NO: 19748 - DNA, 447 bp, Escherichia coli
atgtactgcaccctggaggatttgcttgcgcaggtgccggagcggacgcttatcgagctcaccagtgaagagatggacttcgactcacctgcaacagtgaatacccgtgtggtggacagctgtatccgctatgccgacgagctgattgatgcccatctgcgcggacgctatatcctgccactggcagagataccgactgttctgcgggacattgccatcacgctggtccgttaccggctctacgcccgccgcccggaaggtgacctcccggatacggtgaaggatgaccacaaagaagcgctgcggcaactcagggagttacgtgataacaggctcacgctggggctgccgtccactcagaaagatgtgcctgagcctggcgagtttcgtgtacgcagtcgcccggccactttcggcggtcgtgacggtttactggagaaatactga

SEQ ID NO: 19749 - DNA, 339 bp, Escherichia coli; identical to SEQ ID NO: 5805

SEQ ID NO: 19750 - DNA, 954 bp, Escherichia coli
atgtctgattacttaaaaggtaaacgtgtcgttgatccggtactgaccagtatcgcccgtggctataaaaatgccgcattcatcggcgaacgtattttccccgtcgtgctgacggacaaggaaggcgtgcgtgtaccgaccttcgggaaaaccgcctttgtggaatatgacaccgagcgtgccgtcggggcggacagcaatgttctggtccgtgaaaaaacaggcacgctggacctggtgctgggtgaacacgatctggctgcgccggtggactatcgcgagcaggcggagtccatgtttaacgaagagagcaaggccatccgtcgcgccacgaatggcgtgaacctgcgccgtgaacttatcgctgcccgtctggctcaggatgaaaaggtctaccgtaccgggcacgtcaaaaaactgacagccagtgatcgctgggccggtggtaagggggaccccatcggggtgattgaagccggtatggaagcggtccgtacggccacggggctgcgtcctaacctgatgaccatgggggccggcgtgatggcgctgctgaagttccacccggcgattcaggccgccatcggagccaacgaacgcaagcgcatcaccacagaaatcctgcaggacctctttcagatcgaagagatcgtcatcggtgccccagtctccctgccgtccatgaaagcggcaatggataagaacagcgtgccggcggatatctggggagacaatctgatgctgcactatgtcggcaaaccgcagccgggggcggacagcgcggacgagaacgagccgtccttcggctacaccctgcgtcgtaaggggatgcctgttgccgacaaatacgacggagccggtggcaaggtgaagtactgccgttataccgatatctacaaagtcgccgtggttggtggcgatgccgggtatctcattaccggtatcagtaaataa

SEQ ID NO: 19751 - DNA, 1116 bp, Escherichia coli; identical to SEQ ID NO: 5807

SEQ ID NO: 19752 - DNA, 459 bp, Escherichia coli
atggcttccgataacctggtcagtatcaccattaacgataagtccctgcgccggagcctccgtgcgctggatcttgctgccacagacctggagcccgcgatgcgcaaaatcgccggaaccctgctggcggaaacacagtttaactttcttgatgaggggcgtccggggtggatgccctcgctggcagcggaagaacgtgacgggcagacactgcaggataccgggcgtctgatggggtcagtatcaaccgaccatgacgaccggcaggctgttgtggggaccaacgttgtttacggtgccattcaccagttcgggggtaaaacggggcgtaatgagtctgttgaacttccggcccgcccgttcctgccggtgacgggggatggagaactacagcctgaagtggtaatccccatcctcgataccattgtccgccatcttgaatcagcggcccgtcgctga

SEQ ID NO: 19753 - DNA, 822 bp, Escherichia coli
atgagcgtgacaacggctgaactggcgtactgcatgacgcttcccccgaagcgggcaatcaactacctgaagtccaaaggatatcagattacctgggactgggaagaaatgtggcaggaggcccatgcccgcgcctttaccgttgctaaagtgacccgcctggatatcctggaagatattcgcggggcactgcagcaggctgtcgatgaaggaaaaaccgatcgctggttccggcaggagctggagccggtgctgaagcgtaagggatggtggggaccacgtgacacgactgacccggtaacgggtgagccggtcaccattcagcagggcagtccgtggcggctcgataccatctttcgcaccaatatgtccgtactctacagcgccggtcgttgggcggaacagatggaaaacgtcgacgacaggccgtactggatgtataccggcatcaacgacagccatacccgcaggagccatctggcgctgcatggtctggtgctgcgctgggatgacccgttctggcaggcattttacccgccgaacggctggcgctgccgctgtagtgtgattgccctgagtgcggcggatgtacgtgcccgtggcctgaaggttatcagctccggctctgccatgggccaggaactgaaactggtctcagagaaaaccggcgaaatgcggaacgtggccacctttaataccggcaccacgaaggtgaccaccgacgtcggctggtcttatgctccgggggcagcataccgtcccgacctggcccgctatcagggtacgcttcagccactggcacaacaggaactgagaggataa

SEQ ID NO: 19754 - DNA, 1497 bp, Escherichia coli
atggcgaggggtatctgggtttcacccgatgaatttgttgctttttctgagcctcagaaatcactgaccgcgcagattgcctcccgcagccgcgcgatcgacttttacggactgggcatgtatctgcccaatcctgatcccattctcaaggctcagggacgggatatccgtatctaccgcgaactgcgcaccgacccgctggttgggggctgtatccgcagacgtaaagcagcgctcaaatcactggagcgtggactggagcgcggtcacgcttctgcccgggtcttccgtttcatccgcgacatgctcgacgatctggatctgtcccgcatcatcggtgagatgagtgatgccgtgctctacgggtatcagccctgtgaaatcatgtggggccgttcggtcagggcgtgggcagtgacggatattgtcggcaaaccgcctgagtggtttcagtttgatacggacaactgcctgcgcttccgggcgcgtgatgcgggtgtggagggtgagctgctgtcaccgtcaaaattcgtggtgccggcacaggatgcctcgtatgacaatccttacggtttcccggacctgtccatgtgcttctggccggtcgccttcaagaaaggcgggatgaaattctggctccgctttgccgaaaagtttggctccccgtgggtgatcggtaagcacccgaggggtgcaaatgatgcagagattgaaaaactgctggactccatggagcagatggtggaggacgcggtggccgccatccccgatgacagcagtattgagctcagggcagcggatggcaaggcagacagcagcgaggtatttcgcgagctgatcacactgtcacgcagtgagatctccattgcattacttggtcagaatcagaccacggaagcgaacagtaacaaggcctctgcacaggccgggctggaggtaacggctgatatccgcgatgcggatgcggacatcattcaggcggcagtgaatcaggtcatcagaacggtggtcaccctgaacttcggcgatgtgccgtgtccggtctgggccatgtgggaacaggagaccattgatgacacccgcgccacccgcgacgaaaaactcacccgggcgggtctgcgtctgaccccgcaatactttaagcgtgagtaccaactgcaggacggcgatattgacgagacatcaccgtcggaacgccagaataacatgctgccgctgtcatttgccgaggcgattgatgccgatattcaggctcagcagcagcttgacgacgcgctggacattctgatgaacggaggtgtgttaaatggcacgctggaacccgtcctggcacctctgtttaagcgggtcgaaaacggggttaacccgactgagctgctgggcgaactggcggagctctaccctcagatgaacacggacgatctgcaggaacggctggcccgtattctctttgtggcaaatatccggggacgtctgcatgagcgtgacaacggctga

SEQ ID NO: 19755 - DNA, 1596 bp, Escherichia coli
atgacaaaatcatccggagtgattttaaacgccgctggcggtggccccgaagggatgagtcccatggacgggaggaataaccttgctcccgttttgcctgatacctcggcgctggatgcccctcccgttctgttgccttaccagcagcgctgggtggcagacacctctccgcttaaggtgatagaaaagagccgtcgtaccggtattacatgggctgaggcatccgataacgtactgaccgccgcctcttctgcgccagcaggcgggatgaatgtgtattacatcgcttataaccaggacatgaccgtcgaatacattcaggcgtgtgcgatgtgggcacgggcattcaactatgcggccagtgaaattgaagaaggattctgggaagaggacgacgacgacaaacacatcaagacttacaccatcaaatttcctgactccggctttcgtattgttgcgctctccagccgcccgtctaacctgcgtggccgtcagggtattattgttatcgacgaagcggcgttccatgagcaactggacgaactgctgaaagcggcgctggcgatgcttatctgggggggaaaggtacgcgttatctccacccatgacggtgacgacaatccgttcaatacgcttatcggggatatccgtgccggacgtcagggaggcagcatacatcgcatcactttccgggaagccgtatctgaggggctgttccggcgcgtctgtctgcgcaccgggaaggaatggtcggaggcatccgagcaggcctggatggcatcggtgtacaaattctacggtgccggcgcatccgaagagcttgactgtattccggccaacggtggcggtgcctggctgtcccgtgccctgatagagtcccgcatgtccgctgatacgccggtattgcgtctgacctgcaaggaaggttatgaactgctgtctgatgaggttcgcttccgcgagacgcaggactggcttgatgagtatctgaaacccttgctggaggcactccccactgatgcccgctctttcctggggcgcgactttggccgtagcggtgatttgtcggtggactatcccctgctgcaggagaagaacctggtacgacgcgtgccattcgtactggagctgcgtaacgtgccgttcagacagcaggagcaaatcacctggtatctgatggatggcctgcccggtctgctgggtgcagcgtttgatgcccgtggtaatggtgcctatctggctgaatacgccatgcagcgctacggctccggccgggttcagcaggtgatgccaaccgaaggctggtaccgggagcatatgcctccggtcaaagctgcactggaagacggtaacctggtggacttaccaaaggatgaagacacactggatgacctgcgggccgttcaggtggtgaacggtgtcccccgcgtaccggagcaacgctcaaaagcaaaggctgacggtggtaaacgccacggggattcagccatcgcactggcgctggcgtatttcgccagccgtgaaattaacaaagggccggtgaaggcaagctcacgccgtcgtcgtcaggcggcccgtatgctggagggattctga

SEQ ID NO: 19756 - DNA, 546 bp, Escherichia coli
atggccagacgcagcacaatagaaaagctgccggaagacgtgcgccgctggcttgaacgggcgctgactgaatccggcttcagcgggtataacgagctggagtcactgttgcgtgagcgggggtacgtcatcagcaaatccgctatccatcgctatggacagaagattgagcgccgctatggtgctatccgtgcggcaacagaagcggcccgcatgctgaccgaaggcgcagcagacgatcaggatgcgcgttcggaggctgtgatagcccttattcagaccgagctgttcgagagtattgtccagttgcaggaggcggaagaaggcgaagtcgatcctaaagaacgcgtggccctgctgtcgaaggtggcgaagaatgtggctacgctgtcccgcgcgtccgtcaacctcaaaaagttccagtctgaagtacgggccagagcgcagcaggcagccagcaacgccgagaaaattgcccgtaaggggggactgtcaagcgacgcagtacaggcgcttcgtcgcgagattctggggattgccacatga

SEQ ID NO: 19757 - DNA, 312 bp, Escherichia coli
atggtcgatattacccgggtacgccgcgaatccctgcgctggagtctgctggttgccctgaacaagacccgcccttacaccgccagcgagacgctgctgctggatgtgtcccgtgccatctacccggacaccacaccgctggaactgcgccgcgaactggattatctggctgaccgtaaaatggttgagctggagaaaaaaccttctggcgactggtttgctgacctgacccgcctcggcgtagacctggtggaatacaccgtggaatgtggtccgggtattgcccgcccggaaaagtactggagtgaataa

SEQ ID NO: 19758 - DNA, 327 bp, Escherichia coli; identical to SEQ ID NO: 5814

SEQ ID NO: 19759 - DNA, 651 bp, Escherichia coli
gtgtggcatctggttaaaaagctgccgtggcgcggcattctgctggccattcttatcaatgcctttctggtcggcctgtatgccatgggatacagaagtggtcatgactctgcaaagcgtgacggtgataccgcgctcagtcagttgcagtcagcatttgacgcgtacaaaacggagcaggcaacgcttgagaatgctgcgctgcgggcctgggccagacggtatcaggagcaggtggccgccgggcagcgggctgaagccggttatcttgagcagattgctcaactggagagccggaataaacaactacaggggcaaattaacgatgtcacacagcgctggattgatgaaaaaggtaagagtcatcccattgagtgcgtgtttactcgcggtttcgtgcgccagtacaacgccgcactcggatatgacaacgcatccgtcgacaccggtcattcagactcagttgccgccgctggcacccgctctggcacagcgaccgggcaacctgaaaccactgacacccggttacgcgattcgggtgtctcccagcgtgacgttctcgccaacatcatcgacaacgcatggcaatgtcgtcgctggcggaaccagataaacgcgttactggatgaacgggaaggattacagaaatga

SEQ ID NO: 19760 - DNA, 708 bp, Escherichia coli; identical to SEQ ID NO: 17695

SEQ ID NO: 19761 - DNA, 351 bp, Escherichia coli; identical to SEQ ID NO: 5817

SEQ ID NO: 19762 - DNA, 276 bp, Escherichia coli; identical to SEQ ID NO: 8395

SEQ ID NO: 19763 - DNA, 309 bp, Escherichia coli; identical to SEQ ID NO: 5823

SEQ ID NO: 19764 - DNA, 189 bp, Escherichia coli
atgaaaagtcagaccataacgcgaaagcgcacggcgaaattggtctctctgtacggtgtcgttaaattttcgtcgaccgtgcgcttccggttgtggcactccgcgaaatggcgcggcggtaagtatggcgggggtattccttccccgttgaggacaccgggttgtcaggttgaccatacgcttaagtga

SEQ ID NO: 19765 - DNA, 720 bp, Escherichia coli
atgctggaagcgggtaagcggctgatcatcttaaaagaaaatgagccacacggtgattttacaaacattttagaaaatgaactcggacttgcaccacaagttgctcgccgcatgatgcaagccagtatgaagtttttgggagaaggtgatgagccaacaaaacgctcaacgttgagcgttttggggaaagccaaactgtacgacctgatggttctggataatgaagaacttgatgaattggccgacggcggcacagttgccggcctgacgcttgacgacgttgatcgcatgtcagtacgtgaattgcgtcaggccctgcgcgaagcgcgcgaaaccaacgcagcacaacagcgcgtactcgccgacaaaaatgaaaaaatagattcactctccaccagactggagaagaaatcccgtattcagccgcctgagcctgatgaggaggttaagaagctgcgggcggaagtaacagcattagcggttgaggcggaatctgctatcgccgtccgactgtccagcgcttttgagacgctgtgcgcatattgtgctgaaaacatgattgatacccccagagacttcatggcaggcctggtctgtcaactggaaagcacagcgcgtagcctgcgctccacatttgacctgccggacgagccaacaggcaatgcagcgccttcatggctgactgagccgacgccacagattaacgggctggaggcataa

SEQ ID NO: 19766 - DNA, 609 bp, Escherichia coli
atggcacgcatctgcctttacggggatttacaacgatttggccgccgcatcgaccttcgagtgaaaacggggtccgaagccatccgggcgctggccatgcagatcccggcgtttcgtcagaaactgagcgacggctggtaccaggtacgcattgccgggcgtgatgcaggtgaaaccgaattgtctgcccgtcttaacgagccgctggcaaatggtgccgtgatccacatcgtgccgcgtctggcgggagctaaaagtggcggtgtgtttcaggtggtgctgggggcggcgctgattgcggtggcatggtggaaccctgtgggctggctgggtgctgcggttgtatcgggcatgtatgcggcaggggccagtatgatcctgggcggagtggcgcagatgctggcaccgaaagccaggacgcccacggcagcaagtacagataacggcaaacagaacacctatttctcctcactggataacatggttgcccagggcaatgttctgcccgttctgtacggtgaaatgcgcgtggggtcgcgggtggtctctcaggagatcagcacggcagacgaaggggacggtggtcaggttgtggtgattggtcgctga

SEQ ID NO: 19767 - DNA, 603 bp, Escherichia coli
atggcgcgcatctgcctttacggggatttacaacgatttggccgccgcatcgaccttcgtgtgaaaacgggggctgaagccatccgggcgctggccacacagctcccggcgtttcgtcagaaactgagcgacggctggtatcaggtacggattgccgggcgtgatacaggtgaaacggaattatcagcccgtcttaatgaaccgctggcaaatggtgctgtgatccatatcgtgccgcgtctggcaggagccaaaagtggcggtgtgtttcaggctgtgctgggggcggctgttatggcggttgctatatggatgccgggggtaggaattatggcgagtaatctgctgttttctctcggtgccagtatgacgcttggcggtgttgcacagatgctggcccctaaacccagaaccccccgcacacagacaacggataacggcaaacagaacacctatttttcttcactggataatatggttgcccagggcaatgttctgcccgttctgtacggtgaaatgcgcgtgggatcacgtgtggtatctcaggagatcagcacagcagatgaaggtgatggtggtcaggttgtggtgattggtcgctga

SEQ ID NO: 19768 - DNA, 501 bp, Escherichia coli
gtgaatgcgaactccgggacgctcaacaacgtcacgattaacgagaactgccgggttctgggaaaactgtccgcgaaccagattgaaggcgatctcgttaaaacagtgggcaaagctttcccccgtgactcccgggcaccggagcggtggccatcaggaaccattaccgtcagggtttatgacgatcagccgtttgaccggcaaattgttattccggctgtggcattcagtggcgctaagcatgagagagagcatactgatatttactcctcatgccgtctgatagtgcggaaaaacggtgctgaaatttataaccgtaccgcgctggataatacgctgatttacagtggcgttattgatatgcctgccggtcacggtcacatgacgctggagttttcggtgtcagcatggctggtaaataactggtatcccacagcaagtatcagcgatttgctggttgtggtgatgaagaaagccactgcaggcatcacgattagctga

SEQ ID NO: 19769 - DNA, 369 bp, Escherichia coli; identical to SEQ ID NO: 4841

SEQ ID NO: 19770 - DNA, 216 bp, Escherichia coli; identical to SEQ ID NO: 5123

SEQ ID NO: 19771 - DNA, 1455 bp, Escherichia coli
atgaataataagggctccggtctgaccccagctcaggcactggataaacttgacgcgctgtatgagcaatctgtagtcgctttacgcaacgccattggcaactatattacaagtggcgaattacctgatgaaaacgcccgcaaacaaggtctttttgtctatccatcactgaccgtaacctgggacggtagcacaaccaatccccccaaaacgcgcgcatttggtcgttttacccacgcaggcagctacaccaccacgattactcgccctactctctttcgttcgtatctcaatgaacaacttacgttgctgtatcaggattatggtgcgcatatctctgtgcaaccctcgcagcatgaaatcccttatccttatgtcatcgatggctctgaattgacacttgatcgctcaatgagcgctgggttaactcgctacttcccgacaacagaactggcgcaaattggcgatgaaactgcagacggcatttatcatccaacggaattctccccgctatcgcattttgatgcgcgccgcgtcgatttttccctcgcgcggttgcgccattataccggtacgccagttgaacattttcagccgttcgtcttgtttaccaactacacacgttatgtggatgaattcgttcgttggggatgcagccagatcctcgcccctgatagtccctacattgccctttcttgtgctggcgggaactggatcaccgccgaaaccgaagcgccagaagaagccatttccgaccttgcatggaaaaaacaccagatgccagcatggcatttaattaccgccgatggtcagggtattactctggtgaatattggcgtgggaccgtcaaatgctaaaaccatctgcgatcatctggcggtgctacgcccggatgtctggttgatgattggtcactgtggtggcttacgtgaaagccaggccattggagattatgtacttgcacacgcttatttacgcgatgaccacgttcttgatgcggtactgccgcccgatattcctattccgagcattgctgaagtgcaacgtgcgctttatgacgctaccaagttagtcagcggcaggcccggtgaggaagttaaacagcggctacgtactggcactgtggtaaccacagatgacaggaactgggaattacgttactcagcttctgcacttcgttttaacttaagccgggccgtagcaattgatatggaaagtgcaaccattgccgcgcaaggatatcgtttccgcgtgccatacgggacactactgtgtgtttcagataaaccgttgcatggtgagattaaacttcccggtcaggctaaccgtttttatgaaggcgctatttccgaacacctgcaaattggcattcgggcgatcgatttgctgcgcgcagaaggcgaccgactgcattcacgtaaattacgaacatttaatgagccgccgttccggtaa

SEQ ID NO: 19772 - DNA, 1638 bp, Escherichia coli
atgcaaggcacagccttagataaaagtcaagagtttcaacttgttgggaatgatgatgttgccgagctgtcaacaattaatgcaactcaagaaataaaagacagtgttactccagagattataatcgcactttgtgggccaattggttcaccgctacatgagactgctgagcagatatcattctcgcttaaaaaatatggctataaaacatacgacatacgcttgagtgatctaatccggattaattcaaaatatacatcaattaatattgatgaaagcactaatctaaagaaattcaagtcacttataactgtgggtgataaacttcgtgaaatttatggtagtgatattcttgcaaaattagctattgctaaaattagcgccgagcgtaaaaaaaactttggtgaatttgatgatattgttaatgaatccagcaaaggggaagcgagtaagattaaaaatcaaaaaatttgtcatattattgactcagttaaaaactcttctgagcttgagttgttgaaatcaatctatggaaaaatgattttctctataggtgtattttcccctttagaggcaaggcgtgaaaatctttcaaaaattaatagactaagcgttgaagatattgctgaactaatcaataccgattctggtgaagagttcgatcatgggcaatcagttagagacactttcccgaagtgtgattactttttgcgggttgacagtgggttggcagagccaggaaatgccgatgctaaaggccaaattctatctaaactggaacgtttctttaagctaatttttaggagttcagttatatcaccgactgaagaggaaaatgcaatgtatgcagccacctcagcggctcgtaattctgcatgtctatcaagacaagttggtgctgcagtaacatcttcatctggagaacttctttctaccggttggaatgatgtgcctcgtaatggtggtggtctctatggtaaacaatctatccgcttaaaagttattgatcctgatcatcgttgttatacattacaaaatagaaattgctcgaatgatgcggaaaagagaatattggctgaagttgtcattgatagccttgtacaggaaaaaataatccctgtaaaaaaaagagaagcggcgattcaaactattataaaaaactcacgattaaaagatttaatagagttttcaagagcggttcatgcagaaatgcacgcgattcttggcgcatctcgtgtggcaggagaaagaattttaggcggaaaaatatttgtaacaacctatccatgtcattcctgcgcaaggcatattatcgcttctggtatctctgaagtatattttattgagccgtatagaaaaagcttagctcttaaacttcattcggatgcgatgaccgaatcagtaatcgagacggatgaaaaagtgaaattgatacaatttgatggagtagctccaactaggtttcttgagctttttgaatctggatctcgaaaatctaaagctggggtgctagagttagcgacagagggtgcggctatgcctgtggatagcgttagtctcaaagcgattcctaaattagaacaggtagttattgctgaagttgatagtaataaacttaacttgttgaggcttgagtga

SEQ ID NO: 19773 - DNA, 213 bp, Escherichia coli
atgaaaaaaaacgacagaaaccagttggaactacctatattaacagaagttagtataggaacaatccactcgaacacgagaagtgtccaacacactgctcaaccgtctacatgtgagagtgagtatgtcgaacttgcaggttctgaagatattgagatttatcaatcgattagcaacgcttacttcagggcattatctactcagaaacgttag

SEQ ID NO: 19774 - DNA, 294 bp, Escherichia coli
atggatataacacctttccttcatgcgctttgtgctgtggctgcgcagctactgattggtctttttaccgggaactgggcttacggggcgatagccggttgtacgttcttcattgcgcgtgaacacacccaggcagaatatcgctggattgaaatgttcgggcatggcaagcgaatgaatatgccgtggtggggcggttttgatccgcgcgcgtgggatgtggcaagcctgatggattttgctgtgccggtggtggcgtgtctgctggtctggctgttggttaatcgtgggtga

SEQ ID NO: 19775 - DNA, 1017 bp, Escherichia coli
ttgctaaaacatttactagaatactaccctgcaagtcaacagctttatgctgaattacaatctgtagctaatctcccgtctcaatcatttatacaagagattcatccaactaaggcttttgaaaattttatgcaacaacaggatgtgagttataaactaataaccgcactccataaagcatacaaaaatattaataatgatactcaacttatactgtctgaaaaaaataaagaacaatcgttagtattgtcacaattatacgaagcccaggaagatttagagagcttttatttaaacaagaaaaatttagaaaaagagcttaaaattaaggaatgccatcttgaagataaggaaagattagttaaagaaaaagaaaaagaacgtaattgtttagaaattaaactaggtgagcttgaaaaagaattcaaagccacattaaaaacattgcaggaacgtgaatctcaaataaaattatcacaacgatcaatacatgagcttcaaagcaagttatcatcactgaatgcgactgaacaaaaagctaaagagctgcgttctggcatttcacgattagaagaagagaataaatcattaatatcccaactacatcgcgcccaagatgaactggagaaatattattacgataaccaaaagctcaagcaacaattaccagtaccactgtatggagcagctcagcgaataaaaaatgaactagggtataagttaggtgcagttatgataaaacattcgcactcactatttggttggctaggaatgccttgggctctttgctctgaagctaaaaaatatcgaaatcaaaagaaagatattgtgcataataatgaaccacctatttatgcatataatgacgcctttgaagcagaacgagtaaaaaaacatctttcttatagattaggacagacattacttaaaaatattaagtctccattaggttggattaaactcccatttgcactagcacaaaatgtacgagagtttcgattagaacgaggtgagtaa

SEQ ID NO: 19776 - DNA, 123 bp, Escherichia coli
atgcgtacgtttagtggcaaacgtagtacgctggcgctggctatcgccggtgttacagcaatgtcgggctttatggcaatgccggagctcgcgccgaaggattcatcgacgattcaaccttaa

SEQ ID NO: 19777 - DNA, 636 bp, Escherichia coli
atgacaaataaccctctgattccacaaagcaaacttccacaacttggcaccactattttcacccagatgagcgcgctggcgcagcaacaccaggcgattaacctttcgcaaggctttcctgattttgatggtccgcgctatttgcaggagcggctggcgtaccatgttgaccagggggcaaaccaatacgcgcctatgactggcgtgcaggccttgcgcgaggcgattgctcagaaaacggaacgtctgtatggctatcaaccggatgccgatagtgatatcaccgtaacggcaggggcgacggaagcgttatatgcagcgattaccgcattggtgcgcaatggtgatgaagtgatctgctttgatcccagctatgacagttacgcgcccgccatcgcgctttcggggggaatagtgaaacgtattgcactgcaaccaccgcattttcgcgtggactggcaggaatttgccgcattgttaagcgagcgcacccgactggtgatcctcaacaccccgcataaccccagtgcaactgtctggcagcaggctgatttcgccgctttgtggcaggcaattgccgggcacgagatttttgtcattagcgatgaagtttacgagcacatcaacttttcataa

SEQ ID NO: 19778 - DNA, 1089 bp, Escherichia coli
atgcctcacaatcctatccgcgtggtcgtcggcccggctaactacttttcacatcccggcagtctcaatcacctgcacgattttttcactgatgaacaactttctcgcgcggtgtggatctacggcgaacgcgccattgctgcggcgcaaacaaaacttccgccagcgtttgaactgccaggggcaaagcatattttgtttcgcggccattgcagcgaaagcgatgtacaacaactggcggctgagtccggtgacgatcgcagcgtgctgattggcgtcggcggcggcgcactgctcgacaccgcgaaagccctcgcccgccgtctcggtctgccgtttgttgccgttccgacgatcgccgccacctgcgccgcctggacaccgctctccgtctggtataacgatgccggacaggcgctgcattatgagattttcgacgacgccaattttatggtgctggtggagccagagattatcctcaatgcgccgcaagaatatctgctggcggggatcggtgacacgctggcgaaatggtatgaagcggtggtgctggctccgcaaccagaaacgttgccgctaaccgtgcggctagggatcaataatgcgcaggctattcgcgacgtcttgttaaacagtagcgaacaggcgctgagcgatcagcaaaatcaccagttaacgcaatcattttgcgatgtggtggatgcgattatcgccggaggtggaatggtcggtggtctgggcgatcgttttacgcgtgtggcggcggcccatgccgtgcataacggtctaaccgtgctgccgcaaaccgagaagtttcttcacggcaccaaagtcgcctacggaattctggtgcaaagcgccttgctgggtcaggatgatgtgctggcgcaattaacagaggcgtatcagcgttttcatctgccgactacgctggcggagctggaagtggatatcaataatcaggcggagatcgacaaagtgattgcccacaccttgcgcccggtggaatccattcattacctgccggtcacgctgacaccggatacgttgcgtgcagcgttcgaaaaagtggaatcgtttaaagcctga

SEQ ID NO: 19779 - DNA, 759 bp, Escherichia coli
gtgaccgatgcgttcggcaatgcgcttgccggacagacggtcagcgtgatggcaggcaacggtgcaacggttgctccgacggtgattacagagccggacggcacggtggagatcagtgtcaccagccagacggcggggatcagtacagtcaccgcaaccatcaacagcagcagtcagagccgggatgtgacatttatcgccgatgtcaggacggcgcagatcgcggatctggtggtcattaaggatggttcagaggcggacggttcgacggcgaacacgctgcgggcgagggtgaccgatgcgttcggtaatacgcttgccgggcagacggtgagcgtgttgggaggcaacggcgcaacgactgccccgacggtcatcacagggccagacgggacggtggagatcagtgtcaccagccagacggcaggaatcagtgtggtcaccgccagcatcaacagcagcagccagagccgggatgtgacgtttatcgccgatgtcagaacggcgcagatcgcggatctggtggtcattaaggacggctcagtggctgacggcgcgacggcgaatacgctgcaggtgaaggtcactgatgctaacggtaatgcgcttgccgggcagacggtcagcgtgatggcaggcaacggcgcaacgactgccccgacggtgaccactcagccggatggcacggtggaaatctctgtcaccagccagaccgccggaaccagtgtggtcaccgccagcatcaacaacagcagctag

SEQ ID NO: 19780 - DNA, 795 bp, Escherichia coli
atgctggaaagctggcgctggttacactcgctgcacagcaccctgttgagccgtgaagtggactggacgcagctcgaccacgtgattgacgctgttgtggcgaaaatcccggaactggcaggtatcaaagatgctgcgccggatgcgacattccgtattcgtgggcagaaactggcccgtgagccgcaccgttacagcggtcgtaccgccatgcgcgccaacatcagcgttcatgagccgcgtcagccgcaggatattgacaccatgttcaccttctcgatggaaggtaacaaccagccgaccgcgcaccgttcgcaagtgccgtttgcctgggcaccgggctggaactccccgcaggcgtggaacaaattccaggacgaagtgggcggcaaactgcgctttggcgatccgggcgtgcgtctgtttgaaaccagcgaaaacggtctggattacttcaccagcgtaccggcacgctttcagccacaggacgggaaatggcgtatcgcgccgtactaccacctgtttggcagcgatgaattgtcacagcgagctccggtcttccagagccgtatgccacagccatacatcaaacttaacccggcggatgccgcgaagttgggtgtgaacgcgggcactcgcgtctcctttagttacgatggcaacacggtcacgctgccggttgaaatcgccgaaggactgacggcagggcaggtgggcttgccgatgggtatgtccggcattgctccggtgctggctggcgcgcatcttgaggatctcaaggaggcacaacaatga

SEQ ID NO: 19781 - DNA, 1773 bp, Escherichia coli
atggctacaattcatgtagacggcaaagaatacgaggtcaacggagcggacaacctgctggaagcttgtctgtctctgggccttgatattccttacttttgctggcatccggcgctgggaagcgtcggtgcttgccgccagtgtgcggtgaagcaataccaaaacgcggaagacacgcgtggtcgcctggtgatgtcctgtatgacaccggcttccgatggcacctttatttccattgacgatgaagaagcgaaacagttccgtgaaagtgtggtcgagtggttaatgaccaaccacccgcacgattgtccggtatgtgaagaaggcggtaactgccatcttcaggatatgaccgtgatgaccggacacagcttccgtcgctaccgtttcaccaaacgtacccaccgtaatcaggatttggggccattcatctctcacgaaatgaaccgctgcatcgcctgctaccgctgcgtgcgttactacaaagattacgctgacggcacggacctgggcgtttacggtgcacacgacaacgtctacttcggtcgcccggaagacggcacgctggaaagcgaattttccggtaacctggtcgaaatttgcccgaccggcgtatttaccgacaaaacgcactccgagcgttacaaccgtaaatgggatatgcagtttgcgccgagcatctgccagcaatgttccatcggctgtaacatcagccccggcgagcgttatggcgaactgcgtcgaatcgaaaaccgttacaacggtacagtaaaccactacttcctctgcgaccgtggtcgtttcggttacggttacgtcaacctgaaagatcgtccgcgtcagccagtacagcgtcgtggcgatgatttcattaccctcaatgccgaacaggcaatgcagggcgcagcagatattctgcgtcagtcgaagaaagtgatcggcattggttctccgcgtgccagcgtggaaagcaactttgcgctgcgtgagctggtgggcgaagaaaacttctacaccggtatcgctcacggtgagcaggaacgtctgcaactggcgctgaaagtgctgcgtgaaggcggcatttatactccggcactgcgcgaaatcgaatcttacgatgcggtactggtgctgggcgaagacgttacccagaccggcgcgcgcgtcgcgctggcagtgcgtcaggcggtgaaaggtaaagcgcgcgaaatggcggcagcacagaaagtggctgactggcagattgcggcaatcctcaacatcggtcaacgtgcgaagcatccgctgtttgttaccaacgttgatgatacccgtctggatgatatcgcggcgtggacttaccgcgcaccggttgaagatcaggcgcgtttaggttttgccatcgcccatgcgctggataactccgcgccagcggttgacggtatcgaacctgagctgcaaagcaaaatcgacgtcatcgtgcaggcactggcaggtgcgaagaaaccgttgattatctccgggacgaacgccggtagcgctgaagtgattcaggcggcggctaacgtcgcaaaagccctgaaaggtcgcggcgctgacgtcggtatcaccatgattgcccgttccgtcaacagcatggggctgggcattatgggcggtggatcgcttgaagaagcgttaaccgaactggaaaccggaagcgccgacgcggtggtggtgctggaaaacgatctgcatcgtcacgcttccgctacccgcgtgaatgctgcgctggcgaaagcgccggtacggtaa

SEQ ID NO: 19782 - DNA, 1059 bp, Escherichia coli
atgagtagtgcctacaatagtcttgatccccgtgtccgtaagtgggtttataagcagggctggtcatccttaaggcccttgcaggaaagctctattccggcaattttagcccgtgatcgtgatgtactaattagtgcaggtacagctgcgggtaaaacagaggctttctttcttcctgcctgttcagcgattgcagatctcactggtggatttggcattatctatatcagtccattgaaggcattaattaacgatcaacaccgtcgtcttgagagtcttggtgaagccctggaaatgcaagtgacgccctggcacggggatgtaccacaaagcaaaaagaagaaagcacggacaaccccttctggcatcttacttatcacacctgaatcacttgagtctttgctcataaactcattgggttggctcaaacaggcgttttcttctgtggcatacattgttattgatgagttccatgcttttattggctcagagcgtggtatacagctgctttctctgcttaacagaattgaccatgtgctgggacgccagttgaatccagttccccgtgtcgcgttgagtgccacactgggagagctggaaaaagtaccagaactattgcgcccggataagagattaccttgtgaaacggtaacagacagtaatagcaaagccacaatacaggttcaggttaaaggttatcttgagcgggtgcccgaaaaaggaaaagagctccagagctctgctgaacagctcgtctgcgcggatattttcaggctctgccgtggcgattcccacctagtctttgctaacagtcgaaagcgtactgaaagcatagcggcaacactgagcgacatgtgtgaagcaaatgtcgttcctaatgaattctttcctcatcatggttcccttgcaagggagttgcgtgaggcgcttgaagcccgactgcagaaagggaatttgcccacaaccgctgtttgtacaatgactctggagctgggtattgatattggtaaggtgcagtctgtcatacaagttgcgtattaccgtgaaggagatcggtga

SEQ ID NO: 19783 - DNA, 627 bp, Escherichia coli
ttgacacttcgtctgactctgattgatgaactgatacgtaaacaacatcattatctggaggatggtgatctgtgttattgctttggcgaatacacagcccgacaaggtgcagcttacagcaaaactaaccagttaatcatcaatcttaaaaaggggtatgaacgtcgggcattccctgattaccactataaaaaggctgctattgagtatgttgctcagatgctcatatcaaatatcggtaatcttgaggaatacacatttgttcccgtaccaccatccaaatgccgtacagatgccgcttacgatgaccgtatgacagaaattctgcgaattgcgcaaacctacgaaccctggctggattaccgggaactggttgtgcaaaacgtatcaacaattgcctctcatacagcagcaaatcggccctcaccagaagcaattatggcaaactaccaactaaatgaacaattactggaagggtgcaggccctggattgttatttttgatgacgttctcactgccggtagtcattttaaagcgatgaaaagcctgatactaaaacatattcctgacgcctgtatactggggctctttgttgcccgtacaacccggggagctcaaattatttaa

SEQ ID NO: 19784 - DNA, 894 bp, Escherichia coli
atgtcgcagttcgattttaccagtctggatccctttgcccgagccatttctccttttgaggaaatggcggcttatgaggcgttatggtcagaaaaaggcgcgacattcaaaactattgcggataaatttcgtgcagcaccaaccggctcgcttccttctgactttgtctcagacagcattattgctgcttttaaaaaccggctgaaagaaattatcgcgcgttacgatattgacgatctggggatacgtgtccatggggccggagaatatccagaaaaactgcgggatgcgcggaaccccatagaacttctttactatcaggggtggtgggacctgattaacactcgctcggtagctgttgttggttcccgtagagtctctgaagaaggagcaaaacgaacccgcaaagtcgtcaaatttctggttgaggatggttttaccatcgtttcaggactggctgaaggcgtggataccaacgcgcatcagacggcactggctctgggtggtaaaacgattgcagttatcgggacaccactttcacatcattatcccagacaaaacagtaatctgcagaaaaacattcgcgacaaccacctgcttatcagtcaggttccgtttcatcgatacctggagcaggactatcggagcaaccgaatattttttccggagcgaaatgtcacgatgtctgcactgacagaagcaacgattattattgaagcatcagaaacatcaggtactctgactcaggcacgtgcggcacttgcccagggccgaaaattgtttattctggaatcctgctttcgtaacccatcaattacatggcctgcccgttttgaagcgcagggggccattcgggtcaggaattacgaagacatcaggaggcatctccgttga

SEQ ID NO: 19785 - DNA, 303 bp, Escherichia coli
atggtgacaagtaagaaagatattatttgtgaatatgcacagaattcgctgaacgatgttgctagttttgcaaaattcgtcagctatgcggaagaatttgtgcagtcgaatgaattgttcaaaaatgaggaaagtaaagagagttaccagcaaatatggttcgagttggaaattattaatgcacttgccttgtctgaatgggaaagtgccggtcgtccggaaaactggcagacccgttgggaattagcttataaacaggatgcgtctcatgtaatggctgagttactcaatacactgcaatga

SEQ ID NO: 19786 - DNA, 192 bp, Escherichia coli
atgtactccatgaccacagcctcgtttaccggtgaagtgaataaagctgcaaatgtggctgctcatgccgtggtgaatgccgcactggtggcacagggaaataacgttcttgcctgtgccgcggatgcagccaccggcgaggtggtggggatgatagccacagatgcgtattaccgtgaaagtgatcggtga

SEQ ID NO: 19787 - DNA, 2445 bp, Escherichia coli
atggccaaaatgattccggcatttggacctattgataataatagttatggggaaaaaacagtctatacactgttaaaagaaggtctgtccgatgatttcacagtgattcatagtctcccgtggttaagtgcggcgacacgaaatttagggatgaaattacctccgagtggagaaattgattttcttgttctccatcctgtatatggtgttttggcgttagaggtaaagagtggaatatatcgcgtagaaggtactgtttttgtacatataaaaacaaaaaaacatgtagatatagtgaagcaaacacgtaacaatgtccatggtttagcccgttggttagggggagcaacaacgttacggttgcgtatcggttatggttttatttttcctgatagttatttcgatgataaaattataaatgcagcaatggtagatgcggctgttaaaccattcaggggaatatttgttgataaaagccaactcccggaaatggcaaagcatactattgatataatgcaatactggaaaaatgcattgggaaataatgagttgggggatgaacgggttcaactaataataaaatctgtatgtcctgagtttgatggtactcctgactggggaatccgtattatttatgataataaattatggttaaggctcacacatgaacaaatcaaggtcattgaacttctgtcagaatatcaaagagttgttgtaaccgggtggccaggaacaggaaagaccctgattggaatcgagtttgcacggcggcttgttaaaggccaaaaaaaggttttatttattactttcaataaccttctttcagaatatattcggcaacaaactccggagtcattatgcgacgtttttacctggcacaaactttgtcatcaggctcgaaacaaattatccctgtcccccgagtctccggcaggttggtttgaatcaggatgctgcgaagatttgcttaatgcattaaataaaaataaactaagagattatgatgctttaatcattgatgaagcacaggcgttacattcttcgtggctggagactttatcttgttggttcgaaaataaaaggattatcgcattttgtgatgaaactcaaacattttcctttgaaaaaggaacaaattacgctgatcttcagcgaataataaatccccaattttcttttaacttatctgttgtgttaagatgtcctagagccgttactgattatttaatagctgtcagccctgcctcataccaaattacttcccctaggaataacgaaccggatacgctaaaagaattagttgttacagatccactctccacattgcttaatgaaattttacaattgaaagaaagttctgtactgcctgatgagattactgtccttgttcctacggatttagtgaaaaattccctccagaatgatatgagaactttgggggtgaatattgaaacagtatctcgttttcgaggtatggaatcatctgtcgtgattacattgtattccgaaagcatggaggatgcacagttattttgtgcttattcaagagctacaactgcttttattgcaatttatgattcggagaaattagcatggagagaaaaaaataaatttttgcataaactggttaacagaaaggaggctcagagagcaattaatgaagcaaagcataactcttcctccagtgttcttatggccggttttttccgcgaaggagagttaaaactcagtactgtaaaattagcatggtcgaagcacttttcttcgtggcttgttgaatttgatgaaagaaattctccagaagaaatgtggatagattatttgtattcctatttgccttacccgattatatattggttcagagattcatgtagagctgttaattacataaaaaataaacaatttgaattaaatgaattaggctcagggatacatctggtaataaaaaattgtagcatatgtaaaaagatggtacctttttattctgatgataattgtttgctttgtaataagaagaatgaagagttgtcaccaaccagagatgaaattaataaaattcgcgagtttgatgtaacaatatcccaggacaatcttaattcagttactcaacgattgttacccacaccattagctgcggtaagagcccgaagagttgcatttgaaaatccatatagaaataaagtactaagtgaatcattacctgctggaaaccttctttacagaagtgcattagcttttatacaggccttgattgcattagtcccatcaaagaaaatactggacttggataagataacagatgctctgcgtaggcggtatgttcatcttgagcaattagaatatgccgaattaagaaatgctttagcttgtgcattgtcaacttgttataatagaaaatatctcattaaagttgcaaaaggaaaatatttacctgttgacgactag

SEQ ID NO: 19788 - DNA, 1908 bp, Escherichia coli
atgaccagcaatattgccggacaacataacgtcgtggtgagccggaaagcgcaaccctccgataataaaacgtttagtttatcagtgctgccggatgaaagttcggcgaaggtaataagtataaccggagccgaaaaaacgataacggttggcgaaaacatcacgctacggatactcgtccaggacgcgtttaacaatgtaatagcgggtcaacgcgtcagattaagtgcgcagccaacagctcacattacgataggcgatacggcttacactgataataacggttacgcgtacgttaaccttctcagcacccagcctggggtttatcaggtgacggcaacgctggacaataacagtagtagtaaggttgacgtgaatgtggcaaatgacaagctcgagttaacatcatcgaagccagaaaccacggtccataacagtgaaggtattacgcttaccgcaacggcgagaaatgctcaggatgaattgatgcctgggcaaattatcacctttagcgtaacgcctgaaggtgcaacgctaagcaatacaggggaaatacttactgaccagtatggtcaggccaaagtgacgctgaccagtgacaaagtgaatgtctataccgttacggccacaatgggcaaagatgttcccgttcagagccaggtaacggttgcggttaaggcagatgctaaaacggcacatgttgtgagcgtcgtggcctcccctgacaccataaccgccgacggcgttgatagcagcaccatcacttcacgagtagaagatgattacggattcccggttgaaggtgtcgatgttagttatgccttagacaccaaaggcagcccggtagttaatattccaactacgcgtaccgatcagtccgggcaagtcacggcgacaataaccagtacattggcagaaaccttaacagtcaatgtgcaagttcctggtacagccaaccaatccgcaaccattacattggttgccggcacggccgatgaaagtaagtcaattttgaaatccgacgttgacactctgaaggctgactaccagcagagcgcaaaacttacgctaacattgcaagacaagtacggtaacccgatagtgacgtctgatcatctggaatttgtccagtcaggcccctttgtgaactttctcaagttgagcgatattgattacagccagagaaattatggcgagtacaccgtgactgtcactggcggaaaagagggaacagcgactctcattcccatgctgaacggggttcatcaggcaaacttaagcgtatcgctgaatctcatccgctcgataaaagaaatgtccggtcatgtcactgcaaacaaccataccttctccacggctcaattcccgagcgaaggttttgcaggagcgtattacacactcaacaatgataactttgaagcgggtaaaaccgttgatgattatatgttttcaagttcacagagttgggtgtctgtcgatgcttcaggtaaggtttctttcgcaaatatcggcgatcaaacgtcagtcacaataagcgctgttccccgacaaggaggtacaacctaccagaccttaattaagctgaaaggctggtgggtgaataatggaaatcataccaatatctggctagctgccaatgcgctctgtcatgcgaaaaatgatggatataatcttcctggcatcacacatttgacgtctggcgaaaacaaacgcacgcagggatcactgtatggtgaatgggggaacgttggagcgttttccagtaattcgcaatttacacaaggagcttactggacaagtgaatctgatgattacaatcggcactactatgtgcagatgctaacgggtatgaccggaagcgacgctgattccagcccccaactgaccgcctgccgtaaatcactttaa

SEQ ID NO: 19789 - DNA, 189 bp, Escherichia coli
atggtatttgaagcacttcgttatacccaagaacgaattatgcactatccggcgttctcagaaataaaacagcaatggattaaattcagtgtggagcttattgattgggcaaaagagcgaattccttcagatatgcatgagcaatttaatgaatataaagaagagtttataaattctttaccaaattaa

SEQ ID NO: 19790 - DNA, 1110 bp, Escherichia coli
atgtacgattatcttattgttggggccggattatttggatgtacgtttgctcgcctggcaacggacgcagggaaaaaatgtcttattattgaaaaacgagaacatatagcagggaattgctatacggaaaaaaaacatggcattcaccaacatatatatggtccccatatctttcattgcaatgatgatgatatatggaattttgtgaatcgctttgcaaaatttaatagctttataaatcgacctattgctataaataatggtaaagcttattcccttccatttagcatgtacacatttaatgctatgtggggagttctgacgcctgaggaggcgattgcaaagattgaatcacaaaagcttaagttagaacgtgaaccattgaatttggaagagcaggctctttcgctagttggcacggatatatacaatacattaattcgcgattacacaaaaaaacagtggcaaaaagatcctaaagaattacccgcatcaattattacccgcctacccgtgagaatgacttgggataataactatttctttgataagttccagggcatacccattggaggatatactctaatgttcgataatatgttaaatggaatagaggttagagtaaacactgattattttgctaataaagaatattttgatgggctagcgaaaaaaattgtttttactggcaaaattgatgagttttatgactacagatttggggagttagagtatagggcattgaaatttgaaaatgaactattgccaatgaaaaattaccaaggtaatgcagttattaactacacatcagcagatattccatggaccagaattattgaacataaatactttgatgaggcgagtgctgaggagaatgtaacaattataacaaaagaaatacctgatacgtgggctagagaaaaaataccgtattaccctgttggtgatgaaggtaacaggcatattttcgaaaaatataacaatcttgcaaaaaatgatgaaagaattgtttttggtggtagacttgctgaatatagatactatgatatgcatcaagtgattaggtcggcatttacaaagttcggaattgaatttaaaaataatatttga

SEQ ID NO: 19791 - DNA, 378 bp, Escherichia coli
atgaaaacattacccgatacacacgtacgggaggcatcgagctgcccgtctcccgtcaccatctggcagactctgctctcccgactactgggccagcattacggccttacactgaatgacacaccgttcgccgatgaacgtgtgattgagcagcatattgaagctggcatttcactgtgtgatgcggtgaattttctcgtggaaaaatacgcgctggtgcgtaccgaccagccgggattcagcacttgtccccgctctcagttaataaacagtattgatatcctccgggctcgccgggcgaccggcctgatgacccgcgacaattacagaacggtaaatgacattaccctggggaagcatccggaggcgaaaagatga

SEQ ID NO: 19792 - DNA, 156 bp, Escherichia coli
atggaaataacaaaaatgcaacataaaaacagtcatcagcggctgctttttaatgtttactttatcattttctattacctttattcctgcattccttacaaacaggcaggaacttatatccaggggacttcttgttccagcattatttcttgctga

SEQ ID NO: 19793 - DNA, 477 bp, Escherichia coli
atgagtaatacacaacataaacttgataaaactcgccctccacgcgtacagataacgtacgatgttgaaaccggagatgccgaaacagcgaaagagttacccttggtcatcggagttttgggtgagtactcttcatcagaaaaaccattgagggaacgaaaatttattagaatagacaaagacaattttgatgaagtgatgacgtcaatgagtccgaaagctcattttatggttaacagtgttattccgggcaatgagggacagttgaatgtagagcttgtgtttaagtgtaaagacgatttttctcctgacaatgtgattcaacaggtagattgtcttaaaaatttatcggaattgaggtctcaactgtgtgaccttcgaaatcgggctgcaagtaatgaaaaactgaaggaaaaactacaggaattactggcgaatactaatgacaattctgaaaattatgaaagaaaggaatga

SEQ ID NO: 19794 - DNA, 498 bp, Escherichia coli
atggctagtattggttatgagcgaagcagcgaatttgttaaaataacaatagatgacaagataataaagggaaactcaaaagttaataaccgtgatgactactttgatgcatattgtcctcacgcatttcgcgcttttgcaggtattgatggtgctctttttgatgtttgtaatctgaagcttaaagttactaaacaaatacaagaggttatagagagtttttttaaaagaggagagaaatcagttaaaatagaagtttcacgcagggagtccactaagtcaggtagtgactattcatcctttaaagttacttatgacggttgtcgcttatatgatatattgttaactcataatgagaactctgaactatgtcttgaattatcatttagtccggaggattcagttacaatagagatgaatattccatcgcctgatggtaagagtacagaaaaattaggaccaataacgtatagtttacaaaaacagatacttgtataa

SEQ ID NO: 19795 - DNA, 360 bp, Escherichia coli
atggactttactccttcagatgatcttaagtatgagcttggcatgttattatcgtcccgtccttcatatcttgaaacagatgaacttcctttagttaacggttctgttctgaattatggtataaagccatcaatatatactgctgtagagcatagtgacattgttaatggtgagatatcctcaagactgttgattatgctacaacgttatgagcctcggttgaagaatcctattattgatcatcttttcagtgattgtaattattctcatttttcaattaccgccctgttttttatggacaaggtaaaattccgcattaaatggaataaaaattcaggagagatttcattggatgaataa

SEQ ID NO: 19796 - DNA, 1803 bp, Escherichia coli
atgaataaactattattatattatcagaaggaacttctttttctaaaaagacatggggtcgaattttccagaagatatcccaagatagcccgccgccttggatataatcagggtatatccgaggatccacatattcagagattaacggaatcctttgcatttttaagctctagaattcatcagagattagatgaagatttacctgagctaatggaagcattgctccgtaatcttgctccacaatttttacaccactatccttcatcatgtattgtttcatttgaaccagataaaatttccagtggaataacgtccattcataaaattcctgctggaacttcgatatattctaaacataattccagaaccatctgccagtttcggactgtatatcctctgacaatcgtaccggcaacgattaacgaagcaaagattcactatgataatttatcttccgtatggaaagtagagttaaacttaaacttctttgatggaatcgattgttcgcttaattctattagattttatctaaatggcccaacaatggttacaggtataatatatacattattgtgtgacgaagtcgataatatcgttttacagaaaaataatgatgtgttatatggtatcaaaactaatatatctggtgccggatttgatgagagtgaagtaacactaccacggatggggaatgtttcttacatacataatctaacgctggactatttttcgtttacagaacgatttaactttattgatataaaatttgactccggtgttgagttatactcaggggattctgtcagaatcgtaataacattaaaaagcagtgccgggaagtatgaacctgaaaagatagaaaagaatgtttctgaagaactctttagagtaaactgttctcctgttgttaatctcttcgaaaaaaaaacagaaccattacgattatcggacagtcaagatgagtatcaggtaaatgcagatttatattcccgtgatgatgtcttaatctgggatataaataaagtaacattgcatagatatgaagatgctttagtcaagcagttctcattgagaaatttgtttggacttgaacattctgtaactcaacaatcatgcaatatattctggtatagttcacgttatcgcatgtcttctgaaaaaagaaactctgaggaaaatgtatatgttcgtctgagcgatgatggtggagaacagtcacgtattatgacaggagatgtcctttcaattgatgcaatatgtacaaatggcgatattccatcatcaattaataatggtgcccctgatggtgactttgattgtgatatagatattgctcacctgcgagtaacagcgctgaaccgcccatcaaaaatgttgccggcaatgacattaagaggaatgaattggagaattatctctcatttatctcttaactttatcttgcttggtggtaccgatggagcaatgaaactgagagaaatgttgtcgatatataactacaacaataatcagtcaatatcagtatttattggatggatcaaagaattacagatcacacctatttcatcccgtttacccggcatatatccgcctgtaaccgctcgtggaattgacattaccattattctttcaaaggatgcagatatgcaccctgaatatttcatattttgttctttccttgatcattttcttggacttcatgctcctgtgaatagctttactcgcatgattaccgtcattgagcatgaagaacacactcgtcgcacatggccgataagagcaggaaagttaacatggctgtaa

SEQ ID NO: 19797 - DNA, 933 bp, Escherichia coli
atggctgtaattaataacagaagtaaattcagttttttcaataaagttcgtgtgttattgaaaaaagttctaaagccagaagaaagcgttgactacgttgttgatgaacatttcagatttgcatcaagtctatctctagatgcacctgatggtcagatagagaatctgtatcacgatgagaaggacgggaagtatcacctcacattattcgataatggattaaccggagcagcgggggttcttcctgccgcatatacagaatggcttattgaaagaaaattacgttataatgacgatgctcctaaagcatttatgaatatgtttgatcatagaatgtattgtctgtcctatctcgcatggcaaaaaatgcacctgtcaggaaatgaaaacagaagagataataatgttcttaacaatgttcttctgtctttaggcggaatcactcctcagacaataagtgtgacaggtctggcatacacggcattctattcgcaatcagtcagatccctaatcggacttgaacagttactctcgtcaatatatcaaatcagggtgtccattaatccttttcgtggcactcttgaaaatacagagcccaatgaacagggcgtcctgggtcattgccagtatactctgggggaaggtccagtcatcggtaatgctcgctgggtggttgattcacattttgatgttgtattgggacctgtagactataaaaaagcgctgaagtttatgctggaaaaggatttgcactatgttatcagacaacaaataaaatcatatataggtgatgctcttaaatttaaattatatgtgaaaatttatccccgcaagaatgataatcagctgaatatgaacaataaacttggttttaacctttcactcggctctggaatagaagaccataaggagcggtgcttttgtatattttga

SEQ ID NO: 19798 - DNA, 1977 bp, Escherichia coli
atggctaaacctatatctaacgatcattataaattccaagataaacattttatccgtctgcatggttgtagcgtatcgttatttccaattgaaattaaaggtggagaagcaatatctgatatatatacttatgaaataaagtgttttagtaggaccgatcataactctctggatatgttacacggtacgcatctgagttgtgagattggagaacaacacaattcgttaccttcacggtttattcatggtgtagtcacaaaaataaaatataattatgataatagcatgctgtatacctgcattattgtgttacagccagaaatagctgagttggcatatagtagacgaacaagagtatggtcaaatataaaaccatcagatattgtaagaacaattttaaaagacagtttatttaaacctccacaagtaatgctatataaagaacagaattttctggagtataagattcagtaccaagagtctgatctggcttttattaatagagttttgtctgaggctggtatttactatttctttgttcacaataaagaccagcatattatgactttagcagataatcctgcgtctcatcctaaagcaccttatgataaactggaacacttacctggtgaaaatctaaaggaatcgcatcacggatacatcagtgaatggtctttcacagaaagtcttaaataccctgctgtaacactaacaggttataatgaaagtaatgtcaatgaaatcactataaaatctgaaagtaaggtgactgatgttaaatccagtaagggaatttatgaagacattatccctgaaggaaaacgtgagttgataaaagaacgttctgaagtgctgatggcatcatgtgatagtgaactaaaaatctggtctggaaaaacaaattcatggtggttgtcatgcggagagcgtttcagtctggacaaacaggattacagaatcacttcgttatatctcaatgctgtcaacaacgatactgagcatgctggatcttgttattgtgatttgtgtgcttcagataataaaagttcgcttaatatcaaaggaaaattcactcccccggttatccccggtgttttacttgccagagtggttggtcctgactcagaagaatattatacagatgaaaacgggcgtgtaaaaatcagctttctctggggggaaaagtcaacgtcgggcacggataaaacatcctgctgggtccgagtatctcagatatggtccggggacggtttcggtagtcagtttattcctcgtattggcagtgaggttctggttagttttatacagggtaaccctgactatccagttatcgttggtacagtgtataacggtcagaataaagcgcctttttctcttcctgagaataattgtaagtctggatttgtcacccgtagtgttaagaatggtaaaaagggagaaggacataaactggtttttgatgataagaaaaacgatgaaaaaatcatattaacttcttctggtgattatctccttacagtaaagaagaatatgatcgaaaatattaatcacaccatgtcattaactattgctgaagggcgtgattctgaaataaaaagaggaaatgacaggcttattcttaaagaaggcgacctgcataatgatgtacatggtaatattgatataaaggtttcagatggaaattatagtctcaaggttacaggtggaagtggtagtcttatcatcgataaaaatcttacacttgagtcaactaaatcaataagaataaaagtgggtgtaaatgagataactatatccacatcagggataagtgtaaaagccgctaaaattgccatagaagggcaggcctcagctgaggttaaagcagccacgcttaagcttgaaggtcaggcggtatctgaagtaaaaggtactatgttgacgcttcagggctcagcaatgacacagataaaaggtggaattgtgaatattggataa

SEQ ID NO: 19799 - DNA, 462 bp, Escherichia coli
atgacagaggctaaaaataacactgttttggaaatgaataaaacggttgagcaaatgctggcacaaggacaatggcaggaagcgattgagttctggattaataaaactgactcgttaacattaatcaaatggctggcacagtttatctcccagtcatcttctgaagaagatttagtacttttacaatccattgttaaatggaaggaaggtgatgatgaacaacgctgggaaatatttaataactctgagtcagctggtttttccactcagactggtgcccttgggttatcattatttatatcacagggaagtttaagtccggccccatatgatccagtctatgcaccgtcgttttcagaaaaaaaaattatttatggagtcttaatagctcagttgtgtaaatctcatgatacacctgatgagagtgtattttttctttttcagcattggtgtaatagttaa

SEQ ID NO: 19800 - DNA, 300 bp, Escherichia coli
atgccccaaccagcggcaagagttactgatatgcatgtatgtcctatggtgacgccaggtttgccgcctgttccccatgtagggggaccattgttaccaccaggcgctctgtctgtactcataggcggaataccggcagcgacatttggtacccaggcactttgtaccggagcaatggatgccgtcattctgggaagttttaaagtttttatatgcggcaaaccagcagcacggatgggtgataactgtgctcatgggggggcaattgtcagcggatatcctcaggtattaatggggtga

SEQ ID NO: 19801 - DNA, 1080 bp, Escherichia coli
atgaacaaattcgagacggatacattactgcttcctgttataggagaatcgccggcaggtgaaaatattgagtatgatctggtgtatagcgaaatacgggaagcaagacaaaatgatcctgactatatgtcccagggagaatgggctgtcagtgaacctcgcagagctgactggagaaaagtaagaaaattatgtgaggttactttacgaaataagagcaaagacctgcagattagttgctggtatgtggagtccttgacgcatttgtatgcactggaaggaatgtactgcgggctggaatatctggctaaatttatttcccagtactggactacatgctggccatcgacggaagaaggccaagaaatacgttatagtaaactagtccgtcttgatatggacttatcaaactatcttaaaacatatcctcttcttgaggataaagaaatcacactttctgaatggtataaagcgctggcgtttgagcatagcgcaagcttatcagaaaagggaaaagaaaaattcatagaaagcgaaggcaatcactctgttgaatcgttcaagaaatctgtaggtaaatataatacacgtaagattaatgagcaattccttcagttctttgatttgccggacaaaattgatgagattgaatctttttacttctttcatacgcatgaagacatacatcacatttttgtaaaaaccagacatactatcagtgaaataactgagttactgagccgttttttaccgcaagacgtacaggataacaatacagtttcatcgttatcaattgaccccggtagtagggaaacaacgaaggtgttgacaccggctgaacaacaggagttttatgcttccttaacatcctcaatagataaagaaatgtcaagggagaaagcaatagaacaattggaggaaatagctatttttttcagacaatctgaacccaccagtcctgtaccttatcttcttgagagagcagtacgttggtcaaaaatgactatgtcagaatggcttgaggaactacttaaagataatgactctgtagaacaaataaatcgtgttttaaaaggatga

SEQ ID NO: 19802 - DNA, 552 bp, Escherichia coli
atgactgttaaggagttgctactgataactatagtattaccttttttcattactgcctgttctgataagtattctgagcaggataagattcaggctattaaaaatgttgataccccatttggcgctggtatgctaacttttcagatatcgtctgacacacaattaaactcccttaacgagatatcaaatagctgcgcattattatttttacaggcctcaggtaagaaaatattgcaagacttaatgaataaccctgtattaattaaacagtttttcagcggatctggtaaagctgatggtattcttaaagttgataagtatatagcaatgccgggacaagatataacactacatatagacagaagtgagggggctagatatattggtgttattgccggatattatccatttcccgggaaacaacatatgttgcttttagatattcccgttgatgttgttgaggacggttggtggaaaaaatcattacatgcatcactctcacctctttatgaaaagatatcgatgggtaaagaaagtataagtataaaataa

SEQ ID NO: 19803 - DNA, 1380 bp, Escherichia coli
atgcaagatgtagaacaacttgtttattggtattcggggctttatttacaacctcaacactttcagtccattgatttgcatcatagtttcatgcttgccagaaccaggcagttatcacaaccccattatcaggggtactatgaatgtcgtataaatgaggatcttctgaaagaagatactgtcagaattgaaaaaataaaagcagtattatcttctgggtattatatcgagtatccagggaactgtgtggtgcaggataagtgccttacaaatctccggggtacagataccagcatcgtgaatttgtggcttgctcttaagcgatttaattccgcccataaaaatgtatccagtgctaatgataaacgatgttctaccagatgggtaagttcagatgatgaaagtaacatgcgtaatgtttatcatgacagccaggatactgatatcacaagaataagatatgatattcagatcattacagatgaggaaaaaaataatactacagacatggaatacttacctcttacaaggattattcataacaacaatacattgtgtattgataatgaatgctcatttccagcaatgaggttatcagcgaatagcaaacttagagataggatcgcagagatttattctgatattgaattctacaaaaataaacttaaagcatacagatatacagaacgaacagtatccgatggacatctttatgaccttttgattctgtgtgctataaacaaaatattaccacttctatcttcatttattaaggaagatgcagttcacccatggttgtattatatagcattatgtcagtttgcaggggaaatatctgcatatcaaaattctgtattttcagataccagaatcgttgatttgtcatacaatcattatgatcagatttcatgtttcagtaatctccagtattatattaaaacaatgctagataatttatgcagagataaaatcttcagttttgaatttaaaaaaacaacaacagatacattagtctgtgattttgatgattacagttcaataaataattcagatcactatattaaattaacttcagacaccttcaaagagagtaatttaattgcattgccagagattaagattgctccatccgaacatatagatctgataattcaacatgcacttcctggcattaattttacagtgatggatgtcgttacatctgagttacaggtaagagaaaatataatctggttaaagatcgataaacattcagagttatggaagttagctcaggcccaaaaaagtgtttcattttattggtcgtgtagccctgatgatttactggtagagttagtattatcgcaggtaaaaatatgcagtaagctgttttctggctga

SEQ ID NO: 19804 - DNA, 591 bp, Escherichia coli
gtgaatatcgttgaatgttatatgccagtatttaaactcatatcatctattaaagtctttccagaaggatatggtgactacgacagtaccagaaggcatataattgatactgttgaagatgttgttcgcaatagtgaaaaaatatctttaagtgacagcgaacttgatgcggcattttattcaatagttgttatgcttgatgaggttatattgtgttctgaacttccttacagaaaagaatggcgagataatcttttgcagattaaatattttggacattccacaggcggtgttgagttttttaacatgcttaataaagtcatcgaatccggaagtcaggttggatgggtttttctcttatgtctcttacttggatttaggggtaaatattctgtaagcaatgatgatgaagtcaatgattatatatcaagacttaagaaacaatgcggatcaaatcttcttactgaagaaaaaaagaagattacacttaaacaaagaaagaataaaccatcgtggtttaatttctatttatcactctcgggtatcattattgtttattttgtattgctgcttgtgatgtatgtgagataa

SEQ ID NO: 19805 - DNA, 3420 bp, Escherichia coli
  misc_feature (702)..(711): n is a, c, g, or t
atgcttaagaagatattttcattatttctctggatttctatttctgttttcgttttatttgtttgctatgtcattggggtattcaggaactggacagatacgacaactgtactttactggatttttgtaattctggttaccctctctctgaaattgcttgtcgattgtatctataattactttcattcaggaaactacaaaaagttactgaggttatttcctagcaaaaagagaacattaacgattgattcatattttaagaaaggcctaagtatcataagtagaaaaggaagaggcgtggtcccttggtttttacttactggtgattcaatacagaacacttccctgcttaaggatattaatctaccagtctttcacaatgatgagttaaatggtatttcccaacagttcagaacaattcgttggtggtttttcagagatttaagcgtactggaattatcaggtaagatatatgacactccgggagtgctgaactctgtaataagttttttatcagcacgtaaatgccaaaaacaaccacctaatggcgttgttctggtcattccggttgataagctacttggtcatgataacacctgtattcagaagttatcccaaaaaataagaaattttatagaacaactgtcgtcaaacttacatcataatattccggtctttttggttataagtggatgtgagcannnnnnnnnngagcacatccgtggatattcagcgctgacacaaaaaacgcgtcaaaaaaatgataaatggcatccgatattctgggcaaccaataaatcagaaataaatgcatctgaatatgactcatcatatatattgtcatcattaaaatctaatatcacgacaacaatatgccatgtacttgatgatgcattgagtgatcaggaaaaaaacgagatcctgttgctccctgataaattggatgatctaaagcattcattggatgtgtttatttcctcattctgtatcgataatgtgtttttttctcagacagaactctccggagtctgtttatctggtgaactcgtgtcgggtaaagataaaagttgttcttttcctgatgtgttaatttccggaatactgccacaaatacagaaatcagaagttattcgtgctaataaacgaagaattaaaatatcatttagaacagttatagtcatgaatgtactgtgctttattggatatagtgcatattgttcatataacatatatgatgtcagacaaggtcctgttgataccagccctgaatttctgactgaacaaatattaaaatatgaagataaagtcagatccaatatactgtatttaccctttaaacctgcattgaacaataaatatctatttttcagagagtctctttataaaagcaccagatttgataccagtcctgtttcatggcgcgttgctgaatataagaaaaatttcatgtcagcctccccagcaggaaaacgtgaattgattctgtcgctttcctcatcgctcatcagttgggataaaatgattaaggataaatcacttagtgacttaacaatatctccaggtattcatgaatcaataaaaacaatcagaccttatgacaagatatcacccatagtttcgcttgctatagaaagagatgagatacaaaaaaacaatggaagtaaaaatattgatgtgttcagaaaactcctgaccgagtttattcagagtgacccatcttattcatggtttgtttctgaagatgttaatattccagctgtaagagttacggatttttgggaagatgaaaacgcttcagtcagcctttctggtatatggactcaggagggacagaataaacttcatcactggtatgaaaatatcaaagaggcatatggacatgatacgcttcctgacgcgttttcatcttttgtgcagtaccttgatgaaagtcgccaggagcatttcagacagttcattatggctgtcgcaagagagcgtaaagattcacatacaggtttaataagtccgcttcaactgactaatattatacagaatcgttcatctgagcataaattttttaagtttatagatgatgaactacacaatataccagcaagttcggcgcaggactggctttctgatttcaggctgctttatcgtatgttttcacttaaagtggataacggaatgaagcgtcagatagagcaatttgacctcatgtcacgtatatacctgatttctttttttaataacagtcaaatgaataggacaatggatcaccttacagcatggagagagtggcaaaatgtattacgtaatgctgtgagttctgagttacatacagcatcatcagttgaacttctccgtaatgccatgcattcagacccaaaaaataagctagtaatattatttaatgagtttgaaaaggttcgttcattcattaataatgataatacagatccagtgattgattctgtatgggacatttatgaacggcaaaactatcaacttctcgaccatgctgtcacttatacggggtgttgggtcgatgaacaatggcagaattctgtgttaaaccatttaaattcagataaacacaatttcagtcattctgaaatgcaaggtaaaatatataaaaaaattattggttttttaaaaggtcctgctaacggagttttagcgcttgatgcagaaggtgccagagcattgtctttcagagaaagaagtataccattttccccttcattcactagttttatcaatgacattgtttctccggatgatttgcttgacgttcagctcagagaccgaacgcaaaacaaggatgagttaataaatgtatatggacaattagacgtactaaatcagaccctgcaaaaggttgaatcacagccttacaatatgacgataagtagtgcaccagcaacaatttcaggtcatcatagcgttaaaccaacaggtacaactctgactcttgagtgcaaaacaggtaatagcagtatacgaagtatgaattttgccgattcaggtctttttacttggtatccaggaagctgtcattctgtcagtattgatattgcgttccctgagttttctaccacctataaatttacaggtgaaacagcatggattgattttatcaacaagttttcggacggtgaggatgagttaatgacaaaggatttttctccggaatcaagaagttttcttgattcaatggggataaaaggtattctcgtccgttacaaactgagtgatacaggcgatataagtcaggcatatatcgaatgggcacagttaaaacaggaaaaggttaaacttgaaaacttgcaaattagtctgagtaataaactgcttaccacacatagctgggagaaaagtggctggatttccaggttgcctggcaatataacaatatgtccagcagtacaggagtga

SEQ ID NO: 19806 - DNA, 2532 bp, Escherichia coli
atgagtacttacctgaagccaatatttaataagttaactccagaaagccgaagcaccctggattctgctattaactacgcaatctcgagatcacaccatgaagtcgattgcttgcatttactatgggcgttattacaggaacataagaatataacagaaaagttttatgggctgcctttatttgatcctgatagcattcttaatgctattgaaagtgaactcatccatatcaaaacagtgcaacaatcctcacctatattttctgagtcaatgcagattctactggaaaaaacatggatacatgctagtataaaatggcaaagcgatcatatagatatccctgttcttctgaccactctgattaacatcagagattcaatacttccttacaatgtggctaatacgttatattgtgatgtggatacggcagagaagttacttatctctttttcaggcaatgccgagcattctgcttctcatagttccagagataacgctctgcatggatgtattagtaaatatactgaaagtttctctctactggcagaaacagggaaattagatccgattactggcagagagaaggaaatcagacaacttatcgacattttgcttcgtcgcagacagaataatccaatactggctggtgaaccgggagttgggaaaagtagtattgtagaaggtttagcactgcaaattgcatccggccgtgtacctgacgcactgaagaacgttaagatttttgcacttgatatgagcgctttgcttgcgggggccaacgtcagaggggaatttgaaaatcgcttaaaatctctgttaaccgaacttcattctttggacggtacagctattttgtttattgatgaggcccattctcttatcggtgcaggaggacttccgggacaaactgatgcagcgaatttacttaagcctgctcttgctcgtggggaattgcgcatcatagccgcaacgacatggggagaatataaaaggtattttgagaaggacggtgcattagcccggcgttttcagatagtaaaagtgacagagcctaatcaggatgtcactgcagggatgctacgctctcttttgcctatgatggaaaagcaccataatgtctctatcaaggaagaagcaatagttgcagcggtacatttatcagaccgttatctgcatgggcgttaccagccagataaatctgcaagtctgttagatacagcctgctcacgggttgctttatctcagtccacattacctggtgccattcaggatattgaagccttattagcaagacatcagggagaacttgcgctgctgacacaggaaaagtccaacattctacgtcagaaaatacttgtaaataaaattactcaacttgagaagaatcttgatcaactgaaatcagcatggcgtcatcaaagcgaactggttgcaatgatacaaaatacagatgatatttcatcaaagaatatgtacagaaaagaactggaaagtgcatataagaaagacggccctatggtttttgaatgtgtagataagaactgtattgctgatgtcatttctgggtggactggtgttccactaggaatatgccttgatagtgagcaacaaaaaacatccagtctgttaagatgtctggaacagcgagttttaggtcaacgatatgctatgtctgctatagcatcacaaattcttattagccgggcagatcttaaagatcctgtaaaaccagatggggtatttttactagcaggcccttctggcaccggtaaaacggaaacagccagggcgctggccgagcttgtttatggggacgagaataaactcatcacaatcaatatgactgaatttcaggaggctcacacggtttccactctgaagggagctcctccaggatatgtcggttttggtcagggagggactcttacagaaagagtaagtcataatccatatagcatcattcttcttgatgagattgaaaaagcacatccggatgttctggagttcttttttcagatattcgactctggtattatcgaggattctgaaggtaagatgatatctttcagagattgtctcataataatgacatcgaaccttgctagtgaaaaaatcataagtgtatggaatgatggtgaaaaaaataatgaaaaaataaaagaaatgcttcttcctttatttaatgcgcattttggggcagcatttatgggaagagctaacttaattccgttcacaccgttgcataccaaaactcttagagatatcgcactcatcaaaattgataagatctgccaacgttttgaacaggcatctgatcagatgtataaaatagattacactgattctttaattgagtggattacacatcattgtcaatgtgacaagtctggtgcaagggatatagatgcaatacttaacagaacggttcttcctgtccttgctagatgtttgattgactccgaagataataaaacaacaaaaaaaataaggatgtcagtaagaaaaaacaacattacattatgtaatttgtaa

SEQ ID NO: 19807 - DNA, 135 bp, Escherichia coli
atgcgtctgcttgcagccggaaaagccaaaaaagtggcgctggttgcctgtatgcgcaagttgctgactatcctgaacgcaatgctcagaaagcacgaagaatggaatgaatcgtaccatcatgttgctccatga

SEQ ID NO: 19808 - DNA, 276 bp, Escherichia coli
atgaacaggcacattcagagtcattttaaagagcttactgaacgtctgagtagcatcaaaggtgttggcaccatgacggctgctgcattgctggcagaagtaccagaactgggcaacctcccgagacgtgaaatcagtgcacttataggtgttgctccggtaaaccgggactcgggaaccatgcgcggtcgacgaaccatttttggcagtcgagcgggggcaagagctgccccgtacatggctgctcttgcggcaacccggtttaatccgggataa

SEQ ID NO: 19809 - DNA, 336 bp, Escherichia coli
atgagtctgccaaatccactctgtgtgggaattgatgtttccaaagcgacactggacattgctactaccagagactttgcccgtgcaatgggatacctggcaaagactgaccgcattgacgccagagtgcttgctcagatggctgaagtcattaatcgccatccggaacgggaacgctttattcgggctctgccggatgccgaacgtcaggtgcttgctgcaatggtggtacgcagacgccagttgattaccatgttggtggctgagcgtaaccgtctgcatcctgcacatccgcaagaaaaagcattaatatcatctccaggctctggagaatga

SEQ ID NO: 19810 - DNA, 1071 bp, Escherichia coli
atggataaaaattttatactagatcttactgtaaatactactgaccccaaaaataataaagaatttctttggcttagttatagtatgaatcacttaagtccgataaaatatgaaaaatcatattggatgacattggaaaaaagatgtctatctttattcagggaaaacggatatgaccttcagaccggagcatggttctgtcttatttccgctcatctatatagctgggaaggactagcgatttcctcatggaaatttgctgattcatttgttaaacatagaaaatgttggcctcaggctacggccactcaaatgcgaattaacattcttgcctggtatattaaaaatgttattcctgccatacagactttgcctgatgatgaaaaaactcactcctcattaactttactggaggatgcattaatattattgacggaacttgagtataatcttctttccggaaaatgttctgttctttcagccatgctagctgaactcaagagacaagaaagtgataattctgagcatcatgactctgaaatccctgatgcagaaaaggggcaactttttagcaggagtttatccccgccagttgactcaaatgatagcacagaacaaaagtataatactttggtaaataaccgtaaaagaaaacgcatacattataacgtcattccatttatatcaggtgttttaataactatttttataaattgtttaggaaagccggaaacagcactgaagctcaggagcatcataccagatagtattcttactgaagtaattatgactttttcaggatgttcaggattcacacctgatacaacagacgcctggtctcagctcagcaggaaaattgatgactttacagaaacactgaatacaattgaaaataatggaggttatattaccatatctaagttaaaaacgattgcttatgatatgaaaaatactttccttgagcatgaaactccggtgaatataagaatatcaaaattaaataataatatgaatatggataactgtgagattagtgaattaaaaattagaaatcgcagtataaagatgtag

SEQ ID NO: 19811 - DNA, 513 bp, Escherichia coli
atggactttatgtatagagtagatatgaaacaccagtggcgtccggggataggtggatttgttgatctgaactgtggttggtattgtcaggatgctttactgaactggtattgtaataaaaacaatctgtcctatcctttattaaaggataaggcaaaacggagccgattaagttatggtttttcccctgaggatagtttttgtcatagaatttttctccctagaaatattgagtattacaaatacgccctcttaaaatatgggcctattatagcctctggtaaaataggtatggctgactttggatttttagggggggtcaatcattatgttttaattacttcagtaaatatcaaacatagtaaaataacaatacaagatccattaaatttcaattgggggaggcttgggtattcaaattatagtatatatgatttttacaggaccacagataaaataaatgaaacactggttattaataaatataaggtcagtctattttttggtggttaa

SEQ ID NO: 19812 - DNA, 150 bp, Escherichia coli
atggagctgaagccggaaagatacaggatgcagttctatctccaaatggaagatttaggattggggatagaaagcatgcatatttattttgggaggcatgcccaaaatatgaatttcatccggcatcattacctgatggtgaatttataa

SEQ ID NO: 19813 - DNA, 567 bp, Escherichia coli
atgattatttttttcttcccgtttctaatggatgagaatgatctatttcttgaaagtgaagttgaatttcaaaataaaaaaggtaataaatgttatggtgtcagagcatctgataaaactccgttacactttttaaaaaaccaagacacattatatgttgtagctcatggcaatacatcagttattggtacaggttcaaaaacaggtccaacattaactcctagacaactagctattttattacttgaacgacgtctgccaaaaaactttgtcgatatcaggatattatcctgtaattcaggaatacattctaagacccccgccttcgcacaacaattaaaagagatcatggttgattatgtatataagagtctaattgtgacaggatatctaggagagatagacatttcaagatattggagactaagaaatatagatacaatagacttttacgctactcacaagaaaggaataataccgcatgaaagctatttgaatgaacaaaaaaaaacactttgcaactcagaactaaaattttccctctctgatttcaagaaaaagttctag

SEQ ID NO: 19814 - DNA, 228 bp, Escherichia coli
atggttgagtgcgcagatgaagcggacgagccagcgctgagtgctgaaagaactggcaaaggatatctggagcagaccatggagcgaggaaaggtgcaatggctggcgctggcggttaacagtgacgtctccatgatgaagaacgcagctaaaatgatagggaaaaggttgtacggtatccgaacgcctggtgccatggtgtatcaaacggaaatgcagaagcactga

SEQ ID NO: 19815 - DNA, 831 bp, Escherichia coli
atgaataaaaacatcgtaaaaatagctcctgttaataacaagactgatgtcgttgttacaaattactatattgcaaactcaatgctagttaatataaaaagtggtagcgttacaataagaaacttaaaaaacttaaccgattatactttaacgaaggatgtttattttataaaaaaagatatatttgttggtgttcttaatacttatgataaagataaattactttttgatattattgacattcccgtgagtatgcttaattatttttgcagggagaatagtgatgtagctgaaaatagaaatgaatggataataaaaacgataattcctggatgcgatgagttgataaaaaaaatagaagatggtaatggtaatctgacgcatagcgatggaataaatacacatcttcattgtcattctatagatattgacaaaaataccacatatatcctttgttatttactatcaaattttctagaagatgggaaaattccatttataatacatagttcagcagagttaacattaacagagaaaatatatgatattatttatgctgatacaagaaagaactggacattggaatcaatatcaaaaaaaatatatctaagtaaatcaacgttaaaaagaaagttaaaagcggaaggaaccacattttctacaatctttctcttggctcgaatgaaaaaagccgcaaggctactcagaacgaataacaactccattagagccattgcagaagagtgtggatttaataatccatcttacttttcaacagtttttagaaaaatttttaatacaacccctaagaaatatagagaattattttaa

SEQ ID NO: 19816 - DNA, 792 bp, Escherichia coli
atgaaaaagatagaggaacagcaaaaggaaatatatactcaaattaataaaaatttacccgttttaataaaaaaagaattagatgcaaaacttaacaaatctgttcgtcatgtagaggccttcatatccattcaacaatacttgactcatggtgactgtataacaggatttcatggttggccaataagcccggatatgggggtatttctcttagaaaaaatacgtgagcgaaattatgatgctatcattgagtttggaagtggagtttcaactttattgatagctaaaggtcttatggcatttaatcttttcaaagataatgaagataaatgcttcattagtttcgatcatgatgagtattattttactaatacacaaagtctgcttgcttatcatggtgtcgaatcaatggtggatctatatttaactccgctaaaagaatggtccgatggtacaggatgctataaatattactcttgtgaagatgtattaattgagttagcaaagcgtatacaagatggttctaagagattattagtccttgtagatggaccgcctggtaatacatgcgctaatgcacgttatcctgcacttccatttatgtctcactttatatctaatcacgaaattgattgggtcttggatgatgcttatcgagatgaagaaaagttaacggctgagttatggaaaaaatattggtcagcggagaatatacagttcactcatgattttataaaaaatgaaaaaggaatgttttttgcgactacttatggaagaaaatctacttcgtaa

SEQ ID NO: 19817 - DNA, 654 bp, Escherichia coli
atgacaattgaaaatgataagtttgtttacaaattaattttagctaatggcagtgaaattataaaccctactattgatggactttctgtagaatttaaaggtagctatggaggtatagttgaaatccatgaaggggctatattttataacacaaaaataatatgtggtagtatggctcatatctgtataaaaaaaacacatgacaaggggattaaaaacacaaaaatagaaactgcatgctcttgcagacacaaaaaattatttatcgatgaagggtgttctatagaaagtgctcgttttgcaatcgtaaacgatgataacttatcggtatacataggtaaggattgtatgttaagttctgaaatagtatttagatcttgtgatggacatactatatatagcatagacaataataaagtattgaatgcttcaaaaccgataatcttaggagatcatgtatgggttggcgcaaaagcaacctttctcaaaggaactgttattcctaacaatagtataattggtactggttccatagtttcaaaagaatttactgaacagtttacagctatagccggtatacctgcagaagtagtaaaaactggggtaaattgggatcgagacactattcctgccttcttgaggaaaagaacatag

SEQ ID NO: 19818 - DNA, 327 bp, Escherichia coli; identical to SEQ ID NO: 13325

SEQ ID NO: 19819 - DNA, 1077 bp, Escherichia coli
atgacaaaatcaatttgtttttttaatcataaaggtggggtaagtaaaaccacaacaaccttcaatcttggatgggcacttgcggatgaaggcaagaaagtattgatggttgaccttgattcgcaatgtaatctaacaggaatggttcttggctatgaaaagattgatgagggtttagattctttttattctagcagagataacttaactcttggacctattgtagaatatttgattaatggcggacaacctgaagcataccttgaaaaagaaacgggaaaattacaccctacactgcatgaaaaccttctgcttcttcccggacatttagatgtttcggacttagattcacagataagtgtttctctaaaaattgctgctggtattcctgctacaagaaatataccagggaacctgccaaaaatattacagctaatcgccatgaagaataatattgattacattctttatgatctcagccctaatgttggaggtttaaatgaagtagttctcatgtcaagtgactattttatcgtacctgtagctccagactttttttgctggcaagcaattcgctctctctcaaaaaatatacctcgctggcacaaagaattagcattatttaaagaaaataatgatggtaactcttcacaatcaattaaaaatgcaccgcagtttctaggtatgattcagcagagatacaggccgcgtaaaggagcacctgtaaaatctttcgaaaaatggatggcagctatccgtgatgctgttgattcgatcttagtgccaaatctagaaaaaattacctgcataattccacgagataaagtgcaacatgcaattaacaaaacaacagtcagtggagatttatcagcctatgatcttgcgcatatttccgatttcaactcattaatcgcaataagccaacaactagcgacacctgttttctccatcagtgatcagcaaattcgcgattcagggcaatttgggcatgccttaaatacaatgaaatcaagcagagacgcctttaacgaacaatttaaagggctggctcaacgagttctagaacttacaaagtaa

SEQ ID NO: 19820 - DNA, 504 bp, Escherichia coli
atggacaaatttgatagaagtgcacaaaggcagttgttacaaatactgtatgatgctcatccttatgaaatttctgatgatgcgttgcagtctgttcgtgacgcatttggagatgataatgtcctaatttcgaacttaatttatctcgaagaacatggcttgattaagaatgctcttgattattacttggatggcataaatataaatattcctgaattaagaattactaaagatggaattgatttcattcgtgatgatggaggtcttaaagctattcttgggattatgacaataagattgcatgatgagactctctgtgaacttgaacgtatcatcaatagttctacttctgccacgactgaagataagaagaaattactctctcagcttcgaacgcttcctgccgacgccataaaacagctgacgattcgattacttggtcaggggcttgaccatctgccggacgtatttcacgtaattcaaaaagccctccattctctgtaa

SEQ ID NO: 19821 - DNA, 1833 bp, Escherichia coli
atgtccctttttaaacttactgaaatctcggctattggatacgttgtaggattagaaggggaaagaattaggataaacctgcatgaggggttgcaaggcagattagcatcgcatagaaagggggtgagctcagtaacgcaaccaggagatcttattgggttcgatgcaggtaatatattagttgtcgcaagagtgacagatatggcatttgttgaagcggataaagcgcataaggcaaatgtaggcacatctgatttagctgatatacctctaagacaaattatcgcctatgcaattggctttgtgaaaagggagttaaatggttatgtttttatatcagaagattggcgcttacctgcattgggttcttctgctgttcctttgacttcagattttttgaacatcatttatagtattgataaagaagaactcccaaaagcggttgaattaggtgtggattctcgaactaaaaccgttaagatatttgcaagtgttgataaattattgtcgcgacacttagccgttcttggtagtacaggatatggtaaatcaaatttcaatgctttgttaacgaggaaggtttctgaaaaataccctaactcaagaatagttatttttgacataaatggtgaatacgcgcaagcttttacaggtattccaaatgtaaagcacactattctaggggaatccccaaatgttgatagtttggaaaaaaagcagcaaaagggtgagctatatagtgaagagtattattgttataaaaagataccatatcaggcattaggttttgctgggttaattaaattattaagaccaagtgataaaacacaattgcccgcattaagaaatgcattaagtgcaattaatcggactcattttaaaagccgtaatatttacttggaaaaagatgatggtgaaacttttcttttgtatgatgattgtcgtgacacaaatcaaagtaaattggctgagtggttggatttattaaggcgtagacgtcttaaaagaacgaatgtatggccaccgtttaaaagtttagcgactttggttgctgaatttggatgtgtagctgctgaccgttctaatggaagtaaacgtgacgcgtttggttttagtaacgtgttgccattggtaaaaatcatacaacaacttgcagaggatataagatttaaatctattgttaatttaaatggagggggtgagctagcagatggtggaacgcattgggataaagctatgagtgatgaagttgattacttctttggtaaggaaaaaggacaagaaaatgattggaatgttcatatagttaatatgaaaaatttggcacaagatcatgctccaatgttacttagtgcattgttggagatgtttgctgagatactatttagacgtgggcaggaacgttcgtatcctacggtacttttgttggaagaagcgcatcattacctgcgtgacccttatgctgaaattgactcacagattaaagcatatgaacgacttgctaaagaaggtaggaaattcaaatgctctttaattgtcagtactcagcgaccctcagagctttctcctactgttttggcaatgtgttcaaactggttttcgttacgtttgactaatgaaagagatttacaggctctcagatatgcaatggaaagcggtaatgaacaaatcttaaaacaaatatcaggtttaccaagaggtgatgctgttgcatttggttctgcatttaatttgcctgtaagaatttcaattaatcaagcaaggccagggccaaaatcttcagatgctgttttttctgaagaatgggctaattgtacagaattacgttgttaa

SEQ ID NO: 19822 - DNA, 1248 bp, Escherichia coli
atgtcgatttatcaaggtggtaacaagttaaatgaggatgattttcgttctcacgtttattccttgtgtcaattagataatgttggcgttctgttaggtgctggtgcttctgtcggttgtggtgggaaaacgatgaaagatgtatggaaatcgtttaagcaaaactaccctgagcttttgggagcacttattgataaatatcttctggtttcgcaaattgattctgataacaatttggtcaatgttgaacttttgatagatgaagcaactaaatttctttctgtagctaaaactagacgatgtgaagatgaagaggaggaattcaggaagatattaagttcattatataaagaggttacgaaggctgcattattaacaggagaacagtttagagagaaaaatcagggtaaaaaagatgcgtttaaatatcacaaagagttaatttcaaaattaatttcaaatagacagcccggtcagtcggctccggcaatttttacaacaaattatgatttggccttagagtgggctgcagaagatttaggaatacagttgtttaatggtttttctgggctacatacacggcagttttatccccagaattttgatttggctttcagaaatgtaaatgcgaagggcgaagcaagattcggacattatcatgcgtatctctataaattacatggctcacttacgtggtatcaaaatgatagcttgactgttaacgaagttagtgcatctcaagcatatgatgaatatattaatgacataatcaataaagatgacttttatcgcggtcaacatttgatttatccaggggcgaataaatatagccatacaatcggcttcgtttatggagagatgtttagacgttttggggagtttatttcgaaacctcaaacagcgttgttcataaatgggtttggtttcggtgattatcatataaatagaataatattaggcgcgttactgaatccatctttccatgttgttatatattatcctgaattgaaagaagcaattaccaaagtaagtaagggtggcggttcggaagctgagaaagctattgttactttaaaaaatatggctttcaatcaagtaactgtagttgggggaggaagcaaggcatattttaatagtttcgtagaacatctaccataccctgtgctctttccacgagataatattgttgatgagttggttgaagcaattgctaatctttctaaaggagaaggtaatgtccctttttaa

SEQ ID NO: 19823 - DNA, 210 bp, Escherichia coli
atggctatcgctgcaagttacaccatgcatctctattgtgactgccgccagtgtacggaaggtgtatatccagtgccagacttcggtgagtatatcggtacgtcatggtctggttgtgcaaaagaggcccgtaaagacgggtggcgaataagtaaagacaaaacacgtgcttttgcgcccgggcataaagttttgaggattaacaaatga

SEQ ID NO: 19824 - DNA, 891 bp, Escherichia coli
atgcttgacttcatccgtgacatttactcctctttccgccaagcatctcttgagcgggtgaaaagcccgttccttggggcatttgttttttcctggctttgctttaattggcagatgttagcaattctattttttagttctaaggatattgaaaagcgccttgctattattaatggctctttcggcatcgtcagctttttaattgcgccaatatgcactacagcattgatagttatccttttaccgcaaattaataaattaattacaataatacaagataaacctaactcagacacaattgaaatgagccttgcatctaaaataaagatcgccgaactgcagcaactattagcagaaaatgaagcaagaaagaaacttgctgataaaaaagaagaacgcttcattgaagagaatattatttcaataaaaaaagaccatgaaaaagcaatagataaccttaaagacaaagaaagtaaaatcttaaatctcacggacacaataactgaacttcagagcaaactggttaaagctgaggccactctcaaagttgaacaggagtcaagatcccaagtgcagaatgaattgattattgaaaaagagaacaagcggaaattagaagacaacattctgcaccttaatttaagtttaaaaaaaaaccaatcagaattggccattgcaaaagaagcctatgataataccttgatggcttataatgaacttaacacaacattaaaaaaagcagaaagctcaataataaacttcaatgctaactttccttttttaactgacataaataacagcaccccaaatacatacttaaaaataaataaaaatgcatgggagcatttagttagtttaaatttaagtctaaaggagaaaatacaaaaataa

SEQ ID NO: 19825 - DNA, 132 bp, Escherichia coli
atgccgcataagcggttttttttatgtgtaaagcgcacctattctatggtgggctgtgtgggggcaccgaaaggtgcgccgggttcctttgtagccggtaagaccaactctgcacagttcaccaccatctga

SEQ ID NO: 19826 - DNA, 2607 bp, Escherichia coli
atgacggtctcaaccgaagttgaccacaacgaatacaccggtaacggcgttacgacatcgtttccgtatgcctttagggttttcaataaatctgatttgattgtgcaggttgttgatattcatgaaaatatcaccgtactgactcttgatactgattatatagttaccggggccggaggatacaatggtggaaatgtaatattgtcgaaggcgttggccaatggctataagatttctatatcacgagagctaccggttacacaggaaactgatctgcgcaatcagggtaagttctttgcggaagtgcatgaggatgcttttgataagctaacgatgctgatccagttagtcaaaagcatggctcggctggctcttcgtaaaccatcatttagtgccacttactacgatgcactcggcaatcgtattcgtaaccttgatgatccattatttcctcaggacgcttccacgaagaaatatacagactcatctatcaaaggagttattaacagcaacatatctaaaacactccgcttccctgagatagtaagcgaaatggcatcagcatcttctagggcaaactcaattcaggggtatgacagtttaggacgtcctgttcctattttttcaattacagatactgctgatttatgccttaagctagcaagtgtcaacggatcatcatacgttggtaccagatttggtgatacacttgaacagacgctaaatagtactcagttcattaattcctgcagtttagtcacatctaaaacacttgagagattatcaaggcctaactcaaaaatagtgttagttggtgacagcttaagtgccccatataatataagcacagtggatcgatcaagcatttttgccgctcatcttaagagagttttgcaagagaaattcccaagttctactttatttaacagagcaattggtggaatgaggtactatgaccttggaaaagatacaccagcaattacttcttataactcacagtacccatggtattcagacacgaacagacgctggattgattacattcgtgatattaaccctgatgttgttattattgcttttggcatgaatgacggagatggttgggatgttggtaacttcccgcagaaaactttttttaaattgatggctgaactgaatgatattacttcaatgcctgaaattgttttttgtacaaatatcctcccatcaagtaccacaagtgactctgaatttagcagtttagaagctcagaatggacgaaacgcaatggcaggatggactcgttcatatgcgcagtatgttggcgctgggcttattgattttaatcgttactttaatgcagtacgtgatggggttgatgtggtttctggtaattatgtgagggcaactatttcaaaagatgttacattgccttatgaatatgaagatttatcatattcttactccgtaaggattcaatttgtagatattgaaatccttagttctgggattcaattccaattgtcttcataccataataatttcattaacttgaaatatacaggctctgcctttgaaaccacacactatactgcatcaacagggactgtaggtgtttttatgcgcaatattgttaaattatctgctccacttggtttgttttcagttgaatttaaacttattggaaacttcgttgagataacacttaacgataacgaaatactattcagtagtaatattgtaaggtttggtggtttattttatcctcgcatcggtggttcagggaactgcaaaattgatatgcagccgatgattcctgttaagcttaaaaagtcaatgactaacgaagatgtttattcgcctggtagtggtaataataagaatcacccaacagcttatgcaagctctagaatatatccaccggttcttgatggatgctttaatagcattttctttaaagagatgaaaactgatggcgtttaccttgattttatcacaggacaatatgaaatagttaatagctattctcccaacttatctaaaaaaggaaacgtatctgatattctttcctttgtttcaggtgaccttatttattcctattcatcagatattttagaaggggctgtttttggttccgcaaataaatgctatatagacagtaataagtttttgctagctaatcagaaattaagagggattactgttattgttgaggggaaacaatatgcaggtggagaattggcgtattatgtcacacttggtgaggggttaactggtaaccgtctgcatatgacaataaccgataataatattccacgctgtactgcagtgatgaatggagtatcttctgatcttatcggttcaaattcgtttcaggtaaacccatctatttttcacaaacatactagttcaatcgatgtcaataatggaattcattctatggcatacgataatcacatggcctctggtaacattgcagaaactgaaatatctgaacttactcaggatattgtatctaaaataaaacttggttatgcaagtgaaacgacttctggagttgatgttgttattgccagagtgcaggttatttttgatggattaacatcatctggagtttgcaggaaataa

SEQ ID NO: 19827 - DNA, 1119 bp, Escherichia coli
atgagaacgtcattagtcacccgtgaagagatgatcgaggcaattgaacagcacactgcctgtatcagtaccagggatataccaggcgttattgccaactacttcatgatcaccaaacaactttaccggagaaaggacaagaacgcggttcaccgtatcctgttgtctgatatccgcgaatacctgctcgaacagggtcatctgaattacgcaaccgtcgcagccgaagcacgcaaggaggcacacagaatgaaagcaactaacgttaaatcagaaaaaattcatgcaccttcagttcaggaatcggagctggtggttgttcagaatcagtctgatgaaattcccgttctggaatggcagggagtgcgtgtagtgacaaccgagactcttgctagagggtatgggacagaaacaatccgtattcgccaaaatcatcatgagaacaaagtacgctttgttgaagggaagcactttttcaaagttgaaggagaatcattgcgcgagttgaagcacagagtagctttaaactactctgtaaaaattgctcgcaatgttcgctcactcaccctctggacagaacgcggcgcagcccgccacgctaaaatgctcgaaaccgatcaggcatgggcattctttgaaaaactggaagacagctacttccgacaaaaagaacagcaaccgatcgcaatcccccagacgcttcctgaagccctacgcctggctgccgaactggctgaacaaaagcaacttctggaacagaaagcccaccagctaaatcagcagctggtggccgccgctcctaaagtcgattttgccgaccgggtatcagtagctaaagggatcctgattgggaattttgcaaaggttgttggacttaagcaaaacgcgctgtttgtctggttacgggagaacggcatcctgatagcgtccggtggacgtaaaaatgtgccgttccagcagtacatcaacgcggggtatttcacggtgaaagaagtggtgctggatgatgaagatggctaccagatacggttgacgcctcaattaacgggtaaaggccagcagtggttgacgcgtaaactgctcgatgctggcttgttaaaaccggtggcagctgaataa

SEQ ID NO: 19828 - DNA, 1485 bp, Escherichia coli
atggccagaagttgcgtaacggatccacgttggcgcgagctggtggcgctatatcgttatgactggattgcggccgctgatgttttgttcggcaaaacacctacctggcagcaggatctgattattgagtctgtgcaggaacagggtagcaagacatctgtttcgtctggtcacggtaccgggaaatcagacatgacttctatcatgatcatgttgttcataatcatgtatcccggtgcccgcgccattatcgttgcgaacaaaattcagcaggtaatgaccggtatattcaagtacatcaagataaactgggctactgccaccagccgttttccatggcttgctgattattttgttctgacagaaaccgctttctatgaggttactggtaaaggtgtatggactgtagtaccgaagggctttcgtctgggaagtgaagaagctctcgccggtgaacacgcagatcatcttctgtatattatcgatgaagcctccggtgtcagtgatagagctttcggtatcatcaccggtgctcttaccggacaggataaccgcatcttattgctgtcacagcctacacgcccaagcggctatttctacgatacacaccataaactggccaagcgtcctggtaaccctgatggcgtttatacggcgatcacgcttaacagtgaggaatcaccgctggtaacgccagcatttatcaaaatgaagctggcggagtacggcgggcgtgataaccctatgtacatgattaaggtacgcggactattccctaaatcacaggatggcttccttcttggacgtgatgaggttgaacgtgcgacgcggcggaaagtcaagattgccaaaggatggggctggcttgcatgtgtggacgttgctggtggtacgggaagggataagtccgttatcaatatcatgatggtgtccggccagcgaaacaaacgccgtgtaatcaactatcgaatgctggaatacacagacgttacagaaacgcagcttgccgccaaaattttcgcagaatgtaatcctgagcgattcccaaatatcaccatagcgatagacggcgatggcctgggtaaagcaacggcggatctgatgtacgagtattatggtattaccgtacagcgtatacgctggggtaaaaagatgcatagccgtgaagataagagcctgtactttgataagcgtgcttatgccaacgttcaagccgcagaggccgtaaaatcaggtcgtatgagactggataagggtaatgaaactattgaggaagcgtcgaaaatccctgtagggattaactccgcaggtcaatggaaggtgatgagtaaggaggatatgaagaaaaaactcaacctgcactcaccagaccattgggatacatattgtttcgctatgctggcggattatgttccccaggatgaagtgcttagcgtcgaagacgaagcgcaggttgatgaagctctggcatggcttaatgaatga

SEQ ID NO: 19829 - DNA, 423 bp, Escherichia coli
atgagttcgtctgcttttgtcactgttgtcactggagtaagcgtttttgtcctaggtcgactcatcatcaagggggttgagtcttacatttcattcaaggaacagttgggggaaatatcgcatctgttattgtctaaccaagcaaagctatcgaatccccgctctgacttaaaacaagaaatcatccatgatttgaaagatgcggcagcacagttacgggtgaagtacgaactattacctttctatatcaaaatgttacacatcggttttcgccttgttccatcagaaactgaaattcgtaaagcggcgcaagaattgaatctgatagcctcgatacatgacggtaaaaccggagagctgccatatgagcacatagccaagattggattactgctcagaattccaaccacttattctgcttaa

SEQ ID NO: 19830 - DNA, 210 bp, Escherichia coli
atggctattgccgcaagttacaccatgcatctctattgtgactgccgccagtgtacggaaggtgtatatccagtgccagacttcggtgagtatatcggtacgtcatggtctggttgtgcaaaagaggcgcgcaaggatggctggcgcataagcaaagacaaaacgcgtgcttttgcgcccgggcataaagttttgaggattaacaaatga

SEQ ID NO: 19831 - DNA, 195 bp, Escherichia coli
atggcaaccaacaaccgtaaagcaaagattctgttagttcgtagaaacgctcctggcgtctggcagtgggtgagactcagcaaccgacggatggggttgatgaaatattacgggatgatggattgtggtttttgcaaaaagcccagcgcggcgcaaaaccgctggaaaaaccatttgcgcactaaaggagagtga

SEQ ID NO: 19832 - DNA, 240 bp, Escherichia coli
atgtttaaacagaacgaaaaagctatcgctcaaattgctgattatatcccgcgtgcgtgccggggtatgcagttgcaggaagccaaagcgcgcctggagaaaaaaattgcgctctatattgatgacggctgtgatgctgccgttcttaacgcggcgttcgcaccagctcttaacagtcatactcgggagtcttttttttcgtgcatcgaagcgcaactccgcaaaggaggcaaccagtga

SEQ ID NO: 19833 - DNA, 165 bp, Escherichia coli
atggcaagcaaggcacgtatcgcaatcgccattggttttctcttgctgtccgtgctggtggatttcaccagcacaatcctgtcagttttatcggacggggtgttggtggcagtagctgtaacattggtatggccgatattaaaaacagcttctaaggatcagtga

SEQ ID NO: 19834 - DNA, 885 bp, Escherichia coli
atgccggaagaaagtaaaggcttccttagcgttgaagaagttgcaggaaatacaggagaaatccacagcctgaagcccaataacaacagcactatacaacccatagctttgttgcgcttaggtgtgtttgtgccaaccttaaaatctaccaatgtggcgctacgtcgcggatcgtcagttacaacaaacacaacgaacgcaaccgaagaactatcaagcctcaaaattgttgagcaggaaggctatgagggaattgaaattcatggtccacgcctggatatggatactgattttaaggtgtgggtgggcataacctccgcgttgtttgactatgctcctgatgatgacggcataatcaccctgccattctccgagtttgccgatcgatgcggctatccacgtaagcgcctttcaaaggcgttccgtaaaagtattgatgactctctgacacgcattcagcagacagttgtcaaattccgcttcccggcggcaaaaggtcatctcaataacattaacgtcaacttgttggcatatagcagcctgaataccgagcttgatgttatcgagatccagccgcaaaaacagctatctgaactttactatgttgactataagcgaatcctgaagctgaagatgctggataagctcgggcgcaaagagacggccaaggtgctgtatacattctttgaggctctacccgccaacccggcacctgtcagcattgagcgccttagagcaaggcttaatctcaaatcatccgttagcgtgcaaaatagcgttatcagaaaagccatgaaagatttggaagctattgaatatcttaaattttcagagataaaaaacggcagaaaaatcggcttccagatccataagcgcaatccataa

SEQ ID NO: 19835 - DNA, 765 bp, Escherichia coli
atgcaagaagagaaacaacactacctctacgttctggtgccagagaacggagatacttttaaaatcggcatttcatgtggtccattggcacggtttaaagggctacaagtgagtcccgattttgcgctttcacgggtctatcgtggtacacgtttggcaatggttaatcttgagcgggctttacacgcaacctttttcccctggaatgcgccgtgggagaaaagcgtcggtggcgggcatactgaatggtttacacgagagtgtcttgataaggttttggctcatatcgaatatctaaatgatatgtggggagggattctcgagcgcattaagtcgaatgatttacttcagcgtccagtagatgctgcttgctctttcgaaaaagagctggatgttacttctatcgtgactttcaaagatgacgcaggaatgagggacgtggcttatgtctccatatctggctatgaaccggacgcgatccgcgctcaatgtgaattgctgaaagcaatgtttatgcttcggactaaatatccctgggatacagggcgggtgtgcttccctatggaagagttaaccgccaccattgattcccagctttaccacgataatccagagaagttttttagccttttagccggtaatgggcttaactgtgtgtccgggctggggcgaagtagaatccaacatgcctcgctcttcggtcccttcttttacgatcgacacgggtactttgaggctgaactccggcgcttacgcgtgctatag

SEQ ID NO: 19836 - DNA, 246 bp, Escherichia coli
atgcaatctgattttttacagttagcgatcgcttttgcagaatatgtttgtattggcttctgtgtatacatgatcagccgaaaaatgcttgtcgatatcgaccgcaaagaacaagcagaggagatcttagaatggattttctttggcgcggtctggccattagggatcatgtttgctgcaacatttcttctgatgtggatattcacccttccaggtgatttctatagaaaaaaagccagacattga

SEQ ID NO: 19837 - DNA, 222 bp, Escherichia coli
atggttaatgccaatccttgcgcacgccaagaattcatctggcgtttctattcctgtaaaaaacaccactatcacttcgttatcgcagcaacagaagacgaagcacgctctcaattgcctgatggcccctgcatttttactgcccgtttttcaactaactcgcgcaattcacttagttactggaacctccccttctctgccgacgttcaggggggtttatga

SEQ ID NO: 19838 - DNA, 513 bp, Escherichia coli
atgtctaaaaagtatactttatgcgctcttgttgtatctgcaattcttctttctgggtgtcaatctagcggtgctgattatgctgccgatgtttatgataccgctcaattgaattcgaagcaggaaacaaagacagtcaatattatctctgtgcttccagctaaagtgaaagttgataataaagctaataaagaagcggcacagacatttggtgcggtactgggagctgttgctgggggcgttgccggttataatgttaaaggcacatcgacactgggtgctgtagctggcggtactggtggtgcggctcttggtgcagcggctggttctttggttagtgataaaacaattgttgaaggtgtttcactgacttataaagaaggaactaaggtgttcacttcaactcaagttggtaaagcatgccagtttacaacggggcttgctgtgcttatttcaactaaagataatgaaactcgaattcagccaaatgctacttgtccagaaaagaaataa

SEQ ID NO: 19839 - DNA, 540 bp, Escherichia coli
atgaataaaattattttatttctaatcttttctacgtttagtgtaggcactgccttggctaactcgttgcaaagtcaaattgctgctattgctcaagcggaaaatgaagggcgagctaaagagcagcaagctgaggatgccagaaaagaacttattcgccaacaagcacaagctgaacgtattagaagagaaaaagcagcatctgccgctgctgcacgcgaaaaacagcgtgttgctgcagaaaatgaacgtagagcgaaacgagaagccgagctagcaaatgacaagaagcgagatcaagcttatgaggatgagcttcgcaagctgcaactcgaaagcatgaaactcgaactgcaagcaaaagcggctcgtgtccagcgagaaaacgattttatagagcaggagttgaaggagagagcagctaagacagatgtaattcagtctgaggctgatgcaaatagaaatatttctacaggaagtaaagatttactgcaaagcgaaggaaaagctagagagaagaaagctagcagttggtggtag

SEQ ID NO: 19840 - DNA, 423 bp, Escherichia coli; identical to SEQ ID NO: 7909

SEQ ID NO: 19841 - DNA, 315 bp, Escherichia coli
atggatcacgaaaaggttgcagccagcttagctgagctagggaatagtcaccgactgtccgtgttccgctttctggtcaaagctggccatgatggggcttcggtcggagatatccagaaggggctgggtattcctgcttcgacgctatcacatcaccttgcgcgcatggccaaggtagggctgatccggcaggagaaacatagccgcacgattgtctgtatacccgagtatgggcacctagagaatttgatcggtttcttacaagaggaatgttgtgcaggtgtccggattgcgcatgaaccagaaccgctttga

SEQ ID NO: 19842 - DNA, 1035 bp, Escherichia coli
atgtcacctcaactccaagacgctctaggcacgttcgccttgctcgctatcgagctaccggttttattcattggcattagcttgctggtcggagttcttcaacgtcacatcccaccatccaaggtggaagcgttactgacttccagtgggaagcgaggctattttcttgctgctggtttaggagctataacgcccttctgtagttgctcgactatccccatgttgaaagggttgattcaggcacgggccggttttgggccgatgatggtgtttcttttcacatctccgttgctgaatcctatcgtcgtcggcctgctggttgccacgtttggatggacacttactgctatctatgtgctcgccgctttggtggtcgcggtaggtgccggatggctgcttcacacgcttggcttcgagcgttatgtgcgccggacggcgacacaagagagcagtggatgtagttcatcagcaagcccgtgcagtgctacatcgaccgcatcgagttgcggcaccaacagctgcgacaccactccgaagacggcttcttgcggggctgataggaagacaacagtctctacgtctagcgaatgctgtgacagtcaacccactgtcacggttaagaaagaagggaagtacaatggtgtgtggcgggaagcttggtcggactttatcgatgtgttgccttacctgctcatcgctattgcgattggcagcgtgatctatggtttcatgcccactgacttattggcgcagtatgcaggcccagataatccctttgccattccagttgccgctgtcatcggcgtgccgttgtatattcgcgctgaagccgtcatacctctggcagcggctctgatggccaaaggcgtgggtgccgggacggtgcttgcgttgatcatcggcagtgccggagccagcctgactgagctcattctgttgcgctctttgttcacgctgaagcttttagcggcgtttttagcagtcatttttgctatggcgatgattgccggttacgccacctacctgtttttctga

SEQ ID NO: 19843 - DNA, 1278 bp, Escherichia coli
atgattaattcgttaagccttcctggttaccagttggtggattctgatgagcagaatgaagacatacattttcggcttgaagcacctacaccagtagcctgcgaggggtgctgcgtgcagggtgagttcgtgcggttcggcaagcgtgatgttccctatcgtgacctgcccatccacggcaagcgggtcaccctctgggtagttcgtcgccggtacacctgccgggcctgcaagaccaccttcaggccccagctaccggagatggtggacggcttccgcatgacgctgcggttgcatgagtacgtggagaaggaagccttcaatcacccctacgcctacgtggctgataccacgggcctggacgagaagacggtacgcgacattttcaacgcccgcgccgaattcctggggcgctggcaccgcttcgagacgccccgcattctcggcattgacgagttgtacctgaacaagcgctaccgctgcatcctgaccaacatcgaggagaggaccctgctcgacctgctggccacccgccgtcaggacgtggtgaccaactacctgatgaagatgaaagaccggcagaaggtcaagatcgtcagcatggacatgtggaatccctaccgagcagcggtcaaggcggtgctgccacaggcccgcatcgtggtcgataagttccatgtggtgcgcatggccaacgatgccctggagaaggtgcgcaagggcctcaggaaggagctgatgccctcccagagccgaaccctcaagggtgaccggaaaatcctgctgaaacgcgctcacgaagtctcaaaccgggaacgcctcatcatggagacctggaccggcgcattcccacaactgctggccgcctacgagcacaaggaacgtttctacggcatctgggacgctaccacacggccccaggcagaagccgccctggacgagtggatagccaccatcccgaagggccagaaggaagtctggagcgatctggtcagggctgtaggcaactggcgcgaagagatcatgacctacttcgagacggacatgcccgtcaccaacgcttacacggagtccatcaaccgactggccaaggacaagaaccgtgaaggacgtggttactccttcgaggtgatgcgggcacgaatgctctacaccacgaagcacaagaagaaggccccgaccgcgaaggtctctccgttctacaagaaaaccatcggttacggactgccggacttcgcagaggaactcaactacggggtcgatctatcaaccatctga

SEQ ID NO: 19844 - DNA, 978 bp, Escherichia coli
atgagatatttaaccgaattgatctgtaagctctacaggttgacagatcaccataaactgaccacagcaacgtttaaaaatcttgctgatattaagttatttaaacctacagcagatgcagacaccatattgcagcttgaaaatatatttagcgaatactcactgagatatattgacagggatctggctgaaattctgagcaacttaataactacagataagaaacactctctggacttcgattttaacaaaatacaatctctgactgactcgaaaagtttcggttgtggatggagcaaggtaataaatggtagttggttcaaagatctttattcgtggggagaggggatgtatcctgccgaaaatctgaaagctgaaaatattttagactggaaagataatatatggcacattgagcatgaaggtttccccccacgcaaccctattaatgttaaatattattcttggtttgaccgatatgtagcttcaaacagtggtggttcacatcatgcagcaatggttgtatatcaatcagtcagagatgggttagggtataaaagagaagctattattaaacaactgagtatagacccaggcactgttgaaatacttgataagtattactattcattcatattccagatcaaaactcttaataaagaaactagaatttatacatctgaatacaagtttacagatgctttaaaagactttggacaaaacagacataccatacttaaacctgttaattacgtttccaacataaaattagtctttattccaaaagacgcattaaaaacaaatagcgagacattccgcaactggtttcattctgcaattagctgcggaaaaataatatcactccctgattatctgaaaaaaccagcacattatcatacacttcattactcacatgaagtagactcaataacacttggcgacccaagcagaaaatttaaactgaaaggagattcttag

SEQ ID NO: 19845 - DNA, 318 bp, Escherichia coli
atgatatccattaagagctattttaactggaataagttatttatgtttttagctgtggccttatactggttttggcgtgttctatccagaagcacaaagctgatgccagtaatgctgttagttacactggttatagcattttactttgcgcctgaacaactttttactgatgttattaatacatgggaaagtgctactacaaagcagagaattacactagcaaggcttttctttaaatccgcatttctcttgtcatttgcatcctgttttctggatgaacttattacatatccacaaaaaggtgaacataagttatga

SEQ ID NO: 19846 - DNA, 339 bp, Escherichia coli
atgattgtttcggttgtatgcatccatatccggctggtcactggttttattctttacaggattttacaccactacttgaaaattctcttttctacgtctttttctttttttttcgcgggtatggcaggtgtaattatatcaagaataactaatttaattaagtcgatgagacatgacaataaaccatcaatagataattatgaacaaatagaaatagaacgctatatgacaaatgaggaggtaggcagactcgttatcaattttatgaaacgcaccaatggtgaaccgttgctgattgtttttcctgaatatgataatggagacgagaacagaaattga

SEQ ID NO: 19847 - DNA, 435 bp, Escherichia coli
atgaaaaagattctcgtatcatttgttgccattatggctgccgcttcatctgccatggctgcagagacaatgaacatgcatgaccaggtaaataatgcacaggcacctgcccaccagatgcagtcatctgctgaaaaaagtgcaattcagggagacagcatgacaatgatggatatgagcagtcacgatcaggccgcaatgtcccatgacatgatgcaaaacagcaattctgctgcccaccaggacatggctgaaatgcataaaaaaatgatgaaagctaaacccggagctaccaacgaaacagcaaagtcattttctgaaatgagcgagcatgagaaggccgcagctgtacatgagaaggcgaataatggtcagtcttccgttgttcaccagcagcaggctgataagcatcgcagtcagatcacccagaattaa

SEQ ID NO: 19848 - DNA, 1401 bp, Escherichia coli
gtgaggttcaaaatttccctgaccacacgcctgagcctgattttttctgcggtgatgcttacggtatggtggttatcaagttttatcctgattagcacccttaatggctatttcgataatcaggaccgcgattttctgacaggtaaacttcagctcaccgaagagtttcttaaaacagagacgttcaggaacaaaacggatattaagtcattatcagaaaaaataaacgatgcgatggtggggcacaatggcttattcatttctataaaaaacatggaaaatgaaaaaattgttgaactctatgccaaaaattctgttgttccagcggtcctgcttaataagtcgggtgatattctcgactatatgatccagacggaagaaaataacaccgtgtaccgcagtatctcgcggcgggttgccgtgacgccggaacagggtaaaagcaaacatgtcatcattacggttgccacggatactgggtatcacaccctgtttatggacaaactcagtacctggctgttctggttcaatatcggtctggtctttatttctgtttttctgggctggctgaccacacgtattggtctgaaaccgctacgggaaatgaccagtctggcttcctccatgaccgtacacagcctggatcagcgtctaaatcccgatctggctccgccggaaatctctgagaccatgcaggagttcaataatatgtttgatcgcctggagggggcattccggaaactgtcagatttctcgtctgacatcgcgcatgagctgcgcacaccagtcagtaatctgatgatgcagacgcagtttgcactggctaaggaaagggatgtttcgcattaccgcgaaattttattcgctaacctggaagaactgaaaaggttgtcacgaatgaccagtgacatgctttttctggcacgttcagagcatggtctgctgcggctggataaacatgatgtggatctggcagccgaactgaatgaattacgtgagttgttcgagcccctggcagacgaaacaggaaagacaatcacggttgaaggagagggcgttgttgccggagacagcgatatgctccgacgtgctttcagtaacctgctttccaatgcaatcaagtattctcccgataacacctgtacagcgatacaccttgagcgtgacagtgactgtgtgaacgtgatgattacgaatacgatgtccggccaggttcccgctaatctggaacgtttgtttgaccggttctatcgcgcagactcatcaaggttctacaacacggaaggcgcggggctgggattatcaattacaaggtcgatcattcatgctcacggcggcgagctgtcagcagaacagcaggggcgtgaaattgtgttcaaagtgcgcctgttaatggattaa

SEQ ID NO: 19849 - DNA, 681 bp, Escherichia coli
atgcagcgtattttaatcgttgaagacgaacaaaaaacaggtcgttacctgcagcagggactggttgaggaaggctatcaggccgatctctttaataatggccgcgatggtctcggggccgcgtcgaagggacagtatgatttgataatactggacgtgatgctgcctttcctcgacgggtggcaaatcatcagcgcactgagggagtccgggcacgaagaaccggtcctgtttttaaccgcaaaggacaacgtgcgggacaaagtgaaaggactggagcttggcgcagatgactacctgattaagccctttgattttacggagctggttgcacgtgtaagaaccctactgcgccgggcacgctcgcaggccgcaacagtctgcaccatcgccgatatgaccgttgatatggtgcgccggaccgtgatccgttcggggaagaagatccatctcaccggtaaagaatacgttctgcttgagttgctgctgcaacgcaccggagaagtgttacccaggagtcttatctcgtccctggtctggaacatgaattttgacagtgatacgaatgtgattgatgtcgccgtgagacgtctgagaagtaaaattgatgatgactttgagccaaaactgatccataccgttcgcggtgccggatatgtcctggagatcagagaagagtga

SEQ ID NO: 19850 - DNA, 930 bp, Escherichia coli
atgaacgacctgattatgattgttattcgttttcttctttatctggatttgatggtaatatttggattgccattttttcagatatatggaataagcggtgtcagacatgaaacctataacctgactaatttcaggtcgtttataacctttgctgttgttacaggcatcattcttactggcattaatatgctcctggtatctaatgccatgagtggagtaactgacctcagagaattatccatccatgttatcgagatggtgatagaagaaactgatgtgggtattagctggattgtcaggctctgtgccctgtttaccacactcggtgctttgttcctttacactaataagagagtattgtcctgcctgctgatgacgatgagtgggggcgtggcgctggctacacttgcctggggaggacacgccgttatgcatgacggtctgcattactatctccatttactgagcgatctgacccatctcggcgctgcaggtgcctggacaggtgctctggttgcatttgctatcctgctgatgcgcagaaacgagcataatgcacagagcgtcattgtgatatctgactccctggcaaaatttgccacggcaggaacggtgattgttgtagccctgatcctgagtgcgctggtcaactatctgtatattgctgagggtaacttaactcccttattcaacagttcctgggggaggatattgcttgccaagacggctctgtttgttctgatgcttcttctggctgcagcaaaccggtttcacctgggtccccggcttgaagttatggtcagggaagggaattatgatcgcagcgttgccctgatgcgaaacagcatcctgacagaattcgttgttgcgattatcattctgggcgccgtagcgtggctcggaatgcttgctccgtctcaggtcagctag

SEQ ID NO: 19851 - DNA, 381 bp, Escherichia coli
atgtcgattttaaataaagccattcttacaggtggcctcgttatgggcgttgctttctctgctatggcccatccggaattaaaaagctctgtgccacaggctgattcagccgtagcggccccggaaaagattcagcttaatttctcggaaaatctgaccgtgaaattctcaggtgcaaaattaacgatgacgggtatgaaaggcatgtcatcacattctccgatgccggtcgcggcaaaagtggcgccaggcgctgaccctaaatcgatggtcattattccgcgagagcctttacccgctggcacttatcgtgttgactggcgcgcggtttcttcagatacgcaccctattaccggtaattacacctttacagtgaagtaa

SEQ ID NO: 19852 - DNA, 897 bp, Escherichia coli
atgcgaatgaagagaaatttgaaggccatacctgttctggtcgccggtttgtttacctcacagctttctattgcggcgggctccgtctctgcagatccccacgccgggcacgacatgtctgccatgcagatgccagcagatgagaatttcactgagatgacgtcaatggagcccattgtaactgagagcagaacgccaattccgcctgttaccgatgccgaccggaaggctgcattcggcaatttacaggggcatgcgattcacgacagtgcgattaattatctggttctgctggatcaactggaatggcaacggtcggataacaccaacaatttcagctggagtgttaacagctggattggaggcgacacagatcggatttggctaaagagtgaaggtgaacgaagcaatggggaaacggaggcggctgaagcgcagttactctggggacatgcggttggcccatggtgggatttggttgcgggtgtcaggcaggatttcagacctgcttctgcccggacctgggctgctgtcggttttcaggggctggcactctataattttgagtctgaaattacgggttttgtcagtaatggcggaaaagcagcccttcgtctgggaggagaatacgacgttttactgactaaccggctcatactccagccatcctatgaggtgaatttctacagtcaggatgatgaatcgcggggtcgcggcaggggactgactgacacagagctggggctccggctgcgctatgaaatacgccgtgagtttgcaccctatataggcgtttcctggaatcaactttacgggaaaacatccgatatggcgaaaagagaaggtgagaaagaccatcaggtagtattcctggcgggagccagaatctggttttaa

SEQ ID NO: 19853 - DNA, 1818 bp, Escherichia coli
atgctgttgaaaacgtctcgacgaactttcctgaaggggttaaccctctctggcgtagccggaagtcttggcgtatggagtttcaatgcgcgttccagtctgagcctgccagttgccgcatccctgcagggtactcagtttgacctgaccattggtgaaacggccgtcaatatcacgggcagtgagcgtcaggccaaaacaatcaatggaggcctgccggggcccgttcttcgctggaaagaaggtgacaccattaccctgaaggtcaaaaaccgtcttaatgaacagacgtccattcactggcacggcattattcttccggccaatatggatggtgttccggggctgagttttatgggcatagagcctgatgatacctacgtttacacctttaaggttaagcagaacgggacttactggtaccacagccattccggtctgcaggaacaggagggggtatacggtgccattatcatcgatgccagggagccagaaccgtttgcttacgatcgtgagcatgtggtcatgttgtctgactggaccgatgaaaatcctcacagcctgctgaaaaaattaaaaaaacagtcggattactacaatttcaataaaccaaccgttggctcttttttccgcgacgtgaataccagggggctgtcagccaccattgccgatcggaaaatgtgggctgaaatgaaaatgaatccgactgacctcgcggatgtcagtggctacacctacacctatctcatgaacgggcaggccccgctgaaaaactggaccggactgttccgtcccggtgaaaagatacgcttacggtttatcaacggctcggcaatgacctatttcgatatccgtatccccgggctgaaaatgacggtcgtggctgcagatggccagtatgtaaacccggttaccgttgacgaattcaggattgccgttgccgaaacctatgatgtcattgtggagcctcagggtgaggcctataccatcttcgcacaatccatggacaggaccggttacgctcgagggacactggccacgagagaggggttaagtgctgccgttccccccctcgatccccgtcctctgttgaccatggaagatatgggtatggggggaatgggacatgatatggcaagaatggaccacagccagatgggaggcatggataacagcggagagatgatgtctatggacggtgctgaccttccggatagcgggacatcctccgcgcccatggatcacagcagcatggccggtatggatcattcccggatggccggaatgccgggtatgcaaagtcatcctgcgtcagaaacggataacccactggttgatatgcaggcgatgagcgtctctccgaaattaaatgatccgggtattggtcttcgaaataacggaagaaaggttctcacgtacgcggatttgaaaagccgctttgaggatcctgacggacgtgaacctggccgtaccatagaactgcatttaaccggccacatggaaaagtttgcctggtcatttaacggaatcaagttttcagatgccgcaccggtgctgctgaaatacggtgagcggctcaggatcacgctgatcaacgataccatgatgactcaccccattcacctgcatggtatgtggagcgatctggaagatgaaaacggtaatttcatggttcgtaaacacacaatagatgttccccctggtacaaaacgcagttacagagtgacagcagatgcgcttggccgctgggcgtatcactgccatttgctctatcacatggaaatgggaatgtttcgtgaagtccgggtggaggaatga

SEQ ID NO: 19854 - DNA, 450 bp, Escherichia coli
atgaatatattaatcacggccactgcgtttacagctttattttgtggggcagcttttgctcagtccagtgatattgcccatgaagcacatcgatttgttaataatgcctcagccgtcagtcatgtgaattcctcgacgcatgaaaacttaccggacagggttaataaaaacaacacgccctcattctctgaaatgaatgaacatgaaagggccattgttgctcattcatttatgaacaacagcgcgtcctatgcacatcagaaaatgattgaggaacataaaaaaatgctgtccgacagtggtgcaaattcaaagacctcctcttcttcttttaacgaactgaatgccggagagaaagccgccctcgtgcatgagcaggtcaataatgccggtgcggaagctcatcagacacaggcaagaaagcttcgcggcctgtattcctccaggtaa

SEQ ID NO: 19855 - DNA, 738 bp, Escherichia coli
atgtattctaccgatgtcgtaaaagaaaatgcttacctttcagccacccgctcggggctggaatcgaacgagatcgctatccttcagcgctctttgccttcccgctttaatcttcggcatttgaaaaaaaatgaatcattaaaactcgtactgcaaaagaaagcgggaaaatcacgtgtagtggcttataaatttacgtccggctcatttaattacacggcgtatcgtatatcagacaaaaagttctataatctttccgatacttccgggaaaggcagtctcgattatccgttaccagccacagcaagactcagttcacctttcaatcctgcaagacttaacccggtatcgggaaaagtgagtccccataatggcattgattattccatgcccatgaacacgaaaatagtcagcgtcatcgacggaaaaatcacccgggccgaatacaacagtaccatgggatattttgttgaagtaacgggaaaagccggtgttaaaactcgctatctccacctcaataaaatactcgttactaaaggggccagagttacccggggaggtgctattgcgttatccggtaacagcggacgttcatccggtcctcatttacattacgagctggtcatcaataacaatcctgttaattcactggcgttccgggcatcggcacccgctgataacaaactcgaacagcatgcctttgcgcatgccagagactacgaacgatacctggactga

SEQ ID NO: 19856 - DNA, 198 bp, Escherichia coli
atgaaaagtaccacctatgcgcttattgctgtcgccgcgatcgcggcatttgccctcctgcgagaacactggtcacatgtggcaggttactggccatatctgttattgctggtctgcccgctaatgcatcttttccacggccacggagggcatggggatcaccaacatcacggaagtgaaaacgataaaaaaaattaa

SEQ ID NO: 19857 - DNA, 2460 bp, Escherichia coli
gtgaaaaatgacaatgcagtgcaacacaacaaccagactgcctctgaacagacattatccccggacgagagtcacgtattgcataaggtgagagatcccgtgtgcgggatgacaatcatgcccgataaggcgcacagcagcattcgataccaggagcatcagctttatttctgctccgccagctgtgagagcaaatttaaagctcatcccgatcattatcttacagaagatgccagtgaacattcccatcaccaccatcaccaccatcaccaccatcaccacgaggtcatccctgatcagataaaacagcctcaccaccaggcggagaacgatatttctgaaggtgtgtggacatgcccgatgcacccggagatacgccgtcgtggtccaggaagctgtcctgtctgtggaatggcactggaaccactcgtagccacggcatccacggggccaagcgatgaacttcgcgacatgacaagacgcttctggctggggttgttgctggcgtttccggttctgatactcgaaatgggatctcatctgtttcccgccttgagaaatatagtatcgccacagtacaacacatggctgcagctgcttctggcctctcctgtcgtgttgtggtgtggctggccatttttcgcccgggccgggatgtcgttacgtaaccgttccctgaatatgtttacccttgttgctatggggaccggcgtagcctgggtttacagcgtcattgcaactgtcttcccctcctggtttcctgcatcgttcagaaacatggatggcctggtggccgtttattttgaagccgcggcagtaattacggtgcttgtactgctgggacaggttcttgagctgcgggcacgggaacaaacctcaggtgccattactgcgcttctgaaccttgcccccaaaaccgccaggcggctggaccatgacggtcatgaaacggatattaatgcggaagatgtcctgcctggcgataagctccgcatcagacctggggagagtattccggtcgacggtatcgtggtcgaaggcacaacaaccgttgatgaatcgatggtgaccggggagtctatgccggttaccaaaacggagggtgcccctgtcattggggggacgattaatcagacaggtagtcttatcatccgtgcagagaaagtcggagatgaaacgatgctctcacgaattgttcagatggtcgctgatgcacagcgttcgcgagcccccatccagagaatggctgacagcgtttcaggctggtttgttcctctggtgatacttatcgcggttgttgctttcgtgatctggtctgtctgggggcccgagcccaggatggcgcacggtctgattgcggctgtgtcggtcctgattattgcctgtccctgcgcgctggggctggccacgccgatgtcgataatggtgggggtgggcaaaggagcccaggccggggtgttaatcaaaaatgccgaagcccttgagcgtcttgaaaaagtggacacgctggttgtcgacaaaacaggcacgctcacggaaggttcgcctacggtgacaggaattatcagtctcagtccgggtggggaagcctctcttttgcgtgtaacggccgcagtggaaaaaggctcgcagcatccgctgggtatggcagtcgtcagagcagcacaggaaaaggggatcgcaatacccgcagtcactcatttcgatgcaccgtcgggtaaaggtgtcacaggcgatgtcgaaggtcaacggattgttattggtaatgaactggttatgcaggaaaacagtatcgttgttgataatcaaaaggccgttgcggatacgttgcggatggaaggcgctaccgttatctatgtggccacggacggggaccttgcaggcctgatagctatttcggatcccgtgaaagcaaccacgccggatgcacttaaagcgttgcgtcaggcggggatccgcatcgttatgctcaccggggataaccagcttaccgctgaagcagtcgcacggaaactgggaatagatgaggttgaagccgggattctgccggatggcaaaaaagcagtgataacccgactgaaagcgtctggccatgtggttgcgatggccggagacggtgtgaatgatgccccggcgctggcagcggctgacgtgggaatagccatgggaacgggtacagatgtggcaattgaaagtgccggagtcacccttctcaaaggcgacctgatgatactgaacagggcccgtcatctgtcagagatcaccatgaaaaatatccgacagaatctgttttttgcatttatctacaacgcacttggtgtgccggtggctgcaggcctgctttatcctgtgtatggaatactgctgtcgccagttattgcggcggcggccatggctctttcttccgtcagcgtcattgtgaatgcgttgcgtctgaaaagtgtcaggctcgggaaataa

SEQ ID NO: 19858 - DNA, 441 bp, Escherichia coli
atgaaaaaaataattttaatggccctggcttttggcctttcacttccggcaatggcaggtgaaaaagtaatagacatgtacaagtctgaaaactgtggttgctgttccctgtggggcaaggcgatggaaaaggacgggtttgaggtacggacccacgtcatgaatgatcaggctctgtcagccctgaaagaaaaatatgctgttcctgctgagctgagaagctgtcataccgcagttactggtaatttgatcattgaaggtcatgtgcctgccacaacgatacataaggcaatgcagtctggttcagggatttatggccttgccacccccggtatgcctgcgggaagcccgggaatggagatgggggcccgtaaagaggcttacgatgttatcgcattctctccggagggcagtaaaaagatcttccagcgaatcgaatag

SEQ ID NO: 19859 - DNA, 3147 bp, Escherichia coli
atgattgaatggattatccggcgctctgtcgccaaccgtttcctggtcatgatgggcgcactgtttctcagcatctggggcacatggacgataattaacacgccggtcgatgcgctgcctgacctgtcagatgtgcaggtcattattaaaaccagctatcccggacaggccccgcagattgtagaaaaccaggtcacctatccgcttaccaccaccatgctgtccgtacctggcgcaaaaaccgtgcgtggcttttcacagttcggtgattcgtatgtgtatgtcatttttgaagacggcaccgatctgtactgggcccgttcgcgcgtgctggaatacctgaatcaggttcagggcaaactgcctgcgggtgtgagctctgaaatcggcccggacgccacgggagtgggctggatatttgaatatgcccttgtcgatcgcaacggaaaacacgacctttcagaactgcgttctttgcaggactggtttctgaaatttgaactgaagaccatcccgaacgtggctgaggtagcctcggttggtggcgtggtgaagcagtaccagattcaggtcaatccggtaaaactgtcccagtatgggatcagcctgcccgaagtgaaacaggctcttgaatcgtctaaccaggaggccggtggttcatccgttgaaatggccgaagcggagtatatggtccgtgccagcggttatcttcagagcattgatgattttaataacatcgtcctgaaaacaggtgagaacggcgtgccggtttatctgcgggatgttgcccgcgtgcagaccgggcccgaaatgaggcgtggtattgccgagctgaacggccagggagaagtcgctggcggcgtggtgatcctgcggtcgggtaaaaatgcgcgcgacgttatcacggcagtgagggataaactggagacgctgaaggccagcctgccggaaggcgttgaaatcgtgaccacctacgatcgcagccagttaatcgaccgggcgattgataacctcagttccaaacttctggaagagtttatcgtggtggccatcgtctgtgctctgttcctgtggcacgtacgttctgccctggtggcgattatctctctgccgcttggcctgtgtatcgcctttatcgtcatgcacttccagggactgaacgccaatatcatgtcgctgggagggatagcgattgccgtcggtgcgatggtggatgccgccattgtgatgattgaaaatgcgcacaaacggcttgaggagtgggatcatcagcatccgggtgagcagattgacaacgccacccgctggaaggtgattaccgacgcctccgtggaagtgggacccgcgttgttcattagcctgctgatcatcaccctgtcctttattcctatctttaccctggaagggcaggaaggtcgtctgtttggcccgctggcattcacgaaaacgtactccatggcgggagcggccgcactggccatcatcgtcattcctattctgatgggattctggatccgggggaaaattcctgcagagaccagtaaccccctgaaccgggtgctgatcaaagcgtatcatcctttgctgctgcgggtcctccactggccaaaaacaaccctgctggttgcggccttgtccattttcacggttatctggccactgagtcaggtgggcggtgaatttctgccgaagattaacgagggcgatctgctgtatatgccgtcgaccttgcctggcgtctctccggcagaagctgcagcgctcctgcagacaacagacaagttaatcaaaagcgttcctgaagtggcttctgtatttggcaagaccggtaaagcagagaccgcaacggattccgcgccgctcgaaatggtggaaaccacgatccagctcaaacctgaggatcagtggcgtcccggcatgacaattgacaagattattgatgaactcgacaggacagtccgtttaccgggtctggcaaacctctgggtgccgcctatccgtaaccgtattgatatgctctcaaccgggatcaaaagcccgataggtatcaaagtgtccgggactgttctgtccgatatcgacgcgacggcgcagagtatcgaggcggtagccaaaaccgtgcctggcgtggtgtctgtcctggctgagcgacttgagggcgggcgctacatcgatatcgatatcaaccgggagaaagcctcccgctacgggatgacggtaggtgatgtccagctgttcgtctcttcagcaatcggaggtgctatggtgggtgagacagttgaaggggtggcccggtaccctattaacattcgctacccgcaggattaccggaacagtccgcaggcgctgaaacagatgccgatcctgaccccgatgaagcagcagatcacgctgggcgatgtcgcggatattaacgtcgtttctggaccaaccatgctgaaaaccgaaaatgcccggccagccagctggatttatgttgatgcccgcggcagggacatggtgtcggtggttaacgacattaagacggccatcagcgagaaagtgaaactgagaccgggaaccagtgtggcattctccggacagtttgaactgcttgagcatgccaacaagaaactgaagctgatggtgccgatgacggtgatgatcattttcatcctgttgtatctggcattccgccgggttgacgaagccctgctgatcctgatgagcctgccgttcgccctagttggcggaatatggttcctgtactggcagggcttccatatgtcagtggcgaccggaaccgggtttatcgccctggccggggtggcagcagagtttggcgtggtcatgctgatgtatctgcgtcatgccattgaagtgcacccggaattgtcccgtaaagagacgttcacaccggaaggtcttgatgaagccctttatcatggtgccgtgctgcgtgtccggccgaaagccatgaccgtggcggtgatcatcgcgggtctgctgccgatactctggggaaccggcgcaggttcagaagtcatgagccgtattgcggcccccatgattggcgggatgatcacagctccgctgctgtccctgttcattattcctgccgcctataaactcatctggctgcgcagacataaaaagagcgtgtcataa

SEQ ID NO: 19860 - DNA, 1293 bp, Escherichia coli
atggcttctttaaagataaaatatgctgcaataattatcagcagcctcatagcaggggggctgatatcggttactgcctggcagtatgtaaactcatcacaaaaaacagtacaaaccgaacaaaaggcaccggagcgaaaggtacttttctggtatgacccgatgaaaccggataccaaatttgataaacccggaaaatctccctttatggatatggacctggtgccaaaatatgctgatgaaagcggcgataaaagcagtggcgggatccgtatcgatccaacgcaggttcagaatctgggattaaaaacgcaaaaagtcacgcgaggaatgctgaattattctcagacaatcccggctaatgtcagttacaacgagtatcagtttgtcattgtgcaggcgcgctctgacggtttcgtcgaaaaagtgtatcccctgacgattggcgatcatgtgaagaaaggcactccgcttatcgatatcaccattcctgaatgggttgaggcacaaagtgagttcctgctgttatccggtacaggcggtacgtcaacccagataaaaggggttctggagcgacttcgtctggctggtatgccggaagaggatattcaaaggctgcgttcaacccgcacaatccagacccgttttaccattaaagcacctattgatggtgtcattactgcgtttgacctgcgcaccggaatgaatatttcgaaagataaagtagtggctcagattcaggggatggacccggtctggatcagcgctgcagtgccagaatctatcgcatatctgctgaaagatacgtcgcagtttgaaatttcggtaccggcttatccggataaaacattccatgtcgaaaaatggaacattcttcccagcgtggatcagacaacccgtacgcttcaggtccgtctccaggtttctaataaggatgagtttctcaagccgggcatgaatgcctatctgaaactgaataccaagagccaggagatgctgctgataccaagccaggccgttatcgataccggcaaagaacagcgcgtgattactgttgatgatgaaggcaagtttgtgccgaaacagatccacgttctgcatgaatcacagcaacagtccggcattggctccggcctgaatgaaggcgataccgtggtggtcagtggcctgttcctcattgactccgaagccaatattacgggcgcgctggaacgtatgcgccaccctgaaaaaacagaaaacagtatgccagcaatgtctgagcagcctgtaaatatgcattcagggcactga

SEQ ID NO: 19861 - DNA, 354 bp, Escherichia coli
atgcgtaattcacttaaagccgttttatttggtgccttctctgtcatgttttctgccggtcttcatgctgaaacacatcagcatggcgatatgaatgctgccagtgatgcttcggtacagcaggttatcaagggcaccggtgtcgttaaagacattgatatgaatagtaaaaagattaccatttcgcacgaagcaatccctgctgtgggctggcctgcaatgaccatgcgcttcacttttgttaatgcagacgacgctatcaatgccctgaaaaccggcaaccatgtcgatttctcgtttattcagcagggcaatatctccttactcaaaagcattaacgttacgcaatcctga

SEQ ID NO: 19862 - DNA, 1386 bp, Escherichia coli
atgttcaaattaaaattactcagcattagcacgatattcatcctggcaggctgcgtgtcgcttgcgcctgaatatcagcggcccgcagcaccggtaccccagcagttttcactgtcccataacagcctgacgccagcggtaaatggctatcaggatacgggctggcgtaacttttttgtcgatccccaggttacccggttgatcggtgaagctctgactaataaccgtgatttgagaatggctgccctgaaggttgaagaggcccgagcccagttcaacgtcacggatgcagatcgttatccccagctgaatgcctcatccgggataacatacagcggtggtctgaaaggtgacaagccgaccacacaggagtacgacgcgagactggagctcagctatgagctcgattttttcggcaaacttaagaacatgagtgatgctgaccgccagaactactttgccagcgaagaagcccgtcgggccgtacacatcctgctggtctccaacgtttcacagagctatttcagccagcaactggcgtacgaacaactccgtattgcgcgggaaacgctgaaaaattatgaacagtcctatgctttcgttgagcaacagctcgtgaccgggagtacgaacgttctggcacttgaacaggcgagaggacaaatcgaaagtacccgcgccgaaatagccaaacgagaaggcgatctggctcaggcaaacaatgccctgcaactggtgctgggaacgtaccgcgcacttccgtcagaaaaagggatgaaaggcggggagatcgcaccagtaaaattgccaccaaatctatcttcacaaattttgctgcagcgaccggatattatggaagcggaatatcagctgaaagcggctgatgccaatattggcgcagcgcgagcggcctttttcccctccattaccctgaccagtggtctttccgcaagcagtacggagctgtcaagcctgtttacgtcaggaagtggaatgtggaattttatccctaaaattgaaattcctatttttaatgctggcaggaataaagccaatctgaagctggctgaaattcgccagcaacaatcggtggttaattacgaacaaaaaattcagtcagcctttaaggatgtttccgacacgcttgcgctgcgcgacagccttagccagcaacttgagtcacagcagcgttatcttgattcacttcagataactctccagcgtgccagaggattatatgcaagtggtgctgtcagttacatcgaagtgctggatgcagaacgttccctcttcgctacgcagcaaaccattctcgatcttacctattcccgacaggttaacgaaattaatctgtttaccgcgctgggtggcggttgggtagagtaa

SEQ ID NO: 19863 - DNA, 681 bp, Escherichia coli
atgaaaatattgatcgtcgaagacgaaattaaaacaggtgaatatctcagcaaagggcttacagaggcagggttcgtagtggatcacgctgataatggtcttaccggatatcatctcgccatgacagccgagtatgatttagtcattctggatatcatgctacctgatgtgaacggctgggatatcatccgcatgctgcgcactgccggaaagggtatgccggtcttactgctgacagccctcggcacgatcgaacatagggtcaaaggactggaactgggtgcggacgattatctggttaaaccctttgcgtttgccgaactgctcgcccgggtgagaacccttctgaggcggggaaacacgatgatcacggaaagccagtttaaggtggctgacctctcgattgatctcgtatccagaaaagtcagtcgcgccggaaaccgcattgtgctcaccagtaaagagttcagcctgctggaattcttcattcgccatcagggagaggttcttccccgctccctgattgcctctcaggtctgggacatgaattttgacagcgacactaatgcgatcgatgtcgcagtaaagcgactccgcgctaaaatagacaacgattacgggacaaagctgatccagacagtccggggcgtgggctacatgctggaggtcccggatgcatag

SEQ ID NO: 19864 - DNA, 1482 bp, Escherichia coli
atgcatagcaaaccttccagacgccctttctcactcgctctgcggctgaccttttttatcagcctgtccacgatactggcttttatcgccttcacctggtttatgctgcattctgttgaaaatcattttgccgagcaggatgtcagcgatcttcaacaaatcagcaccacactgaaccgtatactgcagtccccggtggatccggatgataaaaaaataagcaaaataaaggaatcaattgccagctaccgcaacgttgcccttttgctcctcaatcccaggggtgaagtgctctttagctcagctcagggggcggcactacgcccggcagtgaattcagcagattttagcgagcacagccgcgcacgggatgtctttctctggacggtggaggatcctgcgggaccgatggataccgggtccgaaatgaagatggaaacatacaggattatcgcctcctctggccaggcgacatttcagggcaaacagcagaactatgtcatgctgactggcctctccattaatttccatctccattacctcgatgcgctgaaaaaaaatctgattgcgattgccgtcgtgataagcctgctgattgttctgatcattcgcattgctgtccgtcaggggcacctgccccttcgtaatgtcagcaatgccattaaaaacatcacctccgagaatcttgatgcgcggctggaaccgacacgcgttcccattgagctggagcagctggttatctcgttcaatcatatgattggaaagattgaggatgtttttacccgccaggccaatttctctgccgatatcgcgcacgagatcagaacacccatcaccaatctggtgacgcagactgaaatcgctctgagtcaggatcgaacgcagaaggaacttgaggatgtcctctattccagccttgaagagtataaccggatgaccaaaatggtcagcgacatgctgttcctggcacaggcggacaataatcagctgatacctgacagggttcggtttgacctcagagcagaagtcatgaaagtcttcgagtttttcgaagcctgggccgaagaacgcaatattatgctcaaatttaacgggatgccctgcctggttgagggagatccacaaatgttcagaagagcgatcaataatctgttatccaacgccctgcgttataccccagagggacaggcaatcaccgtctcaataagagagcaggagagcttttttgaccttgtgattgacaatccggggaaaccaatccctgaagagcatttatcaaggttgtttgaccgtttttatcgggtggatccgtccagacaacgaaaaggagaaggcagcggcatcggccttgcgattgtgaagtcaatcgtggaagcacatcacggaagagtgcaggtggaatcggacgtacactcaacgcgttttatcttatccgtgcccagactggagaaaatgattccggacacccagtgctgggaataa

SEQ ID NO: 19865 - DNA, 1557 bp, Escherichia coli
atgagaatgttgcctgttttgcctgatgaatccttgttcagccggttttgtcggacaactaccgtgtacggtatgtccccatcttctctgttaacgatcattttcaacaaacctgatatgaacgtccatccaattctcaattcaggattaaaggctatttctcttcatacatccgaaagtgcagatcagctctggcatgaacagactttactccctctttttgcctgggcactaccaatcagtcgtaatgaaattatggatttcaacacgacccctgccaggcttaatcgattgtgccgccttagtaatttttcactagggcagcgcacactattgaagttttgcccggtttgcgctcgtgaagatacttttcattatggtgttacttattggcatctggcgcatcagcttcatggggttacaacctgccatcggcatccggtagcgcttgaaagcatccatgtcccttcttcaccgcacatacgtattggactgatgcctcctgtttcgtatacagaacaacttagcaatgagatagacttcgattttgctaagttttgttatgagtccctaaatataatcagaagaaaagatattacacaccccaattacatggatgtacttaaaaagttgaatttattatcattggatggaaatttaaagaaaaatgtattctacgcacatgtttatgctaagtgccagttatttggggaggggtcatcgggacttataccaacatccctaactgattatcattactgggagcctatactcaaagacaaatgttgtcagcatcccacaaagcatcttttgctttgttattgtttgttaaatacttgctggccaacgtatgcaggaagtcgtactaataaaaagaaagaaatctttaaaagtcataagaaatacagttttcatatagttgaaaataatactagtgttagcaaccttgggaaggaatttagtcgcagcagatgttacattaaaacacttatttataaaaaatacctgagggcgtttaagcgaaacacaaaaattaatatattcactgaattgcttatcaagtctatggctgtaagggggtttagtctggcatccatagctgagaaaaactcattatcggaaggagctgtatcctctgtaatttcatcttgttacggtttatgctcatggcgtaaaaaatgtaaaaaagattctttaagacggcgtcataagcagaaaatattaagatttatacataatcaatccgtttctataacacgaaagttagtcaaagaaagttgttatgcaagtttctattggctaaataaacatgaatgtgactggcttaattcctgtcttcctaaaacaatacgatgctataaaaataaaagagtagactggagcgagagagatattatctcatcatcattaataaatgatgttttatctcaggggcagtactcgatgtcacttacaagtctagatgctttactgggagggcatggctggcttttgaaatacagagataaactaccaatgacaatgatacttctcagaaaaatggaactaattaaataa

SEQ ID NO: 19866 - DNA, 2124 bp, Escherichia coli; identical to SEQ ID NO: 11329

SEQ ID NO: 19867 - DNA, 192 bp, Escherichia coli; identical to SEQ ID NO: 7908

SEQ ID NO: 19868 - DNA, 423 bp, Escherichia coli; identical to SEQ ID NO: 7909

SEQ ID NO: 19869 - DNA, 165 bp, Escherichia coli
atgatggcggggaaaatccccgctttttttctgccggtccccggacagagcacaaaggaagtcgccgccggctccgctttatccggccatgcaggcatggccttgtgggttttcagttatgtggccgccgtgtcgtgtgcgggcggtgccgtgcctccatcttag

SEQ ID NO: 19870 - DNA, 366 bp, Escherichia coli; identical to SEQ ID NO: 10065

SEQ ID NO: 19871 - DNA, 981 bp, Escherichia coli
atgactcttttggtaacggctgagtgtgttgacgatctgataaacgatgttcatcaagctatcctagcggatggactcagtaacgatcctacaaaaggatcaactctagagattcttggtgcctatcttgtccttaccgacccccgccgaagaataagtagaacagaatcccgaggaaaactaattagttgcttaggtgaatttctgtggtatctctcagctcagaacgatcttgagtttataaaacacttcataccacgttacgctgaatccgctgagtcagatgggaaaatacatggtggttacgggccacggttgtttaatatgcgtggtttatataatcagctaaaaaatgttatcaaccttttgcaggagaaaaaacctaccagacgtgcagtaatacagcttttcgatgcctcagacttggtgccctcaaaaactgaacagcgagaatacgtagatattccttgtacaatatctatgcagtttattgtcagatgtgaagagctgcatctatttgtttgtatgcgttctaacgatgcctttatggggctgcctcatgatgtatttgcgttcacgatgctacaggaattagttgcccgcttgataggatgcgaattgggtcactatcatcactttgtatccagcctacatctctataaaaatgatttagaaaaagtgaaggctcttcagaaagaggggttcatgagcaccctaccagtcatgggatcgatgcctgaaatgcattccttagatgatatcttacccctgcttgaggcagaaaaagctcttcgagagaataaggaatttgatattgacactacttccttgaatgactactggaaggatttattgcgtatattaaaaatccactttttgttacgttcacatacacccaaccacaaaggactagccttccaagagttggctgcaatgaaaaatcaggaatatcggtttatttttgaaggaagactacaatga

SEQ ID NO: 19872 - DNA, 945 bp, Escherichia coli
atgaaaagacataatcaaatcagtcagctggttagtaatttgcaaaattttagccgcaatgaacacaacctaaatggcctaagttctcctgcctgctttgatgttttagcctgtcagattatcgacagtatacgtcgtatacgctatgtggaaactcttgcattacggaccgattatatgactccgttacgaaaagagccgaattctgatgtttttgatcctctccgcgctgcctgcctttatcttcgtgacaacaattacgatgaagcctgctggctggttttccttgccacacatttcggcaagagtaacaaaaccggctggattttgtgtcgagatatatacagtggactcggtacacaaacgtggacatgggatacgataactgatgactttgctgcttttgaacaatggttcgccagcgtctctgatgagttgacagctaacagtagcctaagacaatatggtaaccatcggaaatatgaaacgaagaaatatcactctcgtcgttcaatacctgcggtttttcgctcttacatcggattcattggtgctacacacagtcatgaggctaggtttgcagaggccaagagcttttcatcttcaccagaatctttattcgaactattgtattcagggctaaatgccgtgatctcatttggacgaaccgcaaaatttgattacctaactatgctcaagaaaacgggacttctggatgtagagccgggtcatgcttttctgaatggagcaaccgggccccttcaaggaagccggctacttttcagcaatagccggactgctggtgacacaatagacgtattgaatgaaaaactagctgaccttgcggcaattattcctgcaccctacttgagaatgcaggttattgaagatgcgttgtgcaactggcagaaatcacctgaccgttatgtctatttcggcggctga

SEQ ID NO: 19873 - DNA, 1083 bp, Escherichia coli
atgatagttacgcaggacttccagcctgactgggtatctccacccggtgatacaattatagatctaatggatgaacatgggctttctggtgaagaactgagtaagaggattggattgtctcttatccggggtcagcaacttcttgaaggaaaaatccgactcaatgagtctctggcttgtaagcttgaggagttattcaacgtatcgacagacttctggatcaagcgcgaagtcgcttatcgccagcaaattggatacctcgagaaagtgaataatgattggctcgaatcattgcctgtacgtgatatgatggagtttggttggatccccaaaactacaactcgggaaagtaaattccagcactgcctatcgtttttcggaataaattccgtcaatgattttttttataaaattcagtcagatgctcctttggtcgcttttcgtaaatctcttaatctggcaaccgagcctatggccgatttggtgtggctgactagggctgcacaacttacctcaaaccaaaactgtgctgtatgggataaagaggggctgatagcattgttgccagaactgcgcaaagctacaaatgaacccgacatgaggatttttatcccttacattcgcgaccttctcgccactgctggagtttctctcgttgtgttgccaacgccaaagggatgtcgggcaagtggtgctacctgcttttttacaccagatcgcgcaaccctagtcatgagtttccgttatctgaccgatgaccatttttggtttacgctgtttcatgagattgggcatctcatcttgcatgaagctgtccgagttcgcgtagaaggtaaagatagtctttcgtcggaagaggaaaaggaagcagataaatttgccgttgatgttcttatcccagaagaataccggcagcaacttagtcgctatggtgtccggcattggaaagagatcatccggttagctaggaaaatgggggtatccaaagggatcgtactgggatatttgcagcatgaaggtaatatacctttttctcaccttaatcggtttaaagtgagattccgtaaagaagatatcgtctga

SEQ ID NO: 19874 - DNA, 279 bp, Escherichia coli
atgcatgaggcaaatgagatctttggtgacaaagtggcatcaagactacgctcgcgactttccgatctttccgtgacagacaacatattactgttgcccgtaggttcgccggaggtctgctttgaggatggggaagagtgtattacaattaccattctcggtgatgtaaaaatgggatttgtctgtgggaatacagttcagcccaaaaatcaagataatacaattaactggtcccgagttagccggatacggttagtgttcataggtgacgtgaaatga

SEQ ID NO: 19875 - DNA, 267 bp, Escherichia coli
atgaaaggtaaacatcaagacactaaagccctgtctgacgtgctagcggaaatgcaacggcaggatgccaaatggggggcagaccgtaatcaagatccttttatctggggagcgattctcggagaagaggtgggagaatttcatcaggctgtcctccatgatcgttttggtggtaaagcagccggtaccagtagggaggaagcagtacaaattgctgctgttgcactgcaaatcatcgaatattatgatcgcgtaatagatcgataa

SEQ ID NO: 19876 - DNA, 543 bp, Escherichia coli
atgaccaattcagcacaccagcgactggatatggcgggaaatggtggcccgggggttacaggcagtgaaaccatcgtcagggatgctgttgccaaatggcgtaaaggctggaacccaccagttactactgccgccagacttccttcagtgtcccgggtaagccgctggttgatgccctggataataatcaggggtgaagaaaattatgcttcccgatttattagtctgatgtgtgaaaaagaaccggcgctgaaaatagcgcagcaactagtacttgagttctaccgtattctgaaaaccccaaataaatcaaatctaagcagttggttcactcgagtccacgaaaacggttcagcagaacttcggcgcgtggctgcggggatggaagctgatgctgcggctatatgtgaggcaaccagcagccgctggagtaacggtgttgtcgaaggtcatgtaaatcgcctgaagatgctgaaacatctgatgtatggtcgagccggatttgaactacttaggcagagggtaatgagtccactggcatga

SEQ ID NO: 19877 - DNA, 1143 bp, Escherichia coli
gtgaaaaaaaatcaattggtcacacttggcaaacatatagacatattgtccgggtgtgcattcccttcaagtggattcaataggaacaatggtgttccactaatccgtattagagatattctttcaggaaaaaccgaaacttattatgaaggcagttatgacttaaaatatcttattaaaaaaggtgatttactagttgggatggatggagatttcaaccgtgagtattggaaaggtactgatgcgttgttaaatcaacgggtatgtaaaattacgccaaatcctgaaacacttgataaaaattttctatatcatttcttgcaaaaggaattggataaaattcatgctacaacagatgttgtgactgtaaaacatttgtctgtaaaaaagatacaagatattaaaattaggcttccttcattaaaagaacaaaaacgcattgctgctattcttgataaagctgatgctatacgccaaaagcgcgaacaagccatcaaactggctgatgattttttgcgggctaagtttctagagatgtttggaactcctgcaaacaacatacatcgtttcccgaaaggaacgattcgcgacttggttgattcagtaaattatggaacttcagcaaaagcctctattgattctggtgaatatcctatattacggatgggtaatataacatatcaaggtaggtgggattttacagatttaaaatatcttgatctcagtgtaaaagaaaaggataaatatttggttaaagaaggcgatcttcttttcaatcgtactaacagtaaggaacttgttggtaaaacagctgtgtatgaagaagacaggcctatggcatttgctggatatttaatccgcgttagacctaattctatcggaaataactactatatttcagggtatcttaattccatccatggcaaaatcacattgatgaatatgtgtaaaagtattgttggcatggctaatattaatgcacaggaattgcagaatatagagatattaatcccacctaagcatctacaagatgagtatgagattatttataaaaaaataaaaaaaggactaagcatttatgataaaagcgcaatgcaacttcaacttttagcatcaaacctatcgaataaatatttcatgtaa

SEQ ID NO: 19878 - DNA, 1623 bp, Escherichia coli
atgaaattaactaaacttgtacttgaaaatttcagatctgttagagagcggcaggaaattgattttgcacctgtaacattactattggggccaaacagcgcgggcaagactactattttaattgcattattttatcttcaacaaatattagaccgtgagcagtgtgatcctatatatttagaagctatggggaacaggcgcatagatggatttagatctctagtccataatggggatctgaataatgtaattactattggtatcggtttcgatcctgaacaaacaataggtgtagaatataaaacatatttagaagaacttggtgatattttcgatattcattttataaaaatgaaagacattgcagatgaaactgaaaaggtttatgtagagtttaaaatcgcatggtcacaattgcacagagcagcatatataaagaactatgctgtttctataaataatgaatttattggagagctaagtaatgatgagtatactaaatcatctttagtaaatagattgaactttactcatccgttgcttcttcctattgattataatttatggcttgaatctattgataaggaaggattagatacgattgccagtgaatttgaaatatctttaaatgacttaattcctggcttagaacgtaataaaagtggtgcaacagagcgagtaaaaactgttgattatatatttgaagaagataaagaaaaaccaatgtttcctgtttttttaaagacgaaaattggtgcgttacctcaactgggaagaactgttgatacaaatttgaaagtttttgatatatccgagccagttgagtattttaatcgagatataatcaccagagtgctaacgcaagtttttacttctccgttagataaattaaataattatttaaaggctagcgtatctattggaccgttaagaattatacctgattcttcatttacgccaaatccttatccagaacaaaatggatggtttgatggtacatcagcatgggataagctgtgtttatctcaacaaaatgatagtgatttgattaaaaaagtaagtgattggttttccaatagagataaactaaacactaattataatatatttagtggaggagaatttgatataaaaacctcccctcaacttttaggtctgaaagataatgtttacttctgtaaaatagattcaagccaaatgttatttccaaatcaagtcggtgtcggattaactcagatagcacctcttattattgcagccaatatagttcaggatggattaattgctatagagcagcctgagctacatattcatcccgctttacaactcgctgtaggtgatctgtttacccaatatccccttgatgttaaaagacctatgtttttagtcgaaacacatagtgagcacattttgcttcgaattttaaaaagaattagacaaacaacggacaatgaattacctgaatcaaattacccagtaaaacctgattttatatcagtgatcgttttcgaggataataatggttcgactgttactaggaaaatagatattactgatgatggtgacttcaaacaaaaatggcccaaaggtttcttcgaagaaagaaggggagagcttttttaa

SEQ ID NO: 19879 - DNA, 897 bp, Escherichia coli
atgttctacgaatgcgccatttcaccagaggctttgtttgagatcgcaattgatcggagaaattatcgtgacttcataaaaggattttctacgggcggtaactttctctatagtgaattaccaaagctgaagagaaataaaaaacaattgcttgggctattaaatgctaatcatagtgaacttcaaaaaaaacgattagaggaccttattatttttttgaaaaataataaggttagtagggtttatgattatgttggtgacatgtcatggtcagataacatctctgctgtaaatcgaattgaacaatttgatcatgtagtgagttctactccttgtgataaccttgatgtaactaatatagatgatttctttgggttaaattatgctcggcaaaaaattgttgctagaattgctgaggatatgatatctataatctcacgcttattaaaaacatcagagcatattattatagttgacccatactttagtgacaaacaaagatggtggaatgtatttatttcattacttagcgttagtgctaataactcttataaaaaaaatttaaagatagatgttatatttgatgggagtaaagaaaactccccaacggtgaattatttggctaataagttgaaccgcgaaaaccttgtctttccagacgattttaaattatcagtaacatttaagtctttaacttctcgcgagggtaatgaatgtctgcataatagatatgttctttctaatgttgctggagtttgtttcatgcatggtttagatgagggagaaggaacggatgatgtctcaattttgtcgaaagagggatataataaaagatgggaacattacactacgaataatgtttttgatttaatagaagagcgtgaagttatatgttaa

SEQ ID NO: 19880 - DNA, 609 bp, Escherichia coli
atgtctaatacctcggcaaatgaaattgtaccgcacttaccgctaattttcgaaaatgaagctaatgggattcttcaggatctggcctatactccatcgcttatggggttgatgatgttcccgacagaagaggagctgaaagcagcgagaagctacataattaacgtttttgaagagtgttaccgagccggtcatttgcgcattatgggctttactaatgaagaaaacttgttcggatacgccttaatcttcggacatccatcgggaaattttccgttgtactgtcataaaatatatgtatatgagcaatatcgtggtaatggacttggaagtaatatactggcagaaatacttgcatttccaaatgaggtcgctttgatttgccagtctgatttggttcctttttatgaatcagccggaatgcactttaaaggaaattacaccactccatcagtcgccaatttcaaaaaaactcgcggcatgtatgaggggctttgtttgatgagcactgaaaaaaatgcaaactctaatggtgtacctatattcatgctgaacgataacgatattgataacatcatacaggctatcgcatcatcggcaccacgataa

SEQ ID NO: 19881 - DNA, 192 bp, Escherichia coli; identical to SEQ ID NO: 7908

SEQ ID NO: 19882 - DNA, 423 bp, Escherichia coli; identical to SEQ ID NO: 7909

SEQ ID NO: 19883 - DNA, 165 bp, Escherichia coli; identical to SEQ ID NO: 19869

SEQ ID NO: 19884 - DNA, 453 bp, Escherichia coli
atgtcagttttgcaagtgttacatattccggacgagcggcttcgcaaagttgctaaaccggtagaagaagtgaatgcagaaattcagcgtatcgtcgatgatatgttcgagacgatgtacgcagaaaaaggtattggcctggcggcaacccaggttgatatccatcaacgtatcattgtaattgatgtttcggaaaaccgtgacgaacggctggtgttaatcaatccggagcttttagaaaaaagcggcgaaacaggcattgaagaaggttgcctgtcaatccctgaacaacgagctttagtgccacgcgcagagaaagttaaaattcgcgccctggaccgcgacggtaaaccatttgaactggaagcagacggtctgttagccatctgtattgggctccgtttgggaaacggaaaatattgtacgttaaggctattttttaatcaggtttaa

SEQ ID NO: 19885 - DNA, 318 bp, Escherichia coli
atgtacaaaatgccggcgctggtattgtgggaatcagccctgtccctggtgctggcgacattcccgttcatcttcctgctgataccctcctgtcagccagcgggggggtatccctttctgacgtattcgtcattccattcgtatcaccagtcactggtgtttgtatcgtatcgtgccggtgttgatgcgtattttcccgtgtgtctgcaccggcttaacaaaattcaacagagtctgaaggagtcgtattccgtgcaaataaccgaagcgttacttttagtgacggggttatccaatacttttctagtcagtgtttag

SEQ ID NO: 19886 - DNA, 192 bp, Escherichia coli
atggtaactctgaccattaaccgtaaaccgcagggtattttcagtaaatcaccggcaacgccgctgcaggataaaacggacacagcatacaaaatgaaggccggtgaccagataccacagttgaacgataaacagaaacctgctgataaaacaccgtggcgacatgacaaaacgccagagcaaaaaccgtaa

SEQ ID NO: 19887 - DNA, 237 bp, Escherichia coli
atgttgacctcaatgacaggtcacgacagcgtattgctgcgtgccgacgatcccctgatcgacatgaactacatcaccagcttcactggtatgaccgacaaatggttttacaagctgatcagtgaaggccatttccctaaacccatcaaactggggcgcagcagccgctggtacaaaagtgaagtggagcagtggatgcagcatcgaatcgaggcatcacgaggggcagcagcatga

SEQ ID NO: 19888 - DNA, 699 bp, Escherichia coli
atgcaggatatccggcaggaaacactgaatgaatgcacccgtgcggagcagtcggccagcgtggtgctctgggaaatcgacctgacagaggtcggtggagaacgttattttttctgtaatgagcagaacgaaaaaggtgagccggtcacctggcaggggcgacagtatcagccgtatcccattcaggggagcggttttgaactgaatggcaaaggcaccagtacgcgccccacgctggcagtctctaacctgtacggcatggtcaccgggatggcggaagacctgcagagtctggtcggcggaacggtggtcaggcgtaaggtttacgcccgttttctggatgcggtgaacttcgtcaacggaaacagcgatgccgatccggagcaggaggtgatcagccgctggcgcatcgagcagtgcagcgaactgagcgcggtaagtgcctcctttgtactgtccacgccgacggaaacggatggtgctgtttttccggggcgcatcatgctggccaacacctgtacctggacctatcgcggtgatgagtgcggttatagcggtccggctgtcgcggatgaatatgaccagccaacgtccgatatcacgaaggataaatgcagcaaatgcctgagcggttgtaagttccgcaataacgtcggcaactttggcggcttcctttccattaacaaactttcgcagtaa

SEQ ID NO: 19889 - DNA, 2562 bp, Escherichia coli
atggctgaaccggtaggcgatctggtcgttgatttgagtctggatgcggccagatttgacgagcagatggccagagtcaggcgtcatttttccggtacggaaagtgatgcgaaaaaaacagcggcagtcgttgaacagtcgctgagccgacaggcgctggctgcacagaaagcggggatttccatcgggcagtataaagccgccatgcgtatgctgcctgcacagttcaccgacgtggccacgcagcttgcaggcgggcaaagtccgtggctgatcctgctgcaacagggggggcaggtgaaggactccttcggcgggatgatccccatgttcagggggcttgccggtgcgatcaccctgccgatggtgggggccacctcgctggcggtggcgaccggtgcgctggcgtatgcctggtatcagggcaactcaaccctgtccgatttcaacaaaacgctggtcctttccggcaatcaggcgggactgacggcagatcgtatgctggtcctgtccagagccgggcaggcggcagggctgacgtttaaccagaccagcgagtcactcagcgcactggttaaggcgggggtaagcggtgaggctcagattgcgtccatcagccagagtgtggcgcgtttctcctctgcatccggcgtggaggtggacaaggtcgctgaagccttcgggaagctgaccacagacccgacgtcggggctgacggcgatggctcgccagttccataacgtgacggcggagcagattgcgtatgttgctcagttgcagcgttccggcgatgaagccggggcattgcaggcggcgaacgaggccgcaacgaaagggtttgatgaccagacccgccgcctgaaagagaacatgggcacgctggagacctgggcagacaggactgcgcgggcattcaaatccatgtgggatgcggtgctggatattggtcgtcctgataccgcgcaggagatgctgattaaggcagaggctgcgtataagaaagcagacgacatctggaatctgcgcaaggatgattattttgttaacgatgaagcgcgggcgcgttactgggatgatcgtgaaaaggcccgtcttgcgcttgaagccgcccgaaagaaggctgagcagcagactcaacaggacaaaaatgcgcagcagcagagcgataccgaagcgtcacggctgaaatataccgaagaggcgcagaaggcttacgaacggctgcagacgccgctggagaaatataccgcccgtcagaaagaactgaacaaggcactgaaagacgggaaaatcctgcaggcggattacaacacgctgatggcggcggcgaaaaaggattatgaagcgacgctgaaaaagccgaaacagtccagcgtgaaggtgtctgcgggcgatcgtcaggaagacagtgctcatgctgccctgctgacgcttcaggcagaactccggacgctggagaagcatgccggagcaaatgagaaaatcagccagcagcgccgggatttgtggaaggcggagagtcagttcgcggtactggaggaggcggcgcaacgtcgccagctgtctgcacaggagaaatccctgctggcgcataaagatgagacgctggagtacaaacgccagctggctgcacttggcgacaaggttacgtatcaggagcgcctgaacgcgctggcgcagcaggcggataaattcgcacagcagcaacgggcaaaacgggccgccattgatgcgaaaagccgggggctgactgaccggcaggcagaacgggaagccacggaacagcgcctgaaggaacagtatggcgataatccgctggcgctgaataacgtcatgtcagagcagaaaaagacctgggcggctgaagaccagcttcgcgggaactggatggcaggcctgaagtccggctggagtgagtgggaagagagcgccacggacagtatgtcgcaggtaaaaagtgcagccacgcagacctttgatggtattgcacagaatatggcggcgatgctgaccggcagtgagcagaactggcgcagcttcacccgttccgtgctgtccatgatgacagaaattctgcttaagcaggcaatggtggggattgtcgggagtatcggcagcgccattggaggtgctaccggtggcggctcatcagcgtcaggtggtgcagccattcaggccgctgcggcgaaactccattttgcgaccggaggatttacgggaaccggcggcaaatatgagccagcagggattgttcaccgtggtgagtttgtcttcacgaaggaggcaaccagccggattggcgtggggaatctttaccggctgatgcgcggctatgccaccggcggttatgtcggtacaccgggcagcatggcggacagtcggtcgcaggcgtccgggaagtttgagcagaataaccatgtggtgattaacaacgacggcacgaacggtcagatagggccacaggcgctgaaggcggtttatgacgtagcccgtaaggcggcaatggatgttgtgaccgggcagatgcgtgatggtggcctgttctccggaggtggacgatga

SEQ ID NO: 19890 - DNA, 129 bp, Escherichia coli
atgcctgcaataccattgacgggtaatgaagaagcgctggattacaccctcagaattgtgagaaacggaaaaaaacttgaagccggaaattattttgccgtgctgggattccgggtcgattatgagtga

SEQ ID NO: 19891 - DNA, 390 bp, Escherichia coli
atgtcaaagtcagcggcgggtacgataagtcagccgggtcgcaatgtccgggcaaaatcaggtttaaaccgttcgatactggatcagggctggtatgaaatgcgccgccagcttgagtataagcagctctggcatggcggtcaggtactggcagtgccgccagcgtacacaagccagcgttgcgcgtgctgtggtcataccgcgaaagaaaatcgcctgtcacaaagtaaattcagatgccaggtatgtggatatacagcgaacgccgatgtaaacggcgctcgtaacattttagcggcggggcacgccgtgcttgcctgtggagggatggtgcagtcagaccgcccgttgaagcaggaaccctccgaaatgattcaggcgacagcctga

SEQ ID NO: 19892 - DNA, 363 bp, Escherichia coli
atgatgagcaatgcctcggaactgcgtgggctacatggcgatctgcatcatgaaaacatcatgttctccagtcgcggctggctggtgatagatcccgtcggtctggtcggtgaagtgggctttggcgccgccaatatgttctacgatccggctgacagagacgacctttgtctcgatcctagacgcattgcacagatggcggacgcattctctcgtgcgctggacgtcgatccgcgtcgcctgctcgaccaggcgtacgcttatgggtgcctttccgcagcttggaacgcggatggagaagaggagcaacgcgatctagctatcgcggccgcgatcaagcaggtgcgacagacgtcatactag

SEQ ID NO: 19893 - DNA, 2886 bp, Escherichia coli
atgccgcgtcgcgtcactctaaccgatcggcagaaagacgcgctgttgcgcttgccgacttcacagacggatttgctcaagcactatacgctgagtgatgaagaccttgggcatatcaggctgcgtcggcgcgctcacaacaggttcggcttcgccctgcaattgtgtgtcctgcgctatcccggccgggtgctggctccaggcgaactgatccctgcagaggtcatcgaatttatcggagcgcagcttggcctgggtgccgacgatctcgtagactatgctgcccgcgaggaaacacggcacgagcatcttgccgagttacgggggctctacggcttccgcaccttctccggacgtggtgcgagcgagctgaaggaatggttgttccgagaagccgagatggcggtgtcgaacgaggatatcgcccgtcgcttcgtagccgagtgccgacgcacccgcactgtccttcccgcgacatccacgatcgagcggctttgtgccgcggctctcgtcgatgccgagcgacgcatcgagacgaggatcgccagtcggctgcctatgtcgatccgagaacagttgctggcattgctcgaggagacggctgatgatcgggtgacccgttttgtgtggctgcgccagttcgagcctggctcgaactcttcgtcggccaaccggctgctcgaccggctcgaatatctgcaacgcatcgatctccccgaggatctgcttgccggcgttcctgcccatcgggtgactcgtctgcgcaggcagggtgaacggtattatgccgacggcatgcgcgatctcccggaggacaggcggcttgcgatcttggctgtttgcgtctcggaatggcaggcgatgttggccgacgcagtggtcgaaacccacgaccggatcgtcggccgtctctaccgtgcttcggagcgtatttgccatgcaaaggtcgcagacgaagcgggggtggtgcgtgacaccctgaaatccttcgccgagatcgggggcgccctggtcgatgcacaggatgatggccagccgctgggcgatgtcatcgcgagtgggtcagggtgggacggcttaaaaacccttgttgcaatggcaaccaggctgaccgccaccatggccgacgatccgctcaatcatgtgctcgacggttatcaccgcttccgccgatacgctccacgcatgttgcgcctgctcgatctgcgagctgcgcccgttgcactgccgcttctggaagcggtgacggcccttcgtaccggtttgaacgatgccgcgatgaccagcttcttgcggcccagctcgaaatggcatcgccaccttcgggcccagagggctggcgacgctcgcctatgggagatcgcggtgctgttccatctgcgcgatgcgttccgctccggagatgtctggcttactaggtcccggcgctatggcgatctgaaacacgcactcgttccggcacaatccatcgcggaaggcggtcgtctcgctgtgccattgcggccggaggaatggctggcagaccggcaagctcgcctcgacatgcggttgcgcgagcttggccgtgccgctcgcgcaggcacgatcccgggcgggtcgattgaaaacggcgttctgcatatcgagaaactcgaagccgccgcgccgacaggcgccgaagatctggtgctcgatctctacaagcagatcccgcccacgcgcatcaccgatctcctgctggaggtggatgcggcgaccggcttcaccgaagcgttcacccatctgcgcacaggagcaccctgcgctgaccggatcgggctaatgaacgttatcttggcggaagggatcaacctcggcttgcgcaaaatggcggatgcgacaaacacccacaccttctgggaattgatccgcattggacggtggcatgtcgagggcgaagcctatgaccgggcgctggccatggtggtcgaggcacaggcagcgttacccatggcccggttctggggcatgggcacgtcggcttcgagcgacggacagttcttcgtcgctacagagcaaggtgaggccatgaacctggtcaacgcgaaatatggcaataccccgggcctgaaagcctatagccacgtctccgaccaatatgcgccgttcgcaacccaggtgattcctgcaacggcaagcgaagcgccttacatcctcgatggcctgctgatgaacgatgctggacgccatatccgcgagcagttcaccgacacgggcggcttcaccgatcacgtctttgccgcatgtgccattctcggctaccggttcgctccgcgcatccgcgacctgccatccaaacggctctacgcgttcaatccgtcggccgccccggcgcacctgcgagcgttgatcggcggaaaggtcaaccaagccatgatcgagcgcaattggcccgacatcctgcgcatcgccgccaccattgctgccgggaccgtcgcgccaagccagattctgcggaaactcgcctcctatccgcggcagaacgagctcgcgacagccctgcgggaagtcggtcgcgtcgagcgcaccctgttcatgatcgactggattctggatgccgaactccaacggcgtgcccagatcgggctcaacaaaggcgaagctcatcatgcgctgaagcgggcaatcagcttccaccgccgcggtgaaatccgcgaccgttccgccgaaggccagcattaccgcatcgccggcatgaatctgctcgccgccatcatcatcttctggaacaccatgaagctcggcgaggtcgttgcaaaccagaaacgcgatggaaagctgctatcgcccgatctcttggcccatgtttcgccgctcggatgggaacacatcaatctcaccggagaatatcgttggccaaagccttag

SEQ ID NO: 19894 - DNA, 276 bp, Escherichia coli
atgtcattaaagcatagtgatgaatttaagcgtgatgcagttcgcatagcactcactagtggcttaacacgccgtcaagttgcgtcagatttaagtattgggctttccacgcttgggaaatggatcgcatcaatttccgatgaaactaaaattcctacccaagacactgatcttctgcgtgagaatgaacgtttacgcaaagagaaccgtatccttcgggaggagagggagatattaaaaaaggcagcaatatttttcgcagtacaaaagctgtga

SEQ ID NO: 19895 - DNA, 660 bp, Escherichia coli
atgacagaagagttgaaagcgctgggcctgcaggttgggcagcgtcgggttggacgtttgatgcgccagaataacattacagttgttcgaacgcgtaaattcaaacggacaacggatagtcatcataccttcaacattgcaccgaacctattaaaacaagactttagcgcaagcgcacccaaccagaaatgggcaggcgatatcacttatgtttggaccagagaaggatgggtctatcttgctgttatccttgacctgtattcccgtcgcgtgattggctgggcaacaggtgatcgattaaagcaggatcttgcattaagggcactgaatatggcgttggctttacgcaaaccaccaccgggttgtattcaacacacagaccgtgggagccaatattgcgctcatgaatatcaaaagctactgctcaaacatcaattgctgccgtccatgagcgggaaaggcaattgttttgataactccgcagtagaaagcttctttaaatcattaaaggctgagttgatttggcgcagacactggcaaacaaggcgagatattgagattgcaatcttcgaatatataaatggcttttataatccacgccgaagacattcaacactcggctctgatgaatcccctaatgattttggtaaaaatcattaa

SEQ ID NO: 19896 - DNA, 393 bp, Escherichia coli
atgctgctggagcaggtggaacaatttgaaaatatcgttggcttcttctgggtgattgaatggacggctgatcatggttttcatgcgcatgcggttttctggatcgatcgtcagagggttaaaaaaatatatccctttgcggagcggattacggaatgctggcggtctattacgcataacagcggttcggcacaccgctgcacatatcagccgcattatacatacaacatcaacattcctgtgcgccacaacgatcctgaaagcatcgataatattcgcggtgccctgcattatctggcgaaagaagagcaaaaagacgggctgtgtgcttacggctgcaatgaagttcctgaacgtcctgctgcagggcgtcctcgtaagcctcacttctga

SEQ ID NO: 19897 - DNA, 132 bp, Escherichia coli
atgcctaaatcttacacaccaaactggttttttaccgctttacttgacaatcacatcaatcaaatgatggcacgctattcctgcctgcgggccttacgcatggatttcttctacaggaaaagatacgcctga

SEQ ID NO: 19898 - DNA, 1437 bp, Escherichia coli
atgagtactcttgatgttcagaagctcaaggatgatgccgtcgaatgggccttaactcatggtgttgctttcaaggaatcgtcgtattccgcagtgcataccccgtttaccctgacaccaacacctatcagccgtaaatcctatcagtacttaaagaatgcaacaggaatactcagcaaattaatctattcagtttctgaggatcatgattttttgtactctgcgatttatcccatcaaggccgggaatgccttcttttcagccctcctgaacatgcatcaacaaatccattcatcatcaaggcatgctcctcgattaccattactcattatgcgtagcgactttatggatgataatcgtgatgggttcaggcttatagagttcaatggtatagctgcaggaatggggccgtttggtcagcggatacatgatctgcatcactatctacaacggcaatgtcccgctgtcttttctgatttatcgaatcaggcaacaggggcgcttgtcgacaatcaagcgatcgaagggttatcagcagcgatttgtcaggcaacttgcagaattaagcaggagttcggagaccccggccctgccaggttcctgatgattgtgcaggagaatgaaaataatgtgtttgatcaacacttgcttgagctcgccctccagcaaaaaggaatcgaaacgcatcgcaggacttttcgtgaactgcataatcaattgagtacaggcgccgacaacaggctcattctcgagggtgtaggcccacttgataccgtctacttacgtgccggatatcagtattctgattatgaagcattcaatatcgatgagcaggagtgttgtcaggcgctgatggcgacccgagtattcattgagcagcaccgggttgcagtgaacgccacagttggccagcaactggcgaccagcaagcgagtacaaatgctgctctcgcaattgggttacgacgagtttgtcgcatttggattaacactgcaggaagctaaaatagcaaaaacgatactgggtgagatgttacccatcagcccggatagtatcaaccttgcaaaagagtctccttcggaaacctgggttctcaaaaatcagggtgaaggcggggggcattgtctgtttggtgcggatatcctgacaaaactgacggaactcactccacaacaatatcagtcctggtcgctgatgcgccgtttacaccctcagccccgagctatgcccaccttgattgtgcgtaaaggggagttgcataaggtgaatgatttgataagcgaacttggaatgttctccgtgcagacagataacaatccctccagtgctgagcacagttttgctggatatctaattcgtagcaaatcagctgaatcgacagagggaggggtccatagtggacaaggtgttttagactcgctggtatacagcgattag

SEQ ID NO: 19899 - DNA, 492 bp, Escherichia coli
atgaagccacgaaatattaataatagcctaccactgcaaccattagttcctgatcaggagaacaaaaataagaaaaatgaagagaaatacgtgaatccagttaaaattacgatgaggtctggtttaaattatattgaacaagaatctcttggaggaaaatatctaacacatgatttgtcaataaagatagcggatatttctgaagaaataattcagcaagcaatattatcggctatgagcatatataaatttccgataacagatgatttaatgagtatggctacaaatgaactcataaaactggccaaaatagagaataatttagacctgaataaattctctactatatgcaccgacgttctatcccccctcgtcaccagacataataaagaaaaaaaaccagacgatttactacccttcgcaaaaatcccctttttaattttcatcgaaaaaatggaaattgataatatgaatcaaggtcatgcatattaa

SEQ ID NO: 19900 - DNA, 531 bp, Escherichia coli
atgaagctaacagaagaaagtctgaatctagtcattgacatcctgaatgatttgatctgtgaaggaaaaatgctgaacgatgtggagcgcagatctctgctcaatgcagttatggcaattacagcggtaaaagaacgttctgtcgtatctgtatcatcccgaaaagagcaaagtaagaaggagaagaaggaaagagagatcgatcctcgtttcccaaatgctggtgtggcatggaatgaggcagacgagagtttattgcgagatgttctggaggatgtaccggacgatgaaattggtaaacaccttttctggctggcagagaaactagggcgaaccccgtacagtgtagcctgtaaagtcagacaaattaagaaattacctgcagaatggaaggatcaatttcgtaaaatctctgacaggatccgtagttctggaatgtcagtcagtgaatatctacaacgccagggactgttaagcccagagtcaggggaagaaaacaatcctgtcagtcataacaacaatgtagcttaa

SEQ ID NO: 19901 - DNA, 750 bp, Escherichia coli
atgggtaaaagcggggccggtaaatcctcactctgtaatgcgctgtttcagggggaggtcacaccggtcagtgatgttcacgccggcacccgggaagtgaagcgtttccgtctgagtggacacggtcacagcatggttatcactgacctgcccggggtgggcgagagccgggagcgggatgcagagtatgaagctctgtaccgtgacattctgcccgaactggacctggtactgtggctgattaaaaccgatgaccgtgccctgtctgtggatgagtatttctggcgacacatcctgcaccggggacatcagcgggtactgtttgtggtgacgcaggccgacaaaacggagccctgccatgaatgggatatggccggtattcagccttctcccgcacaggcacagaacattcgcgaaaaaacggaggcggtattccgtctgttccggcccgtacatccggttgtggccgtatcggcccgcaccggctgggaactggatacgctggtcagtgcgctcatgacagcgcttcccgaccatgccgccagtcccctgatgacccgcctgcaggacgagctgcgcacggaatctgtccgcgctcaggcccgtgaacagtttaccggtgcggtggaccggatatttgacacggcggagagcgtctgtattgcctctgttgcatgcacggttctgcgtgccgtccgtgacacggtggtctctgttgcccgcgctgtatggaactggattttcttctga

SEQ ID NO: 19902 - DNA, 372 bp, Escherichia coli
atgtatcccaaactggcaaaggcctaccccaccaataaattaccggatttacggggagaatttattcgcggctgggatgatgggcgcggggtggatgcgggacgtgctttattgagcattcagacaggaatgctggaaaagcaccgacatattgttgtagccaatgatggttacgacacaaaagatgaatgggagctggcgacaattttcaaaaaaacatacacacaaggacgggggcttgatgcctcaaatacaggagggaatttgattccattaccgacacttcattctcgagggagtattggtaatactggcgggagtgaaacccgtccacgaaatatcgcatttaattacatcgtaagggcggcataa

SEQ ID NO: 19903 - DNA, 324 bp, Escherichia coli
atgtatcccaaactggcaaaggcctaccccaccaataaattaccggatttacgcggtgaatttatccgtggctgggatgatgggcgcgggattgatgcgggacgtaccctgctttcagggcaggatggtacaagtttttctcattacggaggtaatttcgacattgggtctggtcatgcaatcaataactatgaccaaattgtttctaaccaaccaggatttttccgtttttcatttgcagggccttcacgaggtgatggggttaattatgtaaccattcgtcctcgtaacattgcgtttaattatatcgtaagggcggcatga

SEQ ID NO: 19904 - DNA, 396 bp, Escherichia coli
atgaaacatactgaactccgtgcagccgtactggatgcactggagaagcatgacaccggggcgacgttttttgatggtcgccccgctgtttttgatgaggcggattttccggcagttgccgtttatctcaccggcgctgaatacacgggcgaagagctggacagcgatacctggcaggcggagctgcatattgaagttttcctgcctgctcaggtgccggattcagagctggatgcgtggatggagtcccggatttatccggtgatgagcgatatcccggcactgtcagatttgatcaccagtatggtggccagcggctatgactaccggcgcgacgatgatgcgggcttgtggagttcagccgatctgacttatgtcattacctatgaaatgtga

SEQ ID NO: 19905 - DNA, 246 bp, Escherichia coli
gtgcttgtggtgggaaaccgtcgtattcccggcgcgtttattcagcaactgaaaaatggccggtggcatgtcatgcagcgtgtggccgggaaaaaccgttaccccattgatgtggtgaaaattccgatggcggtgccgctgaccacggcgtttaaacagaatattgagcggatacggcgtgagcgtcttccgaaagagctgggctatgcgctgcagcatcaactgaggatggtaataaagcgatga

SEQ ID NO: 19906 - DNA, 804 bp, Escherichia coli
ttgaatcgaactaatattttttttggtgaatcgcattctgactggttgcctgtcagaggcggagaatctggtgattttgtttttcgacgtggtgacgggcatgccttcgcgaaaatcgcacctgcttcccgccgcggtgagctcgctggagagcgtgaccgcctcatttggctcaaaggtcgaggtgtggcttgccccgaggtgatcaactggcaggaggaacaggagggtgcatgcttggtgataacggcaattccgggagtaccggcggctgatctgtctggagcggatttgctcaaagcgtggccgtcaatggggcagcaacttggcgctgttcacagcctatcggttgatcaatgtccgtttgagcgcaggctgtcgcgaatgttcggacgcgccgttgatgtggtgtcccgcaatgccgtcaatcccgacttcttaccggacgaggacaagagtacgccgcagctcgatcttttggctcgtgtcgaacgagagctaccggtgcggctcgaccaagagcgcaccgatatggttgtttgccatggtgatccctgcatgccgaacttcatggtggaccctaaaactcttcaatgcacgggtctgatcgaccttgggcggctcggaacagcagatcgctatgccgatttggcactcatgattgctaacgccgaagagaactgggcagcgccagatgaagcagagcgcgccttcgctgtcctattcaatgtattggggatcgaagcccccgaccgcgaacgccttgccttctatctgcgattggaccctctgacttggggttga

SEQ ID NO: 19907 - DNA, 234 bp, Escherichia coli; identical to SEQ ID NO: 14842

SEQ ID NO: 19908 - DNA, 396 bp, Escherichia coli; identical to SEQ ID NO: 19904

SEQ ID NO: 19909 - DNA, 174 bp, Escherichia coli
atgcagcgtgtggccgggaaaaatcgttaccccattgatgtggtgaaaatcccgatggcggtgccgctgaccacggcgtttaaacagaatattgagcggatacggcgtgagcgtcttccgaaagagctgggctatgcgctgcagcatcaactgaggatggtaataaagcgatga

SEQ ID NO: 19910 - DNA, 867 bp, Escherichia coli
atgaagtatgtctttattgaaaaacatcaggctgagttcagcatcaaagcaatgtgccgcgtgctccgggtggcccgcagcggctggtatacgtggtgtcagcggcggacaaggataagcacgcgtcagcagttccgccaacactgcgacagcgttgtcctcgcggcttttacccggtcaaaacagcgttacggtgccccacgcctgacggatgaactgcgtgatcagggttacccctttaacgtaaaaaccgtggcggcaagcctgcgccgtcagggactgagggcaaaggcctcccggaagttcagcccggtcagctaccgcgcacacggcctgcctgtgtcagaaaatctgttggagcaggatttttacgccagtggcccgaaccagaagtgggcaggagacatcacgtacttacgtacagatgaaggctggctgtatctggcagtggtcattgacctgtggtcacgtgccgttattggctggtcaatgtcgccacgcatgacggcgcaactggcctgcgatgccctgcagatggcgctgtggcggcgtaagaggccccggaacgttatcgttcacacggaccgtggaggccagtactgttcagcagattatcaggcgcaactgaagcggcataatctgcgtggaagtatgagcgcaaaaggttgctgctacgataatgcctgcgtggaaagcttctttcattcgctgaaagtggaatgtatccatggagaacactttatcagccgggaaataatgcgggcaacggtgtttaattatatcgaatgtgattacaatcggtggcggcggcacagttggtgtggcggcctcagtccggaacaatttgaaaaccagaacctcgcttag

SEQ ID NO: 19911 - DNA, 603 bp, Escherichia coli
atgaccggtgaagccttcgatccggttgaggtggatatgggccgcagtgaggagaataacatcacgcagtccggcggcacggagtggagcaagcgtgacaagtccacgtatgacccgaccgacgatatcgaagcctacgcgctgaacgccagcggtgtggtgaatatcatcgtgttcgatccgaaaggctgggcgctgttccgttccttcaaagccgtcaaggagaagctggatacccgtcgtggctctaattccgagctggagacagcggtgaaagacctgggcaaagcggtgtcctataaggggatgtatggcgatgtggccatcgtcgtgtattccggacagtacgtggaaaacggcgtcaaaaagaacttcctgccggacaacacgatggtgctggggaacactcaggcacgcggtctgcgcacctatggctgcattcaggatgcggacgcacagcgcgaaggcattaacgcctctgcccgttacccgaaaaactgggtgaccaccggcgatccggcgcgtgagttcaccatgattcagtcagcaccgctgatgctgctggctgaccctgatgcgttcgtgtccgtacaactggcgtaa

SEQ ID NO: 19912 - DNA, 603 bp, Escherichia coli
atgaccggtgaagccttcgatccggttgaggtggatatgggccgcagtgaggagaataacatcacgcagtccggcggcacggagtggagcaagcgtgacaagtccacgtatgacccgaccgacgatatcgaagcctacgcgctgaacgccagcggtgtggtgaatatcatcgtgttcgatccgaaaggctgggcgctgttccgttccttcaaagccgtcaaggagaagctggatacccgtcgtggctctaattccgagctggagacagcggtaaaagacctgggcaaagcggtgtcctataaggggatgtatggcgatacggcgatcgtcgtgtattccggacagtacgtggaaaacgacgtcaaaaagaacttcctgccggacaacacgatggtgctggggaacactcaggcacgcggtctgcgcacctatggctgcattcaggatgcggacgcacagcgcgaaggtattaacgcctctgcccgctacccgaaaaactgggtgaccaccggcgatccggcgcgtgagttcaccatgattcagtcagcaccgctgatgctgctggctgaccctgatgcgttcgtgtccgtacaactggcgtaa

SEQ ID NO: 19913 - DNA, 603 bp, Escherichia coli; identical to SEQ ID NO: 19911

SEQ ID NO: 19914 - DNA, 213 bp, Escherichia coli
atgcagctccgcctgccaggtatcgctgtccagctcttcgcccgtgtattcagcgccggtgagataaacggcaactgccggaaaatccgcctcatcaaaaacagcggggcgaccatcaaaaaacgtcgccccggtgtcatgcttctccagtgcatccagtacggctgcacggagttcagtatgtttcatcgctttattaccatcctcagttga

SEQ ID NO: 19915 - DNA, 330 bp, Escherichia coli
gtgaatattcgttatgaagccttcccctcagaaaaatttgggcagttctctgctacggttaaaactatatccaggactcctgcgtcaacacaggaaatgttgacctataagggcgcacctcaaaatacgccgggtgcctctgttccctggtataaagtcattgcgacgcctgaaaagcagataatcaggtatgacgaaaaatacctccctctggaaaatggaatgaaagccgaaagtacactatttctggaaaaaaggcgtatttaccagtggatgctttctcctttctatgacatgaaacacagtgcaacaggaccgatcaatgactaa

SEQ ID NO: 19916 - DNA, 129 bp, Escherichia coli
atgatgagtatcttcatcatgaccctttccttatttaaggccccttcctcgggaggggctttcccgtttcagcgtcccgctaaaatcgtcggcttacctcctttcgccctgaatgcagtctatcgctaa

SEQ ID NO: 19917 - DNA, 222 bp, Escherichia coli
atgaaaatcatcacccgtggtgaagccatgcgtattcaccaacaacatccggcatcccgtctttttccgttctgtaccggcaaataccgctggcacggcagtgctgaagcgtataccggtcgtgaagtgcaggatattcccggtgtgctggccgtgtttgctgaacgccgtaaggacagttttggtccgtatgtccggctgatgagcgtcaccctgaactga

SEQ ID NO: 19918 - DNA, 285 bp, Escherichia coli
atgcctaaactagtcacttggatgaacaaccagcgggtaggcgagttaacgaagttagccaacggcgcgcacacctttaagtatgcacctgagtggttagccagccgttatgccagaccgttgtcactttcgctgccattgcagagggggaatatcacctctgatgccgtatttaacttcttcgataacctgttacccgatagcccgattgtacgtgaccggatcgttaaacgttatcatgctaaatccagacaaccgtttgatttattgtcagaaatagggtga

SEQ ID NO: 19919 - DNA, 519 bp, Escherichia coli
gtgacgttaatccccgaagatgaaaccgtaatgtgtccgataatggcatgggaaaagcttactgaagccagacttgaagaagtattaacggcttataaagcagatatcccgttaggcatgattagagaagaaaatgactttcgcatctcggttgctggcgcacaggagaagactgcgctgctcagaataggcaatgactggtgcattccgaagggaataacgccaacgacgcacattatcaaattgccgattggcgaaatcagacagcccaatgcgacgctcgatcttagccaaagcgttgataatgagtattactgtttgctgctggcgaaagaactcgggttgaatgttccggacgcagaaatcattaaagcgggaagggtgcgcgcgttagcggtcgaacgttttgacaggcagacttcattaccgacagattttccggagaacgtggtgacggcagttgaaaccaatgtgttgaggttgcacggtcggttaagccgagaatacggtattaagtaa

SEQ ID NO: 19920 - DNA, 207 bp, Escherichia coli
atgtgtcgcggtctgtttatcgaattaaatgcagatataaaaaaaccaaccgcaattggttggttttcttgggatttttggtcggcacgagaggatttgaacctccgacccccgacaccccatgacgccgcttgtaaaacgctgagagccgcaccatttctgggcttagttatcattcgcatgtataaacaaacagtgcttttttga

SEQ ID NO: 19921 - DNA, 720 bp, Escherichia coli
atggaagatttagtatgtagttggtcaccgaaactaatcgttgaactgataaaaagcattgcatggccagttgttgttcttatcatcggattcagattccgaactcgaatttttgaagttgtcagttcttttttttctaaaaatacgctatcagaaatatccgcgactttatcgggtatatcggcaaaattcatagcagagaaacaaacagcagaagtattagaatcttcaaattctaatttggcgagcttacaaaagaatacgagcattgaagctataagaatacaccatgaacaatttaaaactgaattcagtgaagaattatatcaaatcatattgaaacaagcatctgatctagatactgacaatgaaattaaaattgatttattggcacgagaaatatctcttttgcaaagtgctgtaagatactttgaaataaacaaggtattattccgctcacaatatgacttattttatacaattgctagcaatggtggttatatccgcaaagaagatgctattcagttctttgaaaaaacaaaaaatcataataaagaagctttcgcggattgggattggatcaaatatatttcgtatccagtaagcaataaactcatttatgaaagtgatgctggttacaaactcactacgataggaagctcatatgtagcttttatgtcaaagaacccacaattgattgacgagcttgctaaattataa

SEQ ID NO: 19922 - DNA, 1179 bp, Escherichia coli
atggcggcaaggccacgtaaaaaagaatacagacatcttcctgattatctgatttttgataaagatcgaggtgtttataaattcacacttattactggaaagaagaaaaatataggtaaggatagggcaatagccattgcaatcgccagagagtacaacctgaggatgagagcagaattatctccatcagtagaaaatcttattagagaatctggcggtgttatcggagaagcaaaaccatttgctgaacatgttgatcacataatgacccggattatcgaagacgaacgtccttcccagagcaccttagatgactggaaaaatgacgctctacgcgtaaaagcgtttttcgtaaatgttccggcatgcgatatcgaacttgaacacgttaatacctacatcaacaaatatcatgccagcgcatccgcaaatgtgcagaacagaaaggtcagctttcttaaaaagttgttctcttatgcggtcgatgaatcactaatgctggataacccggccatcagaaaaaaaatgcgtaggactgatgagaagaaaagacggcgcctgtcactcgagcattttatagctatcaggcaggccgctgcaccatggttaagaacagcaatggacctagcattgcaaactacacatgcacgactcgaagtatcgcgaatccgttactcaattcgcgaacctaaagacggtatatgtggatgtgtctggttcgaacaaccacaaaatggcatatatgggacgctttacatccacaggcaaaaagtgcaaaaaaaagaggcgtcacacgttgcaataccaattggtgaagagttgaaacggataattgacgatagccgagataatgtggctagtccgtttgtcgttcacagaatcccagaacgccaagttaaacgaagcaaagaggtttcacatccgacacaagttgcaccagactatttgagtcgatcgttttcagcaacgcgagacaagctaggtttatgcgacaatctaccgatggatgaaagaccaacctttcatgaaatcagagctctggcagcgcatcttttcgatcagcagggtatcgatccccaaggacgaatggcacatagcgacgctcagtcgactaagatttacactcaaaaccacattaattggattgtcgttccacacggggaaatcaaaactggttaa

SEQ ID NO: 19923 - DNA, 255 bp, Escherichia coli
ttgatattactgcccgagtgcagcgggctaagtggagaaacagccatggcaaaactaatgaaagcgagccaatggggacgccgtgaattctctaatggctcaattcctgacaaccgaacgataaaacgttgggtcgagaacggtctactcatgggacgcatcgtggacggttctgtttttgtctgcgaaacagaaaaatggggagtcgactcaatggttagtcaagctgttcgcaagttaataaacgaggggtga

SEQ ID NO: 19924 - DNA, 480 bp, Escherichia coli
atgactcgagacgatctagcattcgatattcattattctttctttcttgagaaaatgaattacacccttttaaatcggatagacaagagcataactcttgttctcattgtcttgggcttttctgtttttgcgccatatagcaatatgtttatttttggcgcatctgtagctattttgtcggtgcttcaattggtataccaatttgggcaggaagctggcttatcaaaggaacagatgcgacagtataaaaggttgattgttgagttttcctccctttctgatgacgaactacgcactcggtttttaaaggttcaagacgctgatagtaatccatggagatctttacaagatgctgcgttcaaacggacctgtattgcgctgggacgtgttgatgagtcagaaatatcattcatgcatagcgttatcgcatggtttgctggagatttgcctcggtcaaaaaggtgtaataatgacaaatag

SEQ ID NO: 19925 - DNA, 849 bp, Escherichia coli
atgtcaaataggatatttgatgcactataccgtgagaaaatagatatttttaaaaattctttttccgcaacttcaactgaagttttttatgatcctgaaaacaatcgtcttattcatgctggtgaatatggaatatatcgtgagtcggtagtaagggattttttgaactttatagttcctcagcgacttgctatatctaatggttttttaatgtccgcgatggatgacattagcacgcagtgtgatgttgttatttttgattctaaaatgacaccactttttcaaggtggagataaacataggtttttcccaattgaatctgtttactgcattggtgaggttaagtcaaatttatctcgcgctgcttttcgagacgccattaacaaactggcgaaaaataaagcaatcgccgagagaataaaaaacccttcattaagttttaactctagcagttttaactttgatccggaaaacaacccttttcatgtttattctagcatattgatctgtaagaagcttgattttgatataagcaatatagaaaatgaactagataatctttactctgatgaaatacaatttaggcataggcataacctaatccttagtatcgaagatgggcttcttgcctattcagccccggatggagtgaaacttccattcccgatgcttcgccagcaaaactttaaaagttgcttcttgactccaaaagatgatgaatatttccacatgaagtttttcggtacatttatgtttatgttaacctctggtaaaatttccttatatcctgagttctccgattatatttcaccagttcaaaatggtggaagtgctagggttcaactatga

SEQ ID NO: 19926 - DNA, 222 bp, Escherichia coli
atggggttttattacgtttaccagcataaagaagaaggtttggaagttgagaagcatcttgttgtttcagaagagtatcttgatagagatagcgctaaaatggcaaggtttaagcatagactcaatgataggggatgtgtattctcagaaattattgaagccccatcaccgcaagaagtgcttcaaaaggtacagccggaattgatgagccactggatataa

SEQ ID NO: 19927 - DNA, 282 bp, Escherichia coli
gtggtactaaatgacccatcggcaactatcaatgcgttactctgcgctggggtagtgctgaccctgatgttttaccgtcgcggcgattcgcgacatcgaccgtggatatctcgcttagcttggctgcttacggtcatttatagcgccgtaccgctggcgtatctgtgcggtatctacccttattcatcttgggccactatcggggccaacattattttcctgtctgtgcttgtcgccgtcagaggcaacgtagcgcggctggttgatcatctgaggcactaa

SEQ ID NO: 19928 - DNA, 543 bp, Escherichia coli
atgactaaagacgatatcttcaatgccatccttggcaaagagggcggctatgttaaccatcccgacgataaaggcggcccaacgaattggggtatcactcaggcaacggcgcgggcacatgggtatgtaggagatatgcgcgatctcacccgccagcaggcgctggatattctgacggctgactactggacaggcccgcgattcgaccttatttctgaggtgtcaccagccatcgccgctgaactctgcgacacgggcgtaaacatggggccatcggttcagaccaagtggtttcagcgctggctgaacgtgttcaacattcagggcacgctctatcccgaactgattgcggatggttttataggtccgcgaactgttagtgcgctaaaaagttacctatctcgacgcgggaaagaaggagagctggtaatgctccgggctctgaattgcagccagggtcaacgttatcttgaactggcagaacagcgcagcgcgaacgagacgtttgtttatggctgggtaaaggagcgggtggttatatga

SEQ ID NO: 19929 - DNA, 270 bp, Escherichia coli
atgacgcttgagatgattatcggactccttgcagctgttttagctgctatagccgccgcatttggattaggccattcgcgcggcaccagcaaagccgaagcgaaagccaaccagcaacgcaccgaagaaaaggccgctgccactgaagcagtggctgaacgccgggtagagacaacaaaaggagccaggggtgtacagcagactgttaatcatcttcctgatgacgatgttgaccgtgagttgcgcgaaaactttacccgcaaaacctga

SEQ ID NO: 19930 - DNA, 252 bp, Escherichia coli
atgtctgataactttgatttcgatgatgaacgtaaacagcttgagcacttgagtgatgaagagttggagcaggtagctagggattacgatcttcttcctgaaggggtatctcttgaagataagtctgtagaatttgttgatggccttataggtgagattatagaggctaaggcttaccatgattcacaagatgcagaatggaacgaacaacaagatatcatggaagagcaaaggcgtgatgcagactactga

SEQ ID NO: 19931 - DNA, 387 bp, Escherichia coli
atggatttagtaacagttactacaaaagagcaactaaagaaagcgaaagaagataaggtagatgtcatcgttgtagaaggcgagcttgctgaaaagctgaagcgaagtaagaaagttgctattgcagctgcaggggttagcggtgtcgctctgacaggtttgattgctgcaattgctgctgcacctgctacaggtggcacctcatttttgctctatgctggtgtcgcaggaacatctgctgcgacctttactggaattgaaattgcctcaataatcctggcaggttcaattgggattactcttctcgtggggatttttaaagattatgaagaaattgaagcgtctacatctggtggaataaaattaaaacgaaaacaaaaagattag

SEQ ID NO: 19932 - DNA, 378 bp, Escherichia coli
atgggtctgttacatgccattataggtaatgccggtgaaattaatgcatcagatgcacaacaggaattaggggctgttttaggtgagggagaaaatgtcgaacttgcctataaactcattcgtgaccaaattattctgactaacagaaggttaatttttattgataagcagggtgtcacagggaaaaaagtcgagtatcgttcgattccatataaatctgtgacaaacttttctattgaaaccgccgggcatcttgatcttgatgctgaaatgaagatatggatttctggtattgcagaaccgataaaaaaacagttcagtaaaggagcaaacatttataaattgcaggcccatctggctcaaaaaatagcagggtaa

SEQ ID NO: 19933 - DNA, 1890 bp, Escherichia coli
atgaaatccgagacgctaactgtccaacaactttttcaagaccgccgacaatactgtgttccattctatcaacgtgcctatgtatggactcagcaagaccaatggtcagctctactggaggatatcctagagaaagcacaatcccggctctcgggtacaaaaccaactccccatttccttggtgcggttgtactggaacctcaatcaaaaaaaggattattaggtgtagattccatacatattattgatggtcagcaacgattggccactcttcaatatgttctggcatccatccgattagcattacgtgctacggatcttttcagcttagaggctctcatttcgccttgcctgaaaaactcaaacgaagacacaatgcgaaataaagaagtagaacgcttcaaactatggccaacttttcgggatcaaactcattttattcaaagttttaatgttgaaaatattgatgatctccgggacgtattctctgatagtttcacgcagcatggtacgttgcgtaagcattttaatcacccgccatcactagaagcattatgtttttttactgaagcctttataaaatggattaaaatagaaaaccactcaccacaagaaaatgctgtagctctaattgaggctgtcttaacagatctgaaactggtaagcatatttctcgaagctgaagatgatgcccaaataatttttgaaacattaaatgggcgaggggcggaacttcatgccacggatcttattcgcaactatatctttatgtgcgctgagcatgaaaatattaatgctattgaattatatgaaaatgagtggaagagctttgaagataaatactggtcggaaaagcaacgccgtggacgtattaataaaccacgcatggagtggctagtacatgcgacattgcaatcagaaaggcagcgtgaaattgatctgtctcgcctttacaatgagtatcgtgattatgtaagtaaggacttgtcttcacaacgagcagatctgcaagtaaagcgtctcaaacaatatgcattacaatataaagaactggttgatggttttggcacaacccccatctcacactttggatatcgcatcgcagactatgatgtgacgacactttatccgcttgctttgttcatttcgatagctaacatcgctgatgatgagaaagcagccatgtataatgatcttgtctcctacgtagtacgaagagccgtatgtggcctgacgccaaagaattacaacaatgtatttatgaatgtattgcggcacttggctaaaacggaaatttccagtgttgagttacgtaatatcctcaataacttaaatggcgaagcctcacgttggcctggtgactcagaatttctcaacgcttgcatcaatgctccactttatcctggcaggctcgacgcaccgaaaatgcgctcaatgttaacggaacttgaaagagaactttgtcgccaagtgaagacagaaaagcctgatgttccaaatctttctaatctcgatatcgatcatcttatgcctcaaagttggtattcctgttggcctctcgaaaatggtcgtatggtgacaaattcagatgctacggtattgaaccaaattgttctgtctggaaccgatcttacccctgaacagctactggtatggaaacggcaacaagcgatagctactttgggaaatctaactttgcttaaccttagcgtaaaccgttctgttcagaatgctgtatttctgaaaaaacgtgatgctctcatcgtccacaccaatctacgactgaacattccacttatagttaaggataaatgggatgaggatgaaatcctggagcggggtaaaaagttgggggaaattgcattgaaagtatggccaaaacacgattaa

SEQ ID NO: 19934 - DNA, 285 bp, Escherichia coli
ttgcttgatttacaaggcaatggtcacacgcaattgctggatatgcagtttgattccggttactggataaccagtttgtatcaggtaaaagaggccaaatggcagcgcgttcacggctggtttggcaagttaagctaccccgcactcacgcgttttacctatacctccaaccgtaaactcgtcattaaacctgtcgccggacgtaacccgcaaacgaaagatctggcgctgacacagcgttgtttaataaagggtgatgtgcttgatggggtgaatcagaactga

SEQ ID NO: 19935 - DNA, 648 bp, Escherichia coli
atgagcacttttaccatggaatggctacaaaatacgattaccagtattgagtcagcacgagatgaaatgccattcggactcgataacgatcaagcacacatgcttacagcatttaaaatcgctctcgcctcactggaacgcgagcgggttcgccacgagcatgccaaatggtctgactccacatttggctgcgttggccccattggtccactgaaacacctctcaaaagaggctctggaagccgcagccgaacctgacgatctcagcgagtgggctgatatgcagttcctgttgtgggatgcacagcgccgtgccggtatcagtgatgctgaaattaccgctgctatggaaaataaattgaagatcaacatggagcgtcagtggcctgaaccaaaagatggtgagcctcgtttgcacattaaagaacccggcaactctccggtaactccggatggttggataagctgtagtgagctaatgccagatgatggtcagcacgtaattattttatgtgatggcgcattcgttctttatgcgcaatatcgagacggagagtttttcgatattgtccgcaatggtgatgaatttttcgaaacacagagtcgcaatgtaaccgactggatgcaactaccagaacctcctctttga

SEQ ID NO: 19936 - DNA, 1161 bp, Escherichia coli
atgactgataaatataaaccaatgaaaaagaacatttttaagttttcggtactgacattggctgttctgtctttgacagcatgtacccttgttcctggtcagaatttatcgaccagtaacaaggatgtcattgaactacctgacaatcagtatgacctggacaaaatggtcaatatctatcccgtcacgccaggattgattgatcagctgcgcgccaaaccgattatgtcgcaggctaatccggagctggagcagcaaatcgcgaactatgaatatcgcatcggcattggtgatgtgttgatggttacggtctgggatcacccggaactaaccacccccgcagggcaataccgtagcgccagtgataccggcaactgggttaacgccgatggtgcgattttctacccctatattggtcgcctgaaagtggccgggaaaacacttacccaggtacgtaacgagattacagcgcgtctggattcagtcattgaaagcccgcaggtcgatgtcagcgtcgcggcgttccgatcgcaaaaagcgtacgtcaccggcgaagtcagcaaatcgggtcagcagcctattaccaatattcctctgaccatcatggatgcgattaacgccgcgggaggtctgaccgcagatgcagactggcgcaacgtggtgctcactcagaatggcgtaaagaccaaagtaaacctctatgcgctgatgcagcgtggcgacttgcgccagaacaaactgctgcacccgggcgatattttatttattccgcgcaacgatgatctgaaagtcttcgtgatgggtgaagtgggtaaacagagcacgctgaaaatggaccgcagcggtatgaccctggcggaagcgctgggtaacgctgagggtatgaatcaggatgtcgccgacgcgacggggatttttgttattcgtgcaacgcaaaacaagcagaatggcaaaatcgccaatatttatcagctgaatgcgaaggacgcatcggcaatgatactcggaacggaattccagcttgaaccttacgacattgtttatgtcactactgcgccgctggctcgttggaaccgtgtgatttctctgctggtaccgacgattaccggggtgcatgacctgacagagacttcacggtggattcaaacatggcccaactaa

SEQ ID NO: 19937 - DNA, 216 bp, Escherichia coli
atgaaagaaaagaagacatctgcgttgtttgacatcactgctatcttcttactggttatgcaggtcgtagtgggggcacgcaaagctttgcactggattgcaaggcgttgcgcttctctggagtgcgacaggtttgatgacaaaaaattagcgcaagaagacaaaaatcaccttgcgctaatgctctgttacaggtcactaataccatccaagtag

SEQ ID NO: 19938 - DNA, 2811 bp, Escherichia coli
atgataaatttaaatccactttctttttctgaatatgacttgaacgaaatattgaatgccagtcaagataataagttagttctttttattggtgctggtttttctaaattcagcgaaacggaattaataaaaataccaacctggagggagttaataaatgagctaaaagacgacttaggattgtctgaagaaaatgattatttaaaaatagcccaactttactttcttcaatacggacaaaactcttatgttaaaaaagtcaaatcaataattagagatttgaaaccaagtctttttcataagatgctatttgaattaaacccccactatataattacaaccaactgggatagtttgcttgaaaaaactgcacaagacataggattggcttatgatttagttagttctgacgtggacctggcacaaagtcatttggacaagaaaattataaagatgcatggggattttcgacagaataattttgtttttaaagaggatgattacttacagtacagccaaaattttccacttatcgaaaattttataaaaggaattttctcaacaaacactgttgtgtttttaggatactcttatagtgattatgatttaaaacagattgtttcatgggttacaactatatcaaaagcaacaccaagaaaatatttgctccagaaaaatcatgatgcagcccaggctctttacttaagaaatcatgggatatccttgttgacaccgatgaatactgacattagctatcatgatctttattcaaaatttttcagtgatttcaagcttgttaaaaaccaagatgagtttataaagaggaccctgatctatactgagtcaaaggtaaaaaaaatagaagatgacctgagaatgtctgattttgataaaaataaattgaagaatgatattcaatgtattgtaacaaaaaaaataaataaatatgttgatagcaaactaaaagcattaacacaatacaaagtattgctccctgagcagatcagtaaaaaattaactaatagtaccattgattatgataaatctggggttaaactaacctcccacaataatattttgacgactgattatgacgagtatagcaggaaaataaatagcatataccttaatgacattttgagtaaaaatactcacttaaaaaagacattctcatctattttggaaaaggcatttataaatacagttagttatgactcgaaactgtatgaggtgattagttcttcagaattagagtctgagctatacaataagatttctttcgcttattcaaaggataatgctgaaatacttcttattaacaaggaatatggcaaacttctcgatattcttatttcgaaagtaaagcttcatcttaatgagagaaactatattctcgccaccattcacatgtctaattttgattatgcttacaggatgttgaagtcggatttacactgtaacggtaaggacattgatgaagattgtaaatcaataatggaaagccatactccatttgagtttaaaagtaaaataattgattttccacggggggtgcaaagtgagctacaagaattagtaaagatgcttgaatttaatgaaatatacaaagcttactatcgatttgacgttgaatcgaagaagaatttagggtactcacaaataagaaagagtggtggaatagcattttccaatgatgaatttaaaacaagagcgaaactgtacccttatgtgtatttcattttaggcaacgaaattttaattgaagaatataaagaggttaaacaatttttcgaatttaatattcttagtagcctcgaacactatctatgcgaagagatattctatgttaatagaatcgatctatttatgttaataaaatactgcgagacagaaaaactcaaaaaatttttaagtaaagtaataaaagacaaaataataatcagcaccagcaaacttgacaaaagagaagttcaccatattaagaaatatttactcaactctctcgaaaatatatgcaacctgattaggttgaaaaataaaaattttattcataccacttcaatagatcgatggaccaataatttattgattatattaggatgtgttccgtggagttcaaaccagttaaagaaaataataaatggtttgcttcctttgttagaaggcagaactaataacataaatatttatgaaaacatacataatcttctagctgtgaatgagtttttgtatcaaaaatcccatgatgatatgttaaaaatcctggatgtaatacttataaaaatcaatacaggagagttaaatggttatgaccagcatgtaattaactccaatatcttacgaaacatttacatattatcagagaatcataattacgaatacaaaaacactgaactattaacattagcgttaacaaaaatacaattatttgatgatgagtggaaaagattcatcactaagagtttattattgaacatcaaaaggattggctctcctgaggtcgttgacattatagacaagtttattaacagtaatattttaaacctaccactggcaacagtaagcgatattatggaatgtttgcatttagtcgcaagcggatgtgccatgcctgatcaatttcttgaggttattaacaaatttgtttctgaaaacatcccaaataaattaggcgagttagatttcattacagctggtgtagaaagtgattttcctaacttaattaaaagccttataaaggatagaggctttgttgaatttcaagacacattggacatattcaatgaacgaatgcaatctctaaaaaaataa

SEQ ID NO: 19939 - DNA, 576 bp, Escherichia coli
atgccatttgcttgttatttctgcattttcataaacgttggtttgggagaaggctctgcattaccggttggggtgcctgttccgtggccttcagccactccgccaacaggctggctgaaatgcaatggtgcggctttttctgctgaagaatacccggaactggcaaaggcttacccgaccaataaattgcctgatttacgcggtgaatttattcgtggctgggatgatggacgtggagtggatgcggggcgagccttgctaagtcttcaggatgactcttttgaagctcacaggcatgagtcctttttttacgcgggtatttcacgcaatgaaacaccattaaaaaatcttccaagttcagacgagatgctgactttaagttccacaactaatgccttgtccccggacagtattgatgccaccaattcgttaattggtaatgatgattacaactgtttgattgaaggaaataaaaataacaaacgaacggcaacggggttgagtaccagtattgtcggtgcagcagagacacgcccacgtaatatttcatttaattacattgtgagggctgcatga

SEQ ID NO: 19940 - DNA, 333 bp, Escherichia coli
atggctatcattaccgtaaaaaaacatactgtcaaaaaagcattatcgatgggatttgaaaaagtacttgacgatcgtggttatgattctggggcgtactacgttaaagatggcaaaaagtggatttttgatattgttgcgcttaagcaaaaacaaggagcaacctcagatgatgagttaaaaatccttgggtatgatgttgatacatataatcttgtaaaaaatgaatctaatgaactggctgaactttatcaagatattgcagttgaagatggtgagccaatgtatctagagggtggcgtgtacttatatcctgatggttctatccgttag

SEQ ID NO: 19941 - DNA, 336 bp, Escherichia coli
atgaacaatattccccctataccacagttaggaatttatgtctcaaaaatcgatcccaccctacgtatcactgtaaccgatgttgatattgttgatggtgaggatgattctcctgatgatgaattgttttatttagtccactggatcgagggggaagatgaaagtgatatgacagcaatgggatttgagctagacccagtagagtggcaggctttcgttgaatctgagcaattagtgtttgagcgtgatccgtacatggattcaatccccgaaaattcaaacttggcaaagattcgggattttctcatgaagactaaacagaatgatcattcgtaa

SEQ ID NO: 19942 - DNA, 1761 bp, Escherichia coli
atgacaaaaacatctaaacttgacgcacttagggctgctacttcacgtgaagacttggctaaaattttagatgttaagttggtatttttaactaacgttctatatagaatcggctcggataatcaatacactcaatttacaataccgaagaaaggaaaaggggtaaggactatttctgcacctacagaccggttgaaggacatccaacgaagaatatgtgacttactttctgattgtagagatgagatctttgctataaggaaaattagtaacaactattcctttggttttgagaggggaaaatcaataatcctaaatgcttataagcatagaggcaaacaaataatattaaatatagatcttaaggatttttttgaaagctttaattttggacgagttagaggatattttctttccaatcaggattttttattaaatcctgtggtggcaacgacacttgcaaaagctgcatgctataatggaaccctcccccaaggaagtccatgttctcctattatctcaaatctaatttgcaatattatggatatgagattagctaagctggctaaaaaatatggatgtacttatagcagatatgctgatgatataacaatttctacaaataaaaatacatttccgttagaaatggctactgtgcaacctgaaggggttgttttgggaaaagttttggtaaaagaaatagaaaactctggattcgaaataaatgattcaaagactaggcttacgtataagacatcaaggcaagaagtaacgggacttacagttaacagaatcgttaatattgataggtgttattataaaaaaactcgggcgttggcacatgctttgtatcgtacaggtgaatataaagtgccagatgaaaatggtgttttagtttcaggaggtctggataaacttgaggggatgtttggttttattgatcaagttgataagtttaacaatataaagaaaaaactgaacaagcaacctgatagatatgtattgactaatgcgactttgcatggttttaaattaaagttgaatgcgcgagaaaaagcatatagtaaatttatttactataaattttttcatggcaacacctgtcctacgataattacagaagggaagactgatcggatatatttgaaggctgctttgcattctttggagacatcatatcctgagttgtttagagaaaaaacagatagtaaaaagaaagaaataaatcttaatatatttaaatctaatgaaaagaccaaatattttttagatctttctgggggaactgcagatctgaaaaaatttgtagagcgttataaaaataattatgcttcttattatggttctgttccaaaacagccagtgattatggttcttgataatgatacaggtccaagcgatttacttaattttctgcgcaataaagttaaaagctgcccagacgatgtaactgaaatgagaaagatgaaatatattcatgttttctataatttatatatagttctcacaccattgagtccttccggcgaacaaacttcaatggaggatcttttccctaaagatattttagatatcaagattgatggtaagaaattcaacaaaaataatgatggagactcaaaaacggaatatgggaagcatattttttccatgagggttgttagagataaaaagcggaaaatagattttaaggcattttgttgtatttttgatgctataaaagatataaaggaacattataaattaatgttaaatagctaa

SEQ ID NO: 19943 - DNA, 225 bp, Escherichia coli
atgatctttccctggatacagatctccatactcccagccgtggcaagactgttagcggtttctctggaggatttgcttggcgaagaaccggagaagatcgcccgtaagcgtggccctgcgccaaaatggcagcagcttattgaagagatcgacagcctgccgaaggcaaagcagaagatgatttcggagatgttaagtgcgctgattgttcaggcgcgtaactga

SEQ ID NO: 19944 - DNA, 285 bp, Escherichia coli
atgagtgttgaatatattatacatgtcgatgataaagtagataatttactttcttttattgtcgagagaataaaagaaaatcaaccatcctctcggattaatactgatgattcactttggattccatctagttattcaaactggattgatttttcaatagaagatcatgaggatggtttttttattgtaaataatttaaatggaagtgatagagataaattattttcactgatatttactgcctttcatgaattgtctataaaatatgaaatagaagaagtctaa

SEQ ID NO: 19945 - DNA, 1107 bp, Escherichia coli
atgtacgaccatgaccattattattacgacaaagcgggaaacctgctgacggacgagcaccagagcgcagtgatggataaccgcctgccgggctacgggcgttaccgctaccgctataacgaatggggcgaactgacagagcgcagggaccagcaactggagtggaacgcgcagggccagttaacgcgggtcatcagcagcaacagcgagacgcggtaccggtacgatgcgctaggcaggcgcatcagcaaggcgaccagcaatctccatacggaccggggagaacgaagccggacaacgtttgtgtgggaagggttccggctgttgcaggagacaacgtggcagggaaagcggacgtacctgtacgatgcggaacagccgtacacgccggtggcggccatcacggggcgcggggagagccagaaaatctggtattaccacacggacctgacgggtacggtgcaggaggtgaccgcggcagatggcaggctggtgtgggcgggctaccaggcggggttcggagaaaaccggggcgacatcagcaacagcggggcgtactttgagcaggggctgcggctgccggggcagtattatgatgaagagacggggctgcactataatctgttcagatattatgcgccggagtgcgggaggtttatcagtcaggacccgatagggctgcttggtggattgaatctctatgcttatgcgccgaatccgctatcatggatagatccgcttggattaagtgccgcctctgatttgcctcaattaaaaggaagatccccaggggcaataggttctattcttactgataatggattcaatttagataaacaaacaagtaccgggaatcagacatggagtcacgctgatggctctaaagttcgtgtcgatccctatggaaatcaaagtatgacgatgaaaaacggtgatccattacccaagtctggggctaacgcacatgtgcataaatatgatcccggtgaggtacctctgaatgacagaggcattccgagtactaatccgaatgaaacacatatagggatcaggaatccaaatgattatcctacaaaacgagggcgggcccatgggtgcggcgcatga

SEQ ID NO: 19946 - DNA, 306 bp, Escherichia coli
atggataaagagattgcattgaaaatagtagtcgataaattattaggagatgattcaatacctgtcagattaagaatcaagaaagatttttttgatagtgaaattgaagaattatataaggcgctggattttttggcggaaatatatgctggtgaaattatggttccaaaagttttaggattggcactaatggatgtatatggaatgttttcttttcgggagggaatgtacagcaaggacgagctgatcaaacttgaggatataggtatagaacttcaagagaaagctataaatctcttttcataa

SEQ ID NO: 19947 - DNA, 4128 bp, Escherichia coli
atgtatgaagccgcacgggtggatgaccccatctaccacaccagcgcccttgccgggtttttgataggggccatcataggtatcgccattattgccgtcgccagctttgctttttttacctgcggctttttggccgggctgattttgagttttctggctgatcagatagcttccggagtcctgcaactgggagaagctgtcgggcgttcgatacattccacagtgggaaaaattctgaccggttctgataatgtcagcaccaacagccgcccggccgcccgcgccgtactgagtacggtgatatgtgaagaccattccccggaaatccgcattgcccagggttccggcaatatctacatcaacagccagcccgccgcccgaaaggatgaccacaccgaatgtgatgcggtgattgaggacggctctcccaacgtctttctcggcggcggtacacagacggtactggaaatcagcccggaaatcccggactggctgcgtcaggtggtggatgtgctgtatgtggtcgccggaatgtttggcggacttgccggagctgcacgccaggcggcaaagctggggacaaaattcggcaccaaatgcgcggcaaaatttattggcgggcaactggtcgggatgggcgtctctgatgctgtcatggggttgttcagcaatccggtagatgtcactaccgggcaaaaaatcctgctgccggaaacggacttcaccctgccgggccgtctgcccgtcacctgctcgcgcttttatgccagccacctggaaacagagggactgctgggcagaggatggcggctgaactgggagataaccctgcgtgaggatgagacatatatcaccttcatcggtgtacagggccgggaactgagttatccgaaagcgatgctgacgccgggtcaccagatattcgacccggaagagcagttttacctgagtcgcctgcatgacgggcgctatgtgctgcattacaccgaccgtagctattacgtgtttgatgaatttgatgaccacggcgtcgcgccgttacgttttatggaaaccccgtaccggcagcgtattgccttcgggcgtgagaacggcaggctggtgcgggtggcctccagcagcggacaccatctgttgttgcaccgcacgatgacgccggcgggagaacgcctgtcgcatattgaacttgtgaagggcgggcgtcccggtaacctggtggaatatcgttacgatgataacgggcaactgaccggcgtggtgaaccgggccggtgtgacggcgcgccagtttgcgtatgaaaatggcctgatgacggagcaccgcaacgcaacaggcttcacctgtacctaccgctggcaggagattgatggtttcccccgcgtggtggaacacacgaccagcgacggcgagcattaccgctttcagtacgattttgcgggcgggcagacggtggtaaccggcaggccggagcagaagtggcagtggtggtttgatgaagagacgtatgtgaccgcgcaccggacgccgggcggcggactgtaccgcttcacgtacaacgaaaaccatttcccggtcgccgtggaactccccggcgaacgcagggtaacgctggaatacgacactctgagccgggtggtgaaagagacggacgcggcagggcgggtgacacagacgcagtggaacggcagctttgctgaaatcacacgccgggcgctggatgacgaccacgtatggaaggcggattacaacgaacacggccaggtaatacgggagacggacccggaagggcgcatcacgcgctacgggtatgatgaacaggggctggcggtcagccgcacggatgcgtggggcggcgaggctgcgctggtgcacgatgcgcgcggccagctgaggcgttacaccgactgttcagggtgcgccacggactatgaatacgatgagggcggcaacctgacggcggtgacggacgcggaagggaaaacggtacgtatccgctataaccgtctggggctgccggagacggtaaatcatcccggtaaacagcaggaccgttacacctggaacgcgctggggttactgagcagccaccgtcgcatcacgggtagtgtgcagtcctggcagtatacgccgcgcgggctgctggcgctccacgtagatgaagagaaacgggagacgcgctggcattataccgcggagggatggattgccagtctgagcaacggcaacggggcgcagtaccggttcagccacgatgcggacggacggctgacgggagaacagcgcccggacggtctgatacggatgtttgtgctgaatgcgggcgggttcccggtcatcatccagacacagggtacagaaggcggggtgcgtaatgagcgacaggagcgtgacgcgctgggtcgcctgttgcgcagtgacacgcagcacagtacacggaccttcagctacaaccgtcttgaccagataacggaagtgacgctcactcccacggaagaaggggaacggctgcaccacatgcaggcggacacggtgcgctttgcgtatgaccgcagcgggtggctgacggcagagcacagcgtgcacggcagtataaaatatcagcgcgacgcgctgggcaatcccaccgacattaccctgccagacgggcagtatctcagtcatctttactacggcagcgggcatctgctccagacagcgctggacggtatcacggtcagtgaatatgagcgtgacagtctgcaccgtcaggtgatgcgcacccagggggcgctgacgacgttcagcggctacaacgctgacaaccggttaagctggcagcgcagcctgataaacgacagccattcccggcaacagagccatcccccggcgcagaacgacagcgtgacggcgcgggattacctctggaacgcagacggtgaagtcggcggcatcaatgacaaactgcgcggttgcctggtgttcagctatgaccggagcggctggctgaccagccgcacgggtcagatgtacgaccatgaccattattactacgataaagcgggaaacctgctggcggatgagtaccagagtgcggtgatggacaaccgcctgccgggctacgggcgtgaccgttaccgttataacgaatggggcgaactgaaagagcgcagggaccagcagctggagtggaacgcgcagggccagttaacgcgggtcatcagcagcaacagcgaaacgcggtatcagtatgatgcactgggcaggcgcatcagcaaggcgaccagcaatctccatacggaccggggagaacgaagccggacaacgtttgtgtgggaagggttccggctgttgcaggagacaacgtggcagggaaagcggacatatctgtacgacgcggaacagccgtacaccccggtggcggccatcacggggcgcggagaaagccggaaaatctggtattaccacacggacctgacgggcacggtacaggaggtgaccgcggcggacgggacgctggtgtgggcgggctaccaggcgggatttggagaaaaccggggggacatcagcaacagcggggcgtactttgaacagccgctgcggctgccggggcagtattatgatgaagagacggggctgcactataatctgttcaggtattatgcgccggagtgcgggaggttcgtaagccaggatccgatttcgatccgtggcgggctgaatctttaccggtatgcacctaatccgctgaggtggattgatcctcttggcttaatcaaggtatttcgaaatattcgtgcggatgaatctattagtgagggactatctgcaaagaacccagggcgaggaatgagcgctgctggtcatgttagaaatggtagtaatgattcgtttaaaggctcacaattcatttcaactaccgtagatgaagatgtagcagtacgataccgtgaaccaggccaaactacagttacatttgatactgacgatgttattcctgatgttaaaggtaatcggaatattattgacttatccacggtagagaaagcaacggatgctggattaaaagggccagcccgtaactatgcagttagttctggagaagtacttgtggaaggccatgtcccatcaaatgctattagaccttgttaa

SEQ ID NO: 19948 - DNA, 444 bp, Escherichia coli
atgaccagcccttaccgtattcaggagggcagctttgccctgcctgacgcttttcttgaccgcaccgtcaatatcttcgtcccgtcgggcaatgagagggcaacccccagtctgaatatttcccgcgatacgctcaggcccgatgaaaatctgaccacctatattgaccgccagatagccttgatgaaaaaaaacctgggccagcaccgggtactttcgcggggaacggcactggcgggaactggcgaagctgccatgacaggcgaacagattctcgcaactcatcgttctggaaaaacagaagtgtaccagcgtcaggccgggtttatctccgggcccggaaaggtactggtgttgacgctgaccagtcagcgtccttttgatgagcacaccgaccagctatggactgcatggttgaccagttttcagcctgctaaaagctaa

SEQ ID NO: 19949 - DNA, 2205 bp, Escherichia coli
atgagttttgtatccacaggtaataaatcagttgggggcggcgggcctgccatcactacgccgccagtcgtcggagaaagtggtggtgtgagtgcagattctgccgcaaccggtgttgctgatgtcgccgaacaaatggcggaacaggcggcggatctgtttggtgcgctgccagaaccgtcaggactggtaaaagcagcagtggcagcagcgcaggccgccgccgcggcagggatagcggatatggcaggggccgcacaggatgcaatgtcatcccttatctccgggccgggggcgtataacgtcacggtaagcggcagtgctgtgccgccgcagatgttgttgtttgccagccttaacggctcggaaacactgggtagcctgtttacttacgtggtacagcttaaaacctcggacaccctgaacctgggttatgtatctcccgccgccaacctgccgctcaaaccgatggtgggcaaagacctgtgcgtcaacattgaactggatggcggcggaaaacggtatatcagtggcctggtaacggcggcgcgggtagtgggtcatgagggccgttcggtaacgtatgagttacgtattgagccgtggctgaaactgctaacccacaccagcgactacaaggcgttccagaataaaacggtggtggaaattctggacgaagtgctggctgaatattcttttccggtggaaaaacgtctggtggaaaactacccgtcacgcacctggcaggtgcagtacggtgaaaccgactttgatttcatccagcgcctgatgcaggagtggggcatctactggtggtttgagcacagcgagaacagtcatacgctggtgctggcggatgccatcagcgcccataaggcgtgcccggactcaccgctggtcagttactaccaggcagggctgaagctggataaggagtttatccataccatcacggccaatgaaagtctgcgtaccgggcagtgggtgctggacgatttcgattttatgaagccacgctcattgctggcgaacaccgtggcaaacccgcgtgaaaccggtcatgcagactttgaacattacgaatggccgggagactacttcacgaaggatgaaggcgagatgctgacgcgcatccgcatggaagaacaacgaagccctggtagccgggtgcatggcggtggcaacatccgcacactgatgacgggctataccttcacactggagaactacccgaccgccgaagtgaatcaggaatacctgctggtacagaccacgctatttatacaggacaatgcgcaacacagcggccaggagcaacatttctcttactcaaccagctttgaactgcatcccacccgcgaagtttaccgcccacaacgaaccctgagcaaaccccacaccaaaggcccgcaaagcgccattgtcaccggcccggcggggcaggaaatctggacagataaatatggccgggtgaaagttcagtttggctgggatcgctacggcaaacgggatgaaaacagctcctgctggatccgcgtcagctacccgtgggcaggtaaaggattcgggatgatccagatcccgcgcatcggccaggaagtgctggtggacttcaaaaacggcgacccggatttaccgattattgtggggcgcacctacaaccaggacacgatgccgccgtggggattgccgggcatggcgtcgcagagcgggatattcagccactcattgcagggagggccgacgaatggaaacatgctgcgctttgacgataaaacgggtgcggaagaggtgaagtttcttgcggagaaagatctgaataccgtcgtgaaaaataacgaaacacacacggtgatggtcgatcgcacaaaaaccattgtcaaaaatgaaaccatcagtgtgggagaagatcgcaccgccaccattaccaaaaatgatggtctctccgtaaaactggcacaaaccatcaatatcggaacaacataccgactggatgttggcgatcaatttacccttcgctgtggtaatgcagcgcttgtattacacaaggatggctcgattgagttttgcggaaaacaacttttactgcacaccagcgatgtgatgcaactcattggcagtggtattgatatgaatccggatggtggaaaagccattactgcgaatgatattgccccgttacccactccggatgcttctgaataa

SEQ ID NO: 19950 - DNA, 450 bp, Escherichia coli
atgcagtggatgaaaattcttagacgtatttttttatggcttatccttttttggatttttgtgatttttattttttatatttttatatatatgatttcatcgggagtggatgatgatgagatttatacggaaaatgattttttaaaatattacacacttactgatcctgacatattaaatagtcctaaagtatctggaaaatattattttgaataccatccgggtgatggttatccactttcaaactccatagtgtttagtggggggacagatgtggaacctttgaaaagatatctttcagatctggggtatacattacataagcgcattatcaataagaatgaaattgtatgggagagtcgttgttcgataaatcagccagcatcattttatctttctgttaactatacagaaaatagtgttcagcttgaaaaagaaatttgttattag

SEQ ID NO: 19951 - DNA, 750 bp, Escherichia coli
atgtggatgcgctacggctggcgggggaaaacaggtaaaggattttatatgagtaaacgtgaagaaattaaaggtaacctgaagtttgatgaactcaaatttggcattgtatataccgaagttttgggttggcttgatatgggacatgcgggtggtgatgatatttccttgttgaaacagcaatttgatgcgggtgaaagttccggtaataaatattactcagtgatatataaacagaatatgcgggtcagaagtaaaacactgaggcaggaaatgggaacagggaaattcactcgctgggaaatccaaagaggacgcacccaggacgaaattaatagcataatgctggcgatgatgatgaatacagaattaaagtttgaagcatatcaaagtctgaaagaattttcatggcatacagatagtggatttagtggtgaggatttggtttctgatctttttggtttttatcgttttatgattcctggtaaatacagtagcctggttcgtcccgtcaattataatgatgcggtcagtcgctgggatttttacggacctattggtagctttaaaaatgatgggtttcgacctattctgtttcctgatccgaaggatccctgtgtcaaacatgaaccttataaggctgatttacctcattttatgacatggatccaaccgtggagtgattttacatcaggtaagataagaattataacgaatgatggaacatcattttctttactacctatatag

SEQ ID NO: 19952 - DNA, 288 bp, Escherichia coli
atgagaaaaataattcagatatcagggtggttattatttattatgggattggtcactatcatgcttttttccgggagtgagtaccagtggatgcaggatatggacccttcaataacagcattacctcagggaaacggaaatagagatgtaatcagaaaattaatttattctatttcagtggctattcagattgttctttattttctttcagtatcgcgtacaggaaagggattttcagccctgggtattttgctattactgattaccgcatggagctctgaacaataa

SEQ ID NO: 19953 - DNA, 687 bp, Escherichia coli
atggaaaagctagagtgtaatgcgtctaaccattcgccagtgtggggagtaacagaatttatattctggaaactggcgcctaaaaaatgggggggaggcgtagcatttgggcgttattttaaagatggttgggtgaagcataactgtcttttgatcaatgcagctgcaaatgcctggcatttacctgcccccttacttgctggagtttgttggattgaagtagggggtgatcctcagattatagacacgctggtatttgaatttcgtgctatgagttggagtgggcctgaatgggttgatgaacatatcacaatcgcttcgaaaccagaaaaaacttcttttggtgcggtgagtatgcaattgcgaactgcagccagaacactcgggcttgatgagactaaaatggacaactctcagttgcgtgagctggcaaattgtctccagcatgatgtgtttaatatacaattagctgcaagacatctttatcaattggctgaaaaagatggttttcaggtatccttacctcacctgacaaaagaacaaataagaattattggagctcgttataatcgaggtgtttcccttagtctggaaaaaataaaggaagataccagctatggcgattttattataaataactggttacatttctctagtttattaataactacctggaagtcttcatga

SEQ ID NO: 19954 - DNA, 519 bp, Escherichia coli
atgattaactctttctgtaaatatattcttatagcagtgactgcgctggctcctctctggagtaataatgcacttgctgcacaaacggcaagtgcaaacctaccgattacgatggcagtaacaaatccacaatgtaccattaataatgggcaaggattacctgccaccgttcagcttcctgttgtcacaaccgcgggagtattttcggataacaatagtaccgaagttcctattgttattaactgcgcagggagtgtctcgaaatttgaaattacattaacaggaggaactgcttcgaaaatcacgaccagtaataatatggttgatattgcacttgtatggaaacagggaggctcaactgttcagtttggagcaccagtagctttaaataaagcaccatatcttgtaagtaataaggaatttgatgcttcgctaatagccaccatcacaccacataccggaaatataccagcgggtatctatactgcgagtttacctataacgttaacgtactattaa

SEQ ID NO: 19955 - DNA, 522 bp, Escherichia coli
atgggaaagtggaaaatattattttgcatgattgcattactttgcaattgctgctatgcgtcgcgaactatttcaaatagagtaaacatcacggcgacgatggctctcaacacctgtgcattaacgttaacaccagacaacgtgaattttggtggggtacgtattgatgagattgaagcggcgagtatttctccgcagactgtatcgcttgcaatgcaatgtagttggcctgctagcggggtatcggtaaagtttgtaccaaaggatggagtttccactagtgacccaaatattatgaaaacaggactatctggtgttggcctggctttatcgtggaaaaagagtacagtttctgactttaccaatattaattacaatacgtcgttgcaactcaatgctcaggaacaatcaagtaatgtggcattagggcagtttaaacttttaccaaaaaaggttcctgagcaaacaatacaaagtggcaatatagcaaccagtctaactgtcgaggttagctatgattaa

SEQ ID NO: 19956 - DNA, 972 bp, Escherichia coli
atgcagaaattattatttcttatatttacgctattttttatttcgccacatagtcatgcggcggtggattgctccagtggtagaattactcttggatatgataatacgactacaaattacaatacttacgactctacgcagaatggacccgttgctacattagttgctaatgtatcgcagaatttttcgtgcggtggtgattatatcgaaacaaccactatgaacaggaaaagttatttagtcttacctattaccagtgggggaacttgtagtaatggtgttttaactactaccattcccggcgttgtctggcgccttgatggatttacctgtttggggaatgggttaaagaccactaaagaattaaacggcggtgatacctggtctgggacagtaggaaaacttatcttaacactgacagatgagtattggcggcagaataattctacacgaacatttactttacaggccccttctcaaggaaatgtcaagggaacgaatgttaatgtcgtggtaacagcaaatccggcaaccttgacgcataaagttatgcacttaggtagttgctcgatggcaacaacaccagttaatttggacttcgggactatatcacccattgaaattaataaaggagctctatatcaatctgttactgttacctggaactgcgttaacaaagcactcgcagtgaatggttttaatttacgttttgatcctgagaatgttgttaatgctaaccaagccacttttagtgccactgctactgatggtaaaaaactaaatttccagttggttcaatataatcaagggaaagaaacacctccccagcttaataaaagtattcaggtgtatgctccagtaacgaatgatgtttacaatacacttagtttaagaataaaagtattgccagcatcaacttatcccacagggaaagtatcaacgtatttaacaattacagcgacatatatgtaa

SEQ ID NO: 19957 - DNA, 696 bp, Escherichia coli
gtgagtaacaatgtaatgaaaaaaataaatcttatgccagtattggctttgctgctgatcagctttaatagccatgctgcctttgttctcaatagtacgcgttatatttttgcgggcgataaggataacatttcagtccaggtcaataatgaatcttctcaagagtatggcggtcaaatctggatcgataatgcaaatgcaagagatcagaacgtttactttgcccccagtccgacctttttcaaggtttctggtggacataaacaaattttgcgtgtcctgaaaattaatgacagtttacccaaagacaaagaatcactgttttgggtcaacatccaggaaatccctaaagcaccaaaagagggcacaaactcccttgccatagcattgcatactcaggttaagatgatttatcgacctgagtcactaaaagagggtagggaagatgcggagaaaaatatcaagatcatccatgaggggggaaatacgattttatataataactctccgtactattttgcagtgattaatgtaaagcaaaatggtcatgatgtgaaacttagcgaagaaactaaaaataaaatcgcggcttttgcgccttttgagaaggtatctctgggaagtaaactttcaggaaaagatatttcaattgtttcttttgatgattatggcgtagacagggaatataaactttag

SEQ ID NO: 19958 - DNA, 2358 bp, Escherichia coli
atgaaaaaagaaatatttattgccactattatttttcatttactatctaaaggtgctcttgccgaagagttcaactacagctttattcgtggagggagtaaggatattcctgaagttttaaacagtaataaagaaaacgtaccaggaaaatatgttgttgatattgtttttaatggttctaaaatcgcctcatctaccgagatgaacatcgcaaaagaggatgctgaagggatatgtctttctgatgaatggctaactgaaaacggcattataattaataaagatttttataaaaatgtttataatgctgcacgccagtgctatttgctgggtaatgaggcgaacagtaaagtcgcgtttgatcaatctttgcaagaagtatctattgatttgccacaggcaggcttccaggacgcagcaaaagatggtggtgtgtgggactatggtagtaacggttttaaaatagcttatgacgttaatactgcaaaaaatagcaaccaggaaagaaccacctacagtagtattgatggccaggtgaatctgggcgaatgggtgttattgggtagggggtatgcttaccagggcgaaaatttcgatactaataacctgttactgacgcgggcaatcaaatcactgaaatccgatttgcaactgggcaagacacaactttataactcattgaataatggttttaccttttacggtgctcagcttaaatcgaatcaggatatgtatccgtggaactctcgtgcctattcgccggtaattaatggtattgcgcgaacccatgccagggtaaccattgagcagagtggttataccttaaaatctattgtcgtgcctccgggaccatttgtgatcaacgatcttaacggcgtttactctggcgatttgatcatgaaaatctatgaagaggatggctccgttcgtgaacagcgtttccctgtcgcagtgttgcctaatttgttaagaccgggaacgtataactacgccctcgccatgggtagcaaagttaaccaggataatggcgaacgggatcaagaaagtctgtttgcccaaatgagttatgactatggattcgagccttttacactcaatagctctttattactggataaaaattataacaatattggtttaggactaattagctcgtttggatggtttggagccatgtcttttagtggcaacttatcacaagcaaaataccataatggtaagaatctaaaaggctataggacgtcattaaaatatgcaaaagcgcttggtgataatgcaaatttacagtttattggttaccgttttaattcagaaaattatattgactatgctgattttacttataattcatatagttttataagaaatagaccaaagcaacgctatgagtcaatcgttacctaccagctaccagaaaaaggtatgtttttaaacttttctgcgtggaaagaagatttctgggataattataacgaggtcggtgctaacttaagtctgacaaaaagttttgatcaaataacaatgacactgaacggtggttattccagactgcaaaatatggatgctgactataatgttggtttgtcaataagtgtgccgttaagtctgtttgataaaacacattatagtttttcgaatgttaactatgatcgacgtacggggaccagtatgaatactgggatctcaggaatgattaatcaaaggctgagttataacgcatcagttaaccagacgcgtgatactaccggtggtacactttctgcctcctatttattcgactggatgcagacgtcagcaacgtattcacaaactgggaaaaattcatctacctcactccagttgggtggtagtgtaattggtgtgccagaaggtggcataatatttactccagttaaaaatgatcaactggctatcgtgcaaatgaaagatgtccccggtgttatgtttaacggttctttaccgggagataaatatggtcgggcggtaatcccacttactgcttataacaataatacgatttctgtaaatgcagaaaaattaccgaagaatattgagcttacagataatgcgattaatgtgaccccaacgggaaatgctatcatttataaaaatgtgaagtttaagaaaattaatacctatgtggttaaactttatggaaaaaatggttatgtcgttcctatgggtagcatcgcaaaaaatacacagggtaaagaagtgggttatgtaaataacggtggtattttgctgatgaaccttgaaacacacgatgaaggtgttatttcgcttgaccagtgtcgatttaatacgcagtcactgaagaaaaaccatgaccaaactcaggagattcactgtgagtaa

SEQ ID NO: 19959 - DNA, 540 bp, Escherichia coli
atgaaaaaattggttttaggttcagctattcttgctgtacttgggatgacttctactgcaatggctgcaaatagtggtactgttaattttacaggtgcggtttctactgctacttgtaatctggctgtaaaggataatgctggaggtgatatctccagtgttgatttggggacgcttgcaagcactgcaactacaaatggcaccgcagtatcatttaaactggtaccagctgaaacagcttgtcttagtaagactcaggcaaacttaacgtggaattctccaaccctaaatgcaactggtttgagcaatgaaataacaactggcggaactaatgccactatgattttaactactcagaatgcaacacaaacaggggcaaatgcagcagttaaattaggcaacacttcttttgattataacgtaagtggtggtattcaatcatttaactatgcagctcaactaatgaaaccggctactggaactacgatgactgccggtccatttaaagcatccgcaagttatattgttgcttataaataa

SEQ ID NO: 19960 - DNA, 135 bp, Escherichia coli
atggttcagtgtgttcgacattttgtcttaccgcgtctgaaaaaagacgctggcctgccgtttttcttcccgttgttcacctattcccagcccctcaatcgaggggcttttttttgcccaggcgtcaggagataa

SEQ ID NO: 19961 - DNA, 126 bp, Escherichia coli
atgtttgagtccggccttcgcaccatcggaacatcaatagacgtcaacggacgtttttttgtgccagaaatcagtgtcacacaaggcttttcgctatttttcgctcaacctacatcaacttactga

SEQ ID NO: 19962 - DNA, 906 bp, Escherichia coli
atgtctgccgcaggaaagagcaacccactggcaatcagtggcctggttgtgctcacacttatctggagttatagctggattttcatgaagcaagtcaccagctacatcggtgccttcgacttcaccgccttacgctgcattttcggcgctctcgttttattcatcgtccttttattacgtggtcgcggaatgcgcccgacgccgtttaaatacaccttagccattgccctgttacaaacctgcgggatggttggcctggcacagtgggcgctggtcagcggcggagcggggaaggtggcaatcctgagctataccatgccgttctgggtggtgattttcgccgcgttgtttctcggtgaacgcctgcgacgtgggcaatatttcgcgatactgattgccgctttcggcttatttttggtgttgcagccgtggcaactcgatttctcttcgatgaaaagtgccatgctggcaatcctctccggtgtgagttggggggcgagcgcgattgttgctaaacgtctgtatgcccgccatccgcgcgtggatttattgtcgctaacatcctggcagatgctgtatgcggcgctggtgatgagcgtggtcgctttactggtgccgcaacgtgaaattgactggcaacccaccgtgttctgggcgctggcctacagtgcgattctggcgacagcgctggcgtggagcttatggttgtttgtattgaaaaacttgcctgccagtattgccagcttaagcacactggccgttcccgtttgcggcgtactcttttcctggtggctgctcggtgagaatccgggggcagttgaaggtagcggtattgtgctgattgtgctggcactggcgctggtgagccgtaagaaaaaagaagccgtcagtgtaaaaaggatctga

SEQ ID NO: 19963 - DNA, 1173 bp, Escherichia coli
atgcgtctgttttctattcctccacccacgctactggcggggtttctggcggtattaattggctacgccagttcagcggcaataatctggcaagcagcgattgtcgccggagccactactgcacaaatctctggctggatgacggcgctggggctggcaatgggcgtcagtacgctggctctgacattatggtatcgtgtacctgttctcaccgcatggtcaacgcctggtgcggctttgttggtcaccggattgcagggactaacacttaacgaagccatcggcgtttttattgtcaccaacgcgttaatactcctctgcggcataacgggactctttgctcgtctgatgcgcattattccgcactcgcttgcggcggcaatgcttgccgggattttattacgttttggtttacaggcgtttgccagtctggatggtcaatttacgttgtgtggcagtatgttgctggtatggctggcaaccagggccgttgcgccgcgctatgcggtaattgccgcgatgattattgggatcgtgatcgttatcgcgcaaggtgacgttgtcacaactgatgttgtctttaaacccgttctccccacttatattccccctgatttttcgtttgctcacagtctgagcgttgcactccccctttttctggtgacgatggcatcgcaaaacgcaccgggtatcgcagcaatgaaagcagccgggtattcggctcctgtttcgccgttgattgtgtttactggattgctggcgcttgttttttcccctttcggcgtttattccgtcggtattgcggcaatcaccgcggctatttgccaaagcccggaagcgcatccggataaagatcaacgttggctggccgctgccgttgcaggcattttctatttgctcgcaggtctgtttggtagtgccattaccgggatgatggctgccctgcccgtaagttggatccagatgctggcaggtcttgcgctgttgagtaccattggcggcagtttgtatcaggcgctgcataatgagcgtgagcgcgacgcggcggtggtggcatttctggtaacggcaagtggattgacgctgttcgggattggttctgcgttttggggattaattgccggaggcgtttgttacgtggtgttgaatttaatcgctaacagaaaccgataa

SEQ ID NO: 19964 - DNA, 531 bp, Escherichia coli
atgtcattaaggagaatgacgtctggtgaattaacattagccagatcgatttttgagaatacaattgattataacaaggtatggatccacaatgaaaaatatttgcccggtcaaggagaaagaacagcgatgaccccaaacggggaaatgtattatcctgatgctgtttatagttcagatttttcatcgcaatcaatgcctggtgagcgtgaaacagtagcaggtgcttctcacttgtttattcatgaaatgatgcatgtttggcaatatcagaaagggtatgcagttaagttgcgtggtttattttcctgggcggcaaattatcattacgatcttaatttacagtcaattgcttcttattccatggagcaacaagcatctatagtagctgattattggctattgattaactacggactggtagctgatttggcaaatgttaactatgtaggtgatacaactgaatcagtgaacacgctatcggaaaaatacaaaaaagtgcttaatttatttcctgcgggcgtcatatga

SEQ ID NO: 19965 - DNA, 357 bp, Escherichia coli
atgaagagattttttttattgttctttttgtcgggatgcactgttggtgattatgttcgtccattgttgcccggtaatatatctttacaagacggacgggtttgttcaaaaccagacgatgggagtatgattttaaattatattttatatgaaggtaaatatggcaatgtagtaaaactgaaaaaaatgactggtcagttcgaacccgtatgtattgacataagtgagctatcttcagatgttacttatatcggaaaatatatgctctcttccggaagtaaaaaagaatactatggttttagcataattagaacaggggagcgtattttaagacttgatgataatcatatcaaataa

SEQ ID NO: 19966 - DNA, 1995 bp, Escherichia coli
atgagttttgcagctactgattatccatccggcgcactagctggatcgggtacacataatgtgactttgagcggcagcgcagttcctgatggaatgttactgtttgcaagcttaggggggacagaaacagtaggggaactatttacttattctattaaattaaaaactcctgacatcctgaacctggactatgtttcccccgcagccaacctgcagctcaaaccgatggtgggcaaagatctgtgcgtcaatatcgaattggatggcggcggaaaacgttatatcagcgggctggtgacggcggcgagggtggtcggccatcaaggacgctcggtggtgtatgaactgcgactcgaaccgtggttaaaaacactgaaccacactagtgactacaaagcgtttcagaataaaaacgtggtggacatcctggatgaggtactggatgagtacccctggccagtggaaaaacgattggtagaaaactatccgactcgcgcctggcaggtgcagtacggtgaaacagatttcgattttattcagcgcctgatgcaggagtggggtatctactggtggtttgagcacaacgagaacagtcacacgttagtgctggctgatgccattaatgtccacaaggcatgcgcagattcgccgctggtgtgttattaccagaaagggctgaaactggacaaggagtttatccataccatcacagcaaatgaaagcctgcgcagcggacagtgggtgctgaatgatttcgactttatgaagccgcgttcactgctgaagagtactgtggctaatccgcgtgaaaccggccttgctgaatatgagcactacgaatggccgggagactacttcacaaagagtgaaggtgaaatgctgacacgcatccgaatggaagaacagcgtagccccggtagtcgggtacagggcagcggcaatattcgtaccctgatgacaggttttaccttcaccctggaaaactatccaacagccgaagtgaaccgggaatacctgctggtacagaccacgctatttatacaggacaacgcgcagcacagcggccaggatcagcattttacttactcaaccagctttgaactgcatcccaccggcgaagtttaccgtccacaacgaaccctgagcaaaccccacactaaaggcccgcaaagtgccatcgtcaccggcccggcagggcaggaaatctggacagataaatatggccgggtgaaagttcagtttggctgggatcgttacggtaagaatgacgaaaacagttcctgctgggtccgtgtcagttatccgtgggcgggtaaaggattcgggatgatccagatcccgcgcatcggccaggaagtgctggtggacttcaaaaacggtgatccggatttaccgataatcgttgggcgtacctacaaccaggacaccatgccaccgtggggactaccgggcgcagcgacgcaaagcgggttttacagccacactatcggcggcggcccaaccaatgccaacgcactacgttttgaggataaacctggcggtgaagaggtctggctacatgccgaaaaagatcagcggattgaagttaataataatgaaagccactgggtgggcaataatcgccttaaagtcattgataaaacagaaacagcgataattggtgagaaacgttctcttacagttcagatggatgatacctcccttgccggacaaaataaaacgattcaggccgtacagaatttacgccttgctgcgggagattccataattcttagttgtgggaaaactatcctgcaaatgaccagtgacggaatatttaatataacctgtaagaattttaatattactgcaacagaaaatggaaagataaatacacaatcagggcagcttgatttaaatatgaatgaccgagcggcagatatacctccacctggaacatcggagaaaacagcccttcagttggcgatagacgtcaccttcatgaataaaaaataa

SEQ ID NO: 19967 - DNA, 141 bp, Escherichia coli
atgaagcacatacaaccgaaaacatggcagaaactggactctatgggagctaagttggagaagattactcaacttaagcagtggcatatcggcgaatattatggaagtcctggtcgggatgttcggttggtaaaaagttga

SEQ ID NO: 19968 - DNA, 516 bp, Escherichia coli
atggcgttaacacaccgcgaactctgtcagattgcgtacaagttccttaagcgcaacgggttcaaggtttgctttcatgaccgctttatagctgtaaccagtaccggagaacagccagatgctatgggattcagaaattcagcatcatgcctgatagaggcgaagtgttctcgtgctgacttgttggcagatagaaaaaagcgtttccgtaaaaatccgtctcttggaatgggcgactggcgattctttattagtgagccgggaattatttcaattgaggatttaccacatggctggggattacttcacgttgttaacggaagagtacggaaagtacatgggtggcccaagggtaattgctgttggggtaatcctgacgataagccatttactggaaataagcaggttgaatgcgattacatgttatctgcattaaggcgcatggagttgagagggcaccttaatgaaatatatgacggtgtaatccttaataagcaagaaggaaacgcggcatga

SEQ ID NO: 19969 - DNA, 258 bp, Escherichia coli
gtgagtaattcagcacgattacagcttggtttttcaccgctatcaaaaaccatcgtgttggccaaaatgcgcgatttaggtgacggaacaaaacgacgtgtaggcaatgatcgcggtcgtgatgtaaccaacgaggccgcacaactcgtttggcatcttgtcatggcagaaggcggtgaaatcaattgggagctggatgatggttcttgcatggtgttaagggcagaaaagcagggggcaaatgatgaaaaaccgtaa

SEQ ID NO: 19970 - DNA, 540 bp, Escherichia coli
atgattgaactgtcaaaaaactcatgtttttcaaccattcacctaatgatcataaaagaacttaggctagaaagaggtgtgcatcaaggagtactcgctcaagctgctggaaaaacaccaaacgcatggacaaagatagagaacgggcagtctatattaacagttgacgccctttttggtgctttcacagcccttaatattactccagtgaatttcatgtcattggtagaaaatcttattcccgaatttaaccgttatggttacttctttttccctggaacaatcagtcaggacgaggataaccttttacctctgatgctgcgttactttaatagcaaggggtttgaagcattgagaaataggccattcgaaagagttagcattagctcaatgggattctcatttgggggcggcatccctgttactccaactgctgtaatgtattgttgcgatgaagcatatagaaattgggtcgataatggtgctgatatggataatcgagattatcaggagtcatcaacaggtcgtggacggttttaa

SEQ ID NO: 19971 - DNA, 1143 bp, Escherichia coli
atgagaacgcttccgaccgttaacaccctacagcctatcttgcataaccagatccccgttattacaactgaacttctggcgcagttatacggaacaaaaatcaaaaacatttctgataactttctgaacaacacgacgcgattcatagccggaaagcattactttaaaattgaaaaaaacgaattacgcgagttcaagaacagacctgaaacaatcgggttagttggtaaaaatgcccgctccctaattctctggaccgaacacggagcagcccgtcacgccaaaatgctcgaaaccgatcaggcttgggatgtgttcgaaaaactggaagactgttatttcaaccagaacgcgcaaacggccgcgaccgttaccgtctcgccaaacaatgctcgtgaggttgtcgatacgctcaacgccaaaccgatgttttacattaaggtgtgcaataacgagccactcacaacctcagccgatgttgcccaggcattcagcaccacaaacaattccatcgttatggccatcgatgcgttacgcattcctcgcacagctgcggcgcgtcatttctttaaagagcaacgaccgttggaaggaagcgaccgcgaaataacaatctatcgcatgacaaaagacggatttaccttgctcatggaaagtatcgacggtccaggcgtgaaggatatcaagctcgcctacattgaagcctttaacgctatcaacagcgtgttaaagacacagtacgagcgagatctggctaaacgactgtaccaggaaaaaacgattatccgcgcggcaacagagcataatcggctattaacggaaccgaactacaggaaggaactaatcaaggagtttgacaaggcaacagggaaaaccaaagctgcgctaagtctgccagcaatgactcaggaaaatgtgatatcagccttacttcttgatctgctcaggaacgccagagcacttatcagctttgacgaggacctgaatcctcagctcaagctactaccaccgacaggcaaagtagtcgaccaagcagatcacaacagcatactcagcgtactggatgcaaacctgccagccaggacactacaggatctgataaaaacatgtgctgataagctggcacagaaaagcagaccataa

SEQ ID NO: 19972 - DNA, 576 bp, Escherichia coli
atgaagctattaataaaacctaatccaggtgatttgttttatattcccgcgctcaatgcattagatgttaatgggtttgttctggctcgttacattgaatttattaaaccaaatctaggttatctcatagaggtttttgaacatttttatactgagccacctgaaaaaaaatctgatgtggatataagtgaacgattatttaaacctatattttgtagcatgcgattttcagatatacctaaatggaaaattctgttcagtgatcctagttatgataagtcaaaatcaggatatgaacgtatatcgtttgcatttgatagcagcatctggataggaggtgtaagtaaaaaagcaacatcagaacaattaataaatattgagccatcaatttgctggcgtatggaacatattgtatttagaactatagctcatttaaaggggttaataccaaaaaacggaataatggattatcatcaacttcctgtagaatatagaattggcaatgaaatcgcaaaaaaaagggttcaagaaatttctgctattatgaacgataaatttaattcttggggaagatag

SEQ ID NO: 19973 - DNA, 321 bp, Escherichia coli
gtggagagtaaagataaattgcatctggaagaattacttaattctaaagatgaaaagcaagtagctgagacactcctttatatagcctacaacattaaggatatttcatgggccgaagcaatattcatgaagatggctaaaaattccaatgacgatatatgtgggcttgctttaacttgcattggacacttggcaagaataaatggtaaaatagataaagaaaaaattattccatttctaaaagagaaaatagaaaattcaaatgaggtaatatcatctagagctgaagatgcacttgatgatattaatgtatttacttag

SEQ ID NO: 19974 - DNA, 1209 bp, Escherichia coli
atggacgaaaagaaacttaaagcccttgcggctgaactggccaaaggccttaaaaccgaagccgacctcaaccagttttcacgcatgttgacaaagcttaccgtcgaaacggcgctcaatgcagaactgactgaccatctcggtcatgagaaaaatgctcctaaatcaggctctaatacccgtaatggctactcgtcaaaaacggtattgtgcgatgatggcgagatcgaacttaacacgccgcgtgaccgtgaaaataccttcgaaccgcaactaattaagaagcatcagacacgcatcacccagatggacagccagattttgtccctgtatgccaaaggcatgactacgcgggaaatcgttgccacgttcaaagaaatgtacgacgccgatgtctcgcccacgctgatatccaaagtgaccgatgcggttaaagaacaggtctctgaatggcaaaatcgaccgttggatgcactgtatcccattgtttatcttgactgtattgtggttaaggttcgtcacggcgggagtgtcattaacaaagcggtgttcctcgcgctgggcatcaataccgacggtcagaaagagctgctgggtatgtggctggcagaaaatgaaggtgcaaagttctggctgggtgtactgactgagctgaaaaatcgtggccttcaggacatcctgattgcctgcgtggacggcctgaaaggcttcccggaagcgataaatagcgtgtacccgcagacgcatattcagctctgcatcatccatatggtgcgcaacagcctgaaattcgtgtcgtggaaggattacaaagccgtcaccagcgggctgaaagcggtatatcaggccccgacagaggaagcggcgttgatggcgttggataagtttgcaggcgtctgggatgaaaaatacccgcaaatcagcaagagctggcgcacacactgggaaaatctcaacaccttcttcggttacccaccggatatccgcaaggccatctacacgacgaatgccatcgaatcgctgaacagcgtcattcggcaggcgataaagaagtgcaaggtgttcccaacggacgactcggtgcgaaaagtgatttatctggcgatacagtcggcgtcaaaaaaatggagtatgccaatccagaactggcggctggcaatgagccgttttattatcgagtttggtgaccgccttagcgagcacctttaa

SEQ ID NO: 19975 - DNA, 159 bp, Escherichia coli
atggttcagaaaattttgtcggataaggttatgaatgaaagaacaaatgcgtattactcttattatcttggagagcgtaatatctccgtactgccccttaatgtttatgagcccccggaacgttttatcgcttacataaaaaaaacagagaaaatctga

SEQ ID NO: 19976 - DNA, 237 bp, Escherichia coli
atgtctgaggtttcgattagaaaaaaacttgaaaaagaaaataataactttaatgcattagtgttagatatcagaatgcatcatgcagcaaagatgattacatccactgaaaaacatattaatagtattgcatatgatgttggatataccagtacatcttatttcattcgaaactttaagagctattttggtattacaccgaaacagttttctctcaaggtaaaaagaaataattaa

SEQ ID NO: 19977 - DNA, 303 bp, Escherichia coli
atggttgatttgcctattgaaaaattaattgttgctatagagaatggtaaggttagaggttttgatgagataaaggaaataaatggtgaaaattattttttccaatatgccattaaaaaacaggatgaaaaatacaatacctattttttcaaaataccagaaaataaaatggaagtgttcgaagattatgcaactgaagaaattagtgcgttttccaatatagaagatgcttttaattgctttgaattacaaggtattgatattacaaaattttctcctattagaggattattacctttttag

SEQ ID NO: 19978 - DNA, 360 bp, Escherichia coli
gtgcactaccgttatgacgaatttggccgtgcggtggaaaaggaggggcctcaaggaaccgttgtcacagttaaatcaaaacaggaagcccatgatttattgatggaggcctttcctgatgctcaaaaagtaagagggatcggttcgcaggatgccgccggtattagaaaaaaacataagatggaacaatttaagaaaagagatggtactgtccgttataggaaagattaccctattgattctaatactggtcgtgtatatggtcatgatgaccctaaaggcacagggcatggttctttgcctcatataaatattaaacgttctgatgggacaatggtgaggatagatatagatggttga

SEQ ID NO: 19979 - DNA, 441 bp, Escherichia coli
atgaaaaaactaacctttgaaattcgatctccagcacatcagcaaaacgctattcacgcggtacagcaaattcttccagacccaaccaaaccaatcgtagtaaccattcaggaacgcaaccgcagcttagaccagaatcgaaagctttgggcttgccttggtgacgtctctcgtcaggttgaatggcatggtcgctggctggatgcagaaagctggaagtgtgtgtttaccgcagcattaaagcagcaggatgttgttcctaaccttgccgggaatggatttgtggtaataggccagtcaaccagcaggatgcgtgtaagcgaatttgcggagctattagagcttatacaggcattcggtacagagcgtggcgttaagtggtcagacgaagcgcgactggctctggaatggaaagcgcgatggggagacagggcggcatga

SEQ ID NO: 19980 - DNA, 393 bp, Escherichia coli
atgaagatccactacaagataattatcttcgcgttcgcattgagcgtactgggcgtcatcgtttggtcagcaagccattatcacgataagtatcaggcggaacggctacgcgcagatgctgccgagcagaacgccaacgccgccgaagcgatcaccgccaacgtcattcggtctgtgaacatcatcaacgccattgcagaggccaaccaggatgcaaagaaccagatcacactggagtcacagggagcccaagcagatatcaaagtggctattgagaatgatgactgcgctcatcggcctgtgcctcctgcaactgctcaccggctgcggcaattcgcggacagtttacgtaccggtatcggtagtgcctctaccggcaaacctgacagctga

SEQ ID NO: 19981 - DNA, 801 bp, Escherichia coli
atgtctgtcagtcaagatatttataagtctacacttagagttgaaagtgatactccagagggaacctcggtaggaactgctttctggttttgctttgttatggaaggtggtgaagatattgttccactcttggtaactaataagcatgttgttaacggggcaacagaagttagactacgtctaaacattaccgacagcgcaaatcctgagataaaattttataacctaacaatttcagagggggcaaatgcgttcattatgcaccctgatgataatgttgatatatgcatattgcctatcgctggattgctgaatgagatggagaaaagtggcattagcccagaactcttctttttcacagatcgtcagatgcgtggtaacaattacattactcctgtcgaagatgtttacatgacaggatatccaaatggattatgggattctgtaaacaataggcctgttaccaggaaaggcatcacagcatcatcacctatggaaaactggaagggtaagcctgaattcctcattgatatggcttgtttcggtggttctagcggttctcccgtttatataatgaaccaaggctcatatgctactaatgatggtattgctatgggggagagattaattttccttgggttgttgtatgcagggccagtaacgaatgttagcgggaatattgaaattattgacgtaccaacagtcgctacaccagttgtgcgttctgaaattacaatgaatctcggatttgttattaaagcagagaagctaaatgactttaagcctctcttggggatttaa

SEQ ID NO: 19982 - DNA, 126 bp, Escherichia coli
atgtccgacatctaccaaatcatgttaaccacccaaacaggcgaaacctttacgggtaagatgtcacgacgtcagcgtgagctggttaatggctttatgcagccggctaccgagatgggcgagtag

SEQ ID NO: 19983 - DNA, 1386 bp, Escherichia coli
atgacctccctgcgcgagttcggcgcgatggcaggcatggcccgtgacaaaatcggctctaatcttgcgggtgggcttgcgggttcgctggacaccctgcgccgccatatcctggacaacttccctcgtatcgagcagaccctgacgaaagccataaaaggcattctggcgatcggagacatcatcgggcggctgttcttcaggctaattgagggaacatccagccttatcacctggtggcaatcgctggataagcaaacgcgggagctcatctcgctgtttggcgcgctgacgattgcgctgcgcattctgaacagtacgttctggatgtcgccgattggtctcattaccgcgctggcggcggggattgcccttctgtgggaggactatcagacctggaaggaaggcggcgacagcctgattgactggggcaagtggaagccggaggtcgatgccgcgctgaagatggttcgtgacctgaaagggtctgttaatgaactggcgaaagcgctggcgaaactgctcaatattgacccaaaatcatggtccctgaagtgggatttcagcaacttcatcgaccagatgggcgaattcagcaaaatgctgaacatgatcgccgacctgctcaacgctatcaaagatggccgctgggctgatgccgtcatcatcggcaaacagatacttaatcagggcagcgaaaatccgtcagcgatgccgatggttacagacagcgctaacagtactgccgactggattaaagagcactggggattcgatccccgcagtgtgggccggacggtacgcggctggtttggtgatgatgagccggaacaatatgcacaggctacgaaacgaggagaacggaataacaatccgggaaaccttaattttgctggtcaggcaggggcttctcttgaacgcccgggcgggcgatttgccagatttgaaactgcttttgatggattatgggctcttgctcgtcagttaatgctgtacgccggacggggaataaacagtgtggagaaaattatctctacttgggcacctgcgtctgataataacaacacaactgcgtatatcagggctgtatcgcaacgactgggagtggatccccgggctgccctgaatatgagcgatccgcaaaccatgtcagcattgatgagcagcattatccagcatgagaatggaagaaatatctattctcgagagctgattaataaggctgccgtggcgggaattagtggcaaaatgacagaggttaaccagcaaaatacctaccacatttacggtggtggagatccgcacgctgtcggtaatgaggttgcacgtcggcaacagtctgcaaatgctcaggtcatgcgaagtaatcaggtgagggtgggttag

SEQ ID NO: 19984 - DNA, 342 bp, Escherichia coli
atgaggggtattatttttctgttagctgtcttttctgcgtgcagcgcgtgggcggatggcttcacggttaaatgcggtggctacactatggttgcaaaccagggcgagttatcgacaatcaacggtgaaagagttacctctcaaaaaatcaccgaactgggtaccaatggtttgaaagtagacatggggcttatgcctgccaaagacggtaacaactacggctttgaatacattcgtcgccctggtaccgaaacgcgattcctgaatgtccaactgctgcagaacagcatggatgcgccgaaaatcatcggttcctttccatgcaaaaagattgttgattaa

SEQ ID NO: 19985 - DNA, 240 bp, Escherichia coli
atgttcggatttgataaattaataactccaaaaatcatcaacgttctgtatggcatcacaatgttacttctggttgttgccgccattataacgtttgttaatgggaaggctgctggcgctttagtgcttttgttatgtgctgtattttgccgaatattctttgagtgcatcatggtttcatttaaaaacaatgagtatcttcgccgaatagctgaagcgttagaagcaaacaagcagtaa

SEQ ID NO: 19986 - DNA, 639 bp, Escherichia coli
atggccagaaaacgcaaatccagaaataacaaaaatatcggacatggggcaatcagtcgcattggtagaccgcataatccttttgagccgcgccgcaatcgctacgcacaaaaatacttaacgttggcactaatgggcggtgccgcttttttcgtattgaaaggttgtggcgatagtggcgatgtcgataacgacggcgacggaacgttttacgcgactgtgcaggattgtattgatggcggtaataattcagatatctgtgctcatggctggaacaacgccaaagcggcgttttatgccgatgttccgaagaatatgactcagcagaattgtcagtctaagtatgaaaattgttactacgacaacgttgaacagagttggatcccggttgtttctggatttttgttaagccgggttattcgtaaagatcgcgatgagcagtttgtttataacagcggcggttcctcttttgcttcgcgccccgtctggcgcaacacttccggtgattactcctggcgctccggttctggcaaaaaagagtcttattcttcgggcggctttaccaccaaaaaagcgtcaaccgtttctcgcggcggctatggtcgttcttccagcgcccgtgggcattggggaggctaa

SEQ ID NO: 19987 - DNA, 684 bp, Escherichia coli
atgctgaaaaccttatcattcaatgaagttttgggaatgggagattttgatttttatcagaatgaccgtatgtcagataagcaaactttcatagcgcttaaggaagttgttgaaagaaacaagaataataaatttttcattggagtttacccatctggaactcatcatggtttagatagccctgatttgcgttttagagatggttcaaattcttattataacaaattttataattttgatcatcaagttggcaagttcatagattatcttacgtccacaggtcttataaataataccttggtggttattacggctgatcattcaactttccctacaccacaatttaataaatcttttagttcaaattctgattattttgttgatgcaatacctttaataattttgggggcaggaatagagtctaaaaaaaataatgcgcatgggaagaatagtttagcattggcaccaacgatactaaatttattaaatattaaccattatcctaatttctttttaggctgctcgctcttggatgtaaaatgccaaagtacttttagtcatatatcggcaattggaaattctttttttaaaaccggcgataaaaagtgttcttcagatgattataacgttaaaaaattagataattctagcgatataattaatttctataatgttagtggttaa

SEQ ID NO: 19988 - DNA, 312 bp, Escherichia coli
atgtcgggagacgagaataaactcaagaaatatcgtttcccggaaacactgaccaaccagagccgctggtttggcctgccactggatgaactgatccccgcagcagtctgtattggctggggtatcacaacatcgaaatatctgttcggtattggcgcagcggttctggtttatttcgggattaaaaaactgaaaaaagggcggggcagttcctggttacgtgacctgatttactggtatatgccaacagccctgctgcgcggtatttttcataatattcccgattcgtgtttccggcagtggattaaatag

SEQ ID NO: 19989 - DNA, 567 bp, Escherichia coli
atggaacacggtgcccgtttaagtaccagtcgtgtaatggccatcgcctttatatttatgtcagtgcttattgttctcagcctctctgttaacgtcattcagggggtgaataactaccgtcttcagaatgagcaacgaactgccgtgacgccaatggcatttaatgcgccctttgccgtgtcacagaacagtgccgacgcttcttatttacagcagatggcgctgtcatttgtcgccctccgtctgaatgtttcagcagacactgtcgatgcctcacaccaggcgcttctgcaatatattcgtccgggtgcacagaaccagatgaaagttattctggctgaagaagcaaagcgcattaaagctgacaatgttaactctgcctttattcagacaagtgtccgtgtctggccacaatacggtcgcgtggaaattcggggtgtactaaaaacatggataggaaattcagatccttttacggatatcaaacattacatccttattcttaagcgggaaaacggggtgacctggctggataatttcggggaaacagacgatgagaaaaaataa

SEQ ID NO: 19990 - DNA, 387 bp, Escherichia coli
atgaccacaacgcaaaaaacgactgacgttacagccccccgacgcaaccactggtggtggacggtgccgggatacctggcaatggtgttactgaacgcagccatcagttacggcattgtcagactgaacgcaccggtgactgccgccttcaacatgaaacagaccgtggatgcgttttttgacagcgccagtcagaaacaactgtcagaagcacagtcaaaagccctttcagcgcgttttaacacggcactggaagccagcctgcaggcatggcagcagaaacaccacgcggtcattctggtgtcgcctgccgtggtacagggggctccggatatcacccgggaaatccagcaggatattgcccggcgaatgagggcggagccatga

SEQ ID NO: 19991 - DNA, 306 bp, Escherichia coli
atgttcttttaccgggggcaggaccccgtcgacgggcagctggcgcaggtcattaatggcttcagggatacctatggtctgagtgttattcccgtttccgtggatggagtgattaatccactgttgccggattcccggactgaccaggggcaggcgcagcgcctcggcgtgaaatatttcccggccatgatgctggttgacccgaaacagggcagtgtccgcccgttatcatacggctttatttcacaggacgacctggcaaaacagttcctgaacgtttctgaagactttaaaccgaatttttaa

SEQ ID NO: 19992 - DNA, 402 bp, Escherichia coli
atggataaagaaaatagtagtgtttctaaaggatggttaattgcgtctggtgttgcggttattttactgaccttattagcttttatgagttttccggatccggatgtcagtatgaatcgctattatagctggctgatgaatgtgttaattctgagtgtgaccggggtaatgtatgtggcgctgtctgttgtaatggtaatgctttattttctctacgagcgtaacagcaggttattgtacttgtctgtgcttgccctaatcattgcagcaggtatctggcttctcagatttctggatgattttttaatgatgcaggcatttcatgttgctctgtttgttttatgggtgttcctctgttttttgtacattcgctgtaaaaatgaaatgagtatatcggaataa

SEQ ID NO: 19993 - DNA, 273 bp, Escherichia coli
atgacgggttatgaattgaaattatggcgtcgtgggatgaactggacgcaggagcgagccgccgaagaatttgggatatcgttggctacatataagcgatatgagaagggagagccgccgagggtcattgagatggccattcgcgttctgtcgtttgacgatatggttaaggaactttcacaccttgataaagatgcgattctgttaaggctgcaaacccttgtatgggaaaaggttaaagtgtcgtcagaattggaacaagggatcaaatga

SEQ ID NO: 19994 - DNA, 381 bp, Escherichia coli
atgagcatgattaaaatccgcaaaaacgctttccttaaaattcaaactatcctggctggttctgttggcgtgatttgccgttcttcttcaagccgcatcgatgacggctacgatgatgagtaccgtgtgtcctcgtgcgatgaggctttaacctggctgaaggagaatcaggaacgtgcccaggtatatctggaaacagagaacggcaatcagatgctgcgtattagcggtcgttatggatttgaaactacattcatggcctattttaatcaggcttactttgacaaggagctggcctggtacactgatcgcatgagcaaatgcgagccagccccgattacaccgccgaacaataaaccatttttattcctcgttaagtaa

SEQ ID NO: 19995 - DNA, 300 bp, Escherichia coli; identical to SEQ ID NO: 16698

SEQ ID NO: 19996 - DNA, 348 bp, Escherichia coli
atgtggacggtactttttagccagcgatttgacgactggctaaatgagcaagaagtcgctcttcaggaaaaggttttggctgatttgaaaaagctacaggtttacggacctgagttacctaggccatatgccgataccgtaaaaggttctcggtacaaaaatatgaaagagcttcgcgttcagttttctggccgtccaataagagccttttatgcgttcgatccgattcgccgggccatcgttctttgtgcaggagacaaaagtaacgataaacggttttatgaaaaactggtgcgtatagctgaggatgagtttgcagcacatctgaacacactggagagcaagtaa

SEQ ID NO: 19997 - DNA, 264 bp, Escherichia coli; identical to SEQ ID NO: 16696

SEQ ID NO: 19998 - DNA, 288 bp, Escherichia coli
atggataaagatactgttttaaaaatgttgaatccggcttgtttaaaaaaagcggatgaatgggaatctcctacatgtggagaagttcgggcagtcattggcctgaccggaatgagcggctcgcagttggccaaaaaactaggcttaaaagatagtcgcaatgttcgcaactggcagatgttaaaggagtccacatccagatccagcattccgtatgcagcctgggcgctgctgtgttacttcgctgggttagggttaatcttcattgataacaaaacagatgtttga

SEQ ID NO: 19999 - DNA, 837 bp, Escherichia coli
atgccgtctctacgttccgcttacgtttgtaatttgtcgccggagttccagcctccaaagcaccatacgcacaagctgccgctagtgttatctgatgctttacagcgcattaatgggcgtgatcttacgtgtgaggttgcgttctacgttaatcaaccgtcagagcggaagcgccggataaacgagcatcgtcgtcgggcgattaatgctgtgatcgctgcgattttgcaccatgtaaacatcatttctaagcgggttctggctagtgctgaggcgttggctgatttttgcggcctgtctaccgtatccgaagctgggaacaagtctataacgcgctgtacaagggcgttgtcgcaactgaaagcgttaggttttattgattatgaacgtcgctgggatcgggtgaataaacagtattggccagcgaaaatagagattcgtgatcaactgctggaaaccgttggtattactgaacaagcatggagacgtgcggttagccagaaacttaattacttcaatgcgaagaatagcgaacggcttaaaaaagcgataacggaggctgattataagcgtattgttattcaggagcagatggagaatgtatggcgtcagaggaagacggccagagagataaaggcaaaacagaaagcagcggagagagctgcgcgtcttgttcaggaaaagggagaggccgaacttcgtcatcaaatcactagagaggttagccaggaatttgctgatggcatgtatcctggtgctgaccttgcatatttacgatccctcgttgagcagcgttataacaggctaagaaagacctggaaatcactccaacattaa

SEQ ID NO: 20000 - DNA, 714 bp, Escherichia coli
atgctgataaatctgtgtcacccgccggggatgcgccgccagttcataatgcagacggatgcacggacgctgctgttcaccgctgatttcagtgatgcgtccccggtcgtcgtagtacagattcagacagttgctgttgcggtcgcccagcattttcagccgctggcgctgcgggtggtgcgggtcggcctcaaacagaaaaaactgtccatcatcgctgctgataagccagtgcccctgctcaccccgccgtaccgccagtccttcgccggggctgtaaaacccgccccccggcagtacggcttccatctccaggcgtcgtcccatacccgacacaaaggtcatgcagttttcgtcagcagtacccggcgtgcgcccgaggctgacttcatacatcacgctccagccctgcccgaacatcccttccgtgcggtcgtcacgactgctgtacacgcgctgccagtccagcggaaagtggcccggcagactgaaatcgaagtcatcatcaccggccaggtatttggccccggtggcggcactgaccggatgcggaagggctgtggcggccttctgcgtcagaatgctcatcccgataccggcagcaaaacaggcgatttcagaaagcattttacccgggcgaagaaacatcagcgccacggttgccaccagggttatctgcgacctgccgcttctgatatccctgaccaccagtaa

SEQ ID NO: 20001 - DNA, 879 bp, Escherichia coli
atggacgtattccgtacggctaccggctgtctcctttgccgtgagccggcccgccgcgtcacgcgccagccggtgacggatttcaccgccccggtccccggtgaacaccacttccgtgaccgcgttcagcgcgttgtagcggtacgcctggcggcagccgtccgggtttatctgctccgccagacggtccagcacgtcatggcggaaccggtagctttctccgttctcgtttgtcagcgtgaccagacgcccgtaagcatcgtacccgaacgccgtcctgcgccccgtcgcgtctgtccggctgcgcacccggccctgcccgtcccgctgccagcgcgttatcctccccatcgggctggtgtacttcaccagcctgcccgccgcgtccgactggtaattcaccgtgcggccgtccgccagtatcacctccgtcaggtggccgctgtcgtcatacccgtagcgcgtgctgtgactctccgcatccgtcattctgatgagccgcgtgcgttcgtcgtagaaccacgccgtctgcgagccggagcagtccgtgtgccgcatgagctgcccgtcttcgttccactgaaggtatttattccccccgcgcgcatccgttatctgcaccacctgaccgtggcggtcatactgataccgggtgttctgctgcagcgggtcggtcacggcaagaaggttgccgtgttcatcgtactcacagcaccagctgttccccgccgcgtccacctccgtttccggctggtgccacaccgggtgccactgtgtctgtgccacccgccccagcgggtcgtgcgtctccgtgatatgcccctgccggtcatacacatagcgccatttgccgccctgcgcatcggtcattcccagtaa

SEQ ID NO: 20002 - DNA, 393 bp, Escherichia coli
atgccaggtcttgcctccgctctttgtatcaagattcagcttgtctttcagcgtgaccgacgcatccttgcaactgacaaaattattattactgtcatataccccccgcagcgggctgggccgggaaaaaatcaccatataggggtcatcagccaccatcaggtcttccagcgtgtatttgtggttcaggtaaatatcacccagcacgcagttctggacgtagtcctgaaacagattgatgatttccggattccgggacaggaaatcggtgcttttcacaatcaggttcgccccgaacagcatgcctgtcttgctgtaagtggcgctgtcaggctgagcgaacaccatctcatagccggccaccatcgcatgtccgatacgggtcgtcagtga

SEQ ID NO: 20003 - DNA, 378 bp, Escherichia coli
atgaaagaaaacaaaaagaatcgaaaattaaaaatcagaaaaattaaacgggatattgagcgcagttgtgataatgccgaaaaatacttctggctttttgtggttttctttgttgccggattgcttttatggcacgggatgcatgctgttttcagcgccggtattgattcatggaaagcggtcccggaattaaataattcgatttatatgtggagcatcctgatgtatgccattccgtatacgttatatgcgcttgcagttggttttcttgttacatttttttctgtccccaatgtacgaattaatatacggaaacatcgggatattcctgttgaaatgtcgtatgcgccgggagaacaaattaagggagggcaataa

SEQ ID NO: 20004 - DNA, 420 bp, Escherichia coli
atggaaacttaccctgaccctgatgatatccggaaaaacacagcagacatactgaaagcgttaaccgtggacaatattcctgagcgtcatggctttacggaggagctggcatcgctgaaaaactgcataaacgaggatgagtattgctacatgacgttttatgaaacggggtacgctttcctgaaagccttactgagaacccggctgaggcttaaaagaaccgaccctgcgcattcgttgctgcccctcatctcttcgtcggtggaagcactcagggctcagcttaaggaaaatgaagcttatgtccgccttttaatcgggatggatgcggtctcccgatggaccgggcctctgttctgctttgccgcgctgacgatactgattctggtgggaactgtgtttgcacacgtatggttttaa

SEQ ID NO: 20005 - DNA, 1395 bp, Escherichia coli
atgcgcgctagtccattttttcggtcagttaaatatggtattgtattttctatagtaataatgatacttacttttattgtaaggcagtgtattattaattcgtttggtgaaaatttaacaggttattatttgttaataaaccaattagtcggttatctaaatttagctgaattgggtttaactacggcatcagtatatttattgttcaagccgttgaattctgaaaataaatatgacattgttggttatttttatattattcacagaatatttaaatttattgcatcagcaatattatttattgggctaacactctcttttattatgccctatttagtcaaagataatataaattggcatgatattcacttggctcgagttattacttttttaatacaaatagttgtgcttaaaaatggtggtggttttattatttttagtgcgttagagattttatatgcgctaattcaatatatactatttagatattatgttctaaaactgtacggggcatatttatatagtaagataacactatcaaaagaacttccgctaataaagcaaacaataataaaagagataaaaaagacatttatccacaagttatcaggtgttatgatctttaatacagactatataattattagcatttttataggattatctacaataacgatatattcatcctatttaatgttcatacaagcttcagctataataattggaacaattgtaagtccattgggggcatacattggaaattttttacatagaaccgacagtaatctaacgtatttaaaattcaattcaataaatacgatttttttcttattggcatcgattggttgtattatatacaacaatatctcaactccttttgtacaactgtggatgggcaaagatatcattttttctcaagatattgtggcgttgctagcggttaactttttttgtttagtagcgaggagcgctgtagatatttttaaggtcgcatatggatatatgtctgatattcatttaccaataattgaaggtactttaaatttaattatatctttatctgttatcattatcatgctggcgaggccctggtatttatataaagaggccttcaatttatgcactatagatttcataaaagatcatattcaattatgggtaatatcattaatgattctcatcactttgttaagtggtcgagttaatgatatgtatacacttttcgagaaatacttaatgaataattgggatgttagcaataagctaattgaacaacttctcacacatagtctctttttgattttatcaacaatatttgtagtaattatctatattatagtcacccctaaaaattgccttgcttcagtaaaaatattaaccaataaagggttataa

SEQ ID NO: 20006 - DNA, 867 bp, Escherichia coli
atgaatccaatacctattttcataatgactagaaatgatggtgtttatctgcaggactgtttgaactcaatccttaaaaataccgtatacccatttaatctgtatgttattgataataactcttcagataaattacatttaaaaattcttgaggaatataaaactcggcagaatgtgaatgtaataagaaataagagtaacttatgggttttaggtctaaataagcatcttgagaaagttaaaaaggaaagtgattcttcttattttgtgcttactgacggtgatattatttttcctgagcctggaataaatggatgttggttgactcaattagtaatatatatggacacgtataaatgcattggtaaaataggtatgtcactaaattgggattcgataagggatgacccattctatgaagaaatttatgagcaagaaaaaaaattatataataacaataaaaaaatagaaaatctttatatatcaccagtagatacaaccgcagctatatatcgctgggattggtctatcgaaggatataaattttatcctgatcatatacgctatcttagaccggagctatactcatgtaggactccaaaagaatttaatgcaaaacatttaggttggttagtttataaaaataataatggccaagcaattaaaaaactagatgagaaaattaaatgtttcaccttagttggagctgatataaaaaaaacacaactaaaaaaggctagcctgaaggtgagaatgtttaattctttatgtggaaaacccataaaatatttttggagtatgcgacgtattttatatactatattctatacccttaaaaaaggaatttggctttatgataatcattga

SEQ ID NO: 20007 - DNA, 279 bp, Escherichia coli
atgataccatattttttaatgttcgcatgccttgtgatcttttctttatttaaaggtaatgacagaagagtattaaatgcttctatgatcatccttggcattttttgcgccatgaggggaaacaatgttgatagagactatgagacgtatataagtatttatacatatattatagaaggttatagctatgctattgagccaacctttcatctattatcaataatttcaaatacccctttctgtattgctctatttttccaatgtgtatttactacatga

SEQ ID NO: 20008 - DNA, 684 bp, Escherichia coli
atggctgtactgcagattgaccgatgccttccagtcctcgaagttcttgttgagtgtgacggtgtacagctccttctcacgtcccgtaaaatcattccggtaacgggcattgaggtactggtccatcgtcatgtaattgcgttcagagaagcggtaacccgcaaaagtgatatccgtattcacttcatcaaaacgtttggaatagctcagacgccaggattttccctgttttgtgtcataacccggtatacgggccacggactgggttacgtcagcggaaacagtgccgaacttactcaggtcccggcccagccccacagccagagcgttataatccccggcaacaatactgcctccataaagcgaccacgtgttactgataccccaggatgcctcaccggcagcaaagaccggaccctccatggtgtgctcataggtacgcgaacgaccggaaaccagcttgtaacgaacctggcccggacgggtcagatacggcacatatgccgtgtccacctggaacgtttttttccgcccgtcctgctcgataacctcaacatccagacgaccacgcacggagctgtccaggtcctgaatggtgaacggacctgccggcacggtggagtcataaaggatgcgtccctgctgcgaaatcacgacgcgcgcattcgtatccgcaatccctga

SEQ ID NO: 20009 - DNA, 177 bp, Escherichia coli
atggaaaaagaacagaaacaatgtggcccgcagcttcccttgcatcaggatgaagctccccctgcattccaggtcacttacagtatagagaaaaaggaaataacagcagagcaatacagagactggcaattaattgccgccagtctcagaaaaaagataaatggagaaagaagttaa

SEQ ID NO: 20010 - DNA, 240 bp, Escherichia coli
atgaataatagcacatcagaagaccgccctgatttttcattcagttatatggacaatcagagagcagatgaaataaaggctttaaaaatattattattcagcatcatcagaaatatgcctcatgatacagccatcagtattattaataacatcgtaaatactgataataatgaggcgctcaatagattgtgtctggagataactgacgccatgttaaacacaacgaaaatcgttgattaa

SEQ ID NO: 20011 - DNA, 312 bp, Escherichia coli
atgaaggtgagggtaataagagataagcacgcagaggacttcagaaaaatatgttttctgtttatccggttaacgagcaatgtattaaagctgtttccttttgctatggtgatgtgctctgtggtgtggttttatttttgccctgaacatattctctccgacatcgttaacgactggcacgatgcagatacactggaaaaaatacggattgtcaggctgtatatgaagatgtcttttattctgacagtggtgggcgttattatttcatatctttcttcagataaatttatgcccgttaagcgcaggaaatga

SEQ ID NO: 20012 - DNA, 252 bp, Escherichia coli
atgtatgcaggtcaaacaaaaaatctatatcagagaatgttgcaacatgctagaagtgggaagttaactcaggcaatgttggattcgttgaattttgataaatatgctggaattagtaaacaatggttaaataatttagaggcaatgaaaatagctaaaaatggaggaagaggtgtaaccagtaatgaaaaacgaccaccaaatacaggaaatgtttcagatcaagattttagagtgaagggagagtgttga

SEQ ID NO: 20013 - DNA, 852 bp, Escherichia coli
atgagactagtggaaaattatggtgtgcggggaaattgtgtccttgtgtatgaaatgcatgatgagacaagtcatattgttgacacgatgaaagaaaagaaagttaacgggttagttttgtcaccgcttataactgatttatcatttcttgatgaaattcatttcattaatgaaatatatgtcacaggcaataaaataaaggatatatcacaactgtattcgttgagaaaaatacaagtcatccatcttttgaatgatgataaaatgagacttgatttatcatgtttcccatttttaaaagaggctgtattaataggtcgaaatggagttgataatttgtttaatcacagatctctggaaaaaataacattgatagattttaaagaaaaaaaagagcatgttgtggggagatcattcttgcaatcattagaaataaaaaatagcaatattcaagcaatccctaatttatcatctatcaagactttaaggagcatcaagttatctggattatctaaggcttcggacacggcttttttagatggtttgaaaagtatagaagaagtgtctttatctttatgcaaaaaaatggcaatgtcaatcattgaagatgtaagtaaattaccttcaattagaaaaatatctttttcaaaaatgggtgatattccaagcgtaactaaaataagtaaccttgttaaattggaacgattgtttataacggaaaacacaaaaattacagatgggaaaatcagatttctgttggatatgaaagcattgtcttatcttgtaattcaaggtttcaatcattatgatgtcaatgtttgggatttaatgaatctaattaaaaataaataa

SEQ ID NO: 20014 - DNA, 144 bp, Escherichia coli
atggcaaaaacaaaacaggaatggctgtatcagttacggcgatgttcatcagccaatacgctggaaaaattattcataaaaacagagacagtttatcaaacagtgaacgtgaatcatttaattcagcagcagaccaccggttag

SEQ ID NO: 20015 - DNA, 318 bp, Escherichia coli
atgaaagaaattcatcttaacagtgacgagcaacatttatttggcagagctgcactgatggtcaggtatgaagatgaaaataaaacgccagtgacgcctgaacaaataattaccccccgtcgtcgggaggataaacagaatgatctctggacaacctggcagcgggttcaggagaatatgataaaaggtggattatcggggcgaagtacctccggtaaaaataccaggacaagagccattacaggtattgatggtgatataagaatcaacaaggcgttgtgggtgattgccgaacagttcagaaagtggaaatcatga

SEQ ID NO: 20016 - DNA, 507 bp, Escherichia coli
atgcgattagcttcccgttttggtcggtataactccatccgccgtgaacgtcctttaacggatgatgaattaatgcagttcgtgccttcggtattttccggtgataaacatgagtcccggagtgaacgttatacgtatattccaacaatcaatatcatcaataagttacgtgatgaaggtttccagccattctttgcctgtcagagtcgggttcgtgatttgggacgtcgcgaatacagtaaacatatgttacgtcttcgcagggaagggcatattaacgggcaggaagttcctgaaattatcctgcttaattcacatgatggttcatccagttatcagatgatccccggaatttttcgttttgtctgcacaaatggcctggtgtgcggaaataattttggcgaaatccgcgttccacataaaggtgatattgttgggcaggttatcgagggagcgtatgaagtgctcggtgtctttgataaggtcactgataatatggagcgatga

SEQ ID NO: 20017 - DNA, 732 bp, Escherichia coli
atgaaaacaaaaaaattaatgatggttgcactggtcagttccactctggccctttcggggtgcggtgcgatgagcacagcaatcaagaagcgtaatcttgaggtgaagacccagatgagtgagaccatctggcttgaacctgccagcgaacgcacggtatttctgcagatcaaaaacacctctgataaagacatgagtgggctgcagggcaaaatcgccgatgccgtgaaagcaaaagggtatcaggtggtgacttctccggataaagcctactactggatccaggcgaatgtgctgaaggccgataagatggacctgcgggagtctcagggctggctgaaccgtggttatgaaggcgcagcagttggtgcagcgttaggtgccggtatcaccggatataattccaattctgccggtgccacactcggtgtgggccttgctgccggtctggtgggtatggctgcagatgcgatggtggaagatgtgaactataccatgatcacggatgtgcagattgcagagcgtactaaggcaacggtgacaacggataatgttgccgccctgcgtcagggcacatcaggtgcgaaaattcagaccagtactgaaacaggtaaccagcataaataccagacccgtgtggtctcaaatgcgaacaaggttaacctgaaatttgaagaggcgaagcctgttctcgaagatcagctggccaaatcaatcgcaaatattctctga

SEQ ID NO: 20018 - DNA, 216 bp, Escherichia coli; identical to SEQ ID NO: 5262

SEQ ID NO: 20019 - DNA, 696 bp, Escherichia coli
atgacactgcccgctgtccgggtacatgttcaccatctggtaacgccagcgttctttgggaaggattggggacggatattcgtaacagaccgccgtgttctgcccgatggtgttcataatcatgccctgacggtgcagcttgaacgccatccgctcactgaccagcagggaggactgcagcgggctggattcattgctcacccagccgttgaacgggtacatgctgccctgcgaaccggcacaccagaacagaatatccagcggtttgttaaaggcactggcaatcgcgtccgccgcacaggcgccctgtgctatcgggttggcaaaaatgaccgcctccgggttgagaatggtggtcaggctgctgtccgtccatgtcgggtcgatttcagagatgtacccgatatccatatccccgcccatcagacacccggcagacgtgatgatattcagccagtacgtcagcggatatttgtaccagtgaacgtgatagaacgcgccgttcacctgcctgtcatcttttttggccgttccctgtccggtttttcccagttccgggatcgtcattcccagattaaccatacatcccggcgaccgggtgacatccgtcagggccatcggctcccagtacccgatagccagtccgatacgtttaaaaatggggggcggggccgggcaaaactggatcggcattga

SEQ ID NO: 20020 - DNA, 300 bp, Escherichia coli
atgaacccgctgcagtatgttccttttaaccagacgctgtatttcatcaatggcgatgatccggcgcaggtggcctggatgaaacgccagacgccgcccacactggagagcaaaattatcctcgtgcagggcagtatcccggagatgcagaagtctctggacagccgtatttactttgaccagaacggtgcgctctgccagcgtctcggcattgttcaggttccggcacgggtgacagccgcctccggcgaacgttttctgaaagtggagtttataccggcagaggaggacagaaaatga

SEQ ID NO: 20021 - DNA, 858 bp, Escherichia coli
gtgactgagcttcaacaaacgtattaccgccaggtaaagaacccgaatccggtgtttacaccccgtgaaggtgcaggaacgctgaagttctgcgaaaaactgatggaaaaggcggtgggcttcacctcccgttttgatttcgccattcatgtggcgcatgcccgttcgcgtggtctgcgtcgacgcatgccaccggtgctgcgtcgacgggctattgatgcgctcctgcaggggctgtgtttccactatgacccgctggccaaccgcgtccagtgctccatcaccacactggccattgagtgcggactggcgacggagtctgctgccggaaaactctccatcacccgtgccacccgggccctgacgttcctgtcagagctgggactgattacctaccagacggaatatgacccgcttatcgggtgctacattccgaccgacatcacgttcacaccggctctgtttgctgcccttgatgtgtctgaggatgcagtggcagctgcgcgccgcagtcgtgttgaatgggaaaacaaacagcgcaaaaagcaggggctggataccctgggtatggatgagctgatagcgaaagcctggcgttttgtgcgtgagcgtttccgcagttaccagacagagcttaagtcccggggaataaagcgtgcccgtgcgcgtcgtgatgcgggcagggaacgtcaggatatcgtcaccctggtgaaaagacagctgacgcgtgaaatctcggaagggcgcttcactaacaatggtgaggcggtaaaacgcgaagtggagcgtcgtgtgaaagagcgcatgattctgtcacgtaaccgtaattacagccggctggccacagcttccccctga

SEQ ID NO: 20022 - DNA, 381 bp, Escherichia coli
gtggaaaaattaaaaattcaagataaggtgatatttcatggttgggtagaaaaaccatactctttttacttaaattgcaatgtatttatttgcccgtcaaaatatgaggcatttggttttattttcgttgaagctgcttattttaaaaaaccaataataactactaatgtagaaggtattccggaggtcgtggtagattcgaaaatgggctatttgattaagccgggaaatttcctagatttatcaaagagaatgacaaatttactagagtctaattctttatgtgtagctatgggtgaatatggtcataaatatgttacaagtaatttcgatattgagaaatgtatcgaaaaatatcaggctgtatatgatgacctttga

SEQ ID NO: 20023 - DNA, 507 bp, Escherichia coli
atgaatcttgtctttatacttggcagtgataataattttttcaattacggaatgcggttgatatctgatattaacaaaacatttcgatgcatagattttacagagatcgatgacatagtcagagctgattttgatacaaatgagatttatcttatttgtgatattaaaaattattatgcatatagtcttctgttatccggaaaatcgataaaatgtattgagactaaaaatattagaatacatcatgactctatctatattcataaaaataaagaatcggtaagtgaagcgataaattccttaaataatattgaaatggtgattttataccttttctattttcatggtaagagtgtaagagagatttcaaaaatgactaatctctcaaaagaaaaaatctattatcgagtcagtcgcataaaagttaagttggggatgaaaacaaccaggaaattacccgcattattaagaattttctttaaccaaacaattgaacctgagtattga

SEQ ID NO: 20024 - DNA, 348 bp, Escherichia coli
gtgacctttgagcagaaaaaagcccgggccattgccctgatggacagcaaaaagatgtggcggagcaattatgcccctcctcttctgcgtattctatggcggctgggtatccggcttccgccattaccctttatgccgttctggcaggtcacggtgctgacgggggggttatggggcatttcctggggatgtgcaatgtggtttatctactgggggccgtcaggaatggtcgcaggtgaggccattattataagtatcacgggtggttttttgttcggactgtgcatggcctctttccactggtggcgcaggaaagttaaccggctgccaccatgggatgatgtgtaa

SEQ ID NO: 20025 - DNA, 258 bp, Escherichia coli
ttgcgcctgagcgttctgctgtggtgcactccccaacatctgcacggtgcccgtggtcttaacaagaatttcagtgacgtaacgggtgataccattatcctcccagctacgggtgcgaagctgaccttcgatgtagacctgcgcgcccttgcgcagatattcacctgccacttccgcgagcttgccgaacagcaccacgcgatgccattctgtctgctcccgcatctcccccgtctgtttgtcacgccagctttctga

SEQ ID NO: 20026 - DNA, 258 bp, Escherichia coli
atggcagagaacaaacctgacctgccggatggcaaaacagagctggctgccagggaaattgccgggcaggagcgtgaccgggctgccataactgaacgggaagccgcgctgccggagagtgtactgcgtgaaccacaacgggaacgggaagcggtccgcgaggttgcccgggaaaacctgctgcaggagcgtctgcagcagatggagcgggatatggttcgtgacctgcagaaagagaaaaccctgggcggagactga

SEQ ID NO: 20027 - DNA, 528 bp, Escherichia coli
atgaaacacgcgccgcaggatgcagaagctattctgacaaataccagttcaccggagattgcagaacgccgtcgggcgatggcctggacttttgttcaggaacaggtgcagcctggtgttgataatgcctggcgtgaatcccgaggggacatcggtaaaggaatggagagcgtaccttcgggcggtggcagccagaatattattgctgaccatcagggacatcaggccattattgagcaaagaacgcaggacagtaatatccgtaatgatgtaaaacatcaggttgataatatggtcacagaatataaagggaatataggtgatactcagaacagcatacatggcgaggaaaatattgtaagaggacagtattctgaactgcagaatcaccataaaacagaagcattatctcagaataataaatataatgaagagcgagaaagtcaaaagataatacctgaaccatcaggagaggctgtgaaaaaaatgattgatgataaaaaggaacgactgaaggggccattatga

SEQ ID NO: 20028 - DNA, 216 bp, Escherichia coli; identical to SEQ ID NO: 5262

SEQ ID NO: 20029 - DNA, 234 bp, Escherichia coli
atgagcgaatatttcagaatacttcagggactgcctgacggtccttttacccgcaaacatgccgaagccgttgccgcacagtaccggaacgtctttatcgaggatgatcacggcgaacagtttcgcctggttgtccgtaataacggtgcaatggtctggcgtacctggaattttgaggacggtgccgggtactggatgaaccatgtcatccgtgatttcgggattcttaagtaa

SEQ ID NO: 20030 - DNA, 222 bp, Escherichia coli
atgaaaattatcacccgtggtgaagccatgcgtattcaccaacaacatccgacatcccgtctttttccgttctgtaccggtaagtaccgctggcacggcagtgctgaagcgtataccggtcgtgaagtgcaggatattcccggcgtgctggctgtgtttgccgaacgccgtaaggacagttttggcccgtatgtccggctgatgagcgtcactctgaactga

SEQ ID NO: 20031 - DNA, 186 bp, Escherichia coli
atggcagaaaggttcgtgaaaacgatgaaggaagactacatcgcgttcatgccgaaaccgaatgtaagaacggcattgcataatcttgcagtggcgatcgaacattacaatgaaaaccatccgcacagtgcgttgggttatcgctctccgcgagaatatcgacgtcagcgggtaacgttaacttaa

SEQ ID NO: 20032 - DNA, 744 bp, Escherichia coli
atggcaactacatgttcagttatattgattttggagtcctttgatgtttatttcggaaaagagagtgtgtttctggatagaggtttatctgtacttgtcgactctagctatagagattttttcctgacatatcctgaaagagtgatagtggcggattttggcgctgagtttattagtcgctatttgaaagctaataacttaagggatatttctgattgtagggaatatccatcttatttaaaaataaactttgctgacttcagtttaattaaaggattaattagttgggctaatcactgtgctgaatacatagaaatttttgatgagtctattgcttttacatgtctctctgcattttcttctgaaaaacaatttggagtatttctgtttggatgtttgaaaagcacaggggctaaagttaaaacgattattcatacggatttatctgcaccatggcgtcttaaggatatatcatcaagattatatctcagcgaaagtttactaaagaggaaattgaaagaagagggggtatcattcagtaagatcatacttgatgagaggatgcaaatggctgaatatttactcagcactcgttgttatcctattagtaaagtagctaaggtctgtggttatgccagtgtctcatactttacttatgtatttagacgttattttggtgtttctccaagtcaatactctcagaggagttcagaaagtaaaattcttactcaccagggaatctga

SEQ ID NO: 20033 - DNA, 1704 bp, Escherichia coli
atgaaattaattcttaagcaatacttggcttcattaaaagaacgagcagagttagatgctatactgccagatttgttgagcagtatggggatgaatgtgtttatttcgccaacccgtggagtgaaagagtatggagtagatatagcggctgtaggccaaataaatggtgaagagacaaaagtctatttattttctgttaaatctggaaaccttactcgtgagacatggaatggaaacgcagatcaggctcttagaccttcgttagatgagattcaagattcatttataccaagtcgtttaccgcccgaacatagagataaaaaaatagttatttgcttatgctttggtggagatgttagctcagggatcaggcaagaggtgtctgggtatgaaacacgaaatactcaaggtaatatttcttttgaagagtggaatggtgataaaatatctgagcttatccagcagcatttgttgaaagaagaattactacctagttccagtcagaccttattaagaaaatctttggctttacttgaagaaccagagacttctagcaattacttctttctattgattaatgatgttctgaaaaacgctacagattcagattctgttgcctcatcgataacacggataaatgtttgtctatgggttttatttgcttggtgtcgtgatggcgggaatttagaatcagcatatctttcatcagaacgagcattgctgttagcttgggataaagtaaaagaacactataccggaaagaataggccttcaaagtcatttgatagcattttagatacctaccagcaaattactgattgctatattgaacgttgtttaattccgtatgttgaatttaaatatgctttatctcatgctgttcgctccccgtgctctattgatataaactttaagctttttgatgtgctaggtcgtttatccgtcaagggacactggattttagatttgttgtctaagaattatgcagagaacccaccaattgatggagagagcaaagaacaagaaaggttatgtatacatctcaggaaaataacaaagtcaattcgtctattagttatcaacaatccggttctgctctcaccgcaaaaagattctcaggcgatagatattgggttagctctaatgttactctcaaataattcagagctcgatgagtttgtgaaaagttggctatcggaaatggttaatagatgtatattctcttttgagatcaatggaatgtatccaattatatatgaaacttacgaaaaactgattgaacataggaataaagataaaactgacaagatttataagaataaggttactgaggctagtattttatatcctctgttaacagtcttttgctctctgtataaattagactctttaagcaaagatttggaagagtttgctactgaaaaactggcacatagcacgctacagtattggtatccaaatcaatacagtgaacaatatatgtactcgaactcagatacacatggctcagcgtcaacagatttcccgatgaatggcgaattagcaataaaacacattgcacaagagtgtaataatgcagattcgtttaagagaatgtcagccgtgattaaagggtatgcaccattagttcttacagcgtgtcgctgttaccgatacccagttcctttccattatattgaaggttggttggtcgaccccacatag

SEQ ID NO: 20034 - DNA, 1725 bp, Escherichia coli
atgtcgttagaagaaacaagaggccagttgctgaatgcaagtgaaacggcagaagatctgcttgctctagtttgtgatttatatgctcaagaattacataccgaagaaagaagtttagcattagcgctagctgaactccacaacactggtgtgattgatatcctcaaaatggtaaaaggtattgataaaaaatcctacggtagtaatttttttactattctacaaacgtttgaagaagcgctacctttgctagatgcaagaattgaggatgttctacattgtctggttcaattggtgcaacaggtcgggagaggggcaactattggtacaatctataaagcctatgagcgttactgtagtgtgaaagcatctcgctctagagatagtgttgagtttatccttgcacaaagtgatttgaatgcatatgccccttttctttcaagctcgctccttgcttacgacgcagatagtgtcataacagctatccagatgacagaaaggctcatttctaatagaaatgcaatgatcagaaatcaaggctattttactttgggacagttagatattgatgagacaaaggctaacttaatttgggagcaaattagaaacaatggtgttagcgagagtgataatgattgttgtgcgtcgatattgatgtctgcactccaatttgggaaaaggtttccatcttactggccgcaaatagaagagtttttaattgcttttgttaagagagaatctacagaggttcttcagataatttcaagtattgttgcatttcaatcggagattcttccagatagtattctgtatatcatgcttaagaaattaactaatgtgtcctgtgatcataaaggtattataggtaatattgattatatattggtcatgttagctgagaaaagtaagtactcgcttgctgtggaattattggagtcaactttaatagcaggtgttacatttaaatcgctggactatttttctaatgaattaataaataagcatcaagaactacttaatcacatcattacaaaatggcttctgggtggagaaaaacaattttgtcatggtattttagatttacttcatgatgctacgggtgaggaaattgaactaaaggcggaattggatttattggataatgatataaagcaagtttttattagtcgtaaggctataggatggttatttacacggccagttgaaactgcaaaatttattctttctattgcagatgtggcttcggaaaacacaattgaaaagcttgagggtattttgtacttccctttgcttttaagttaccctggagaacttaaacgcttctttcaatcatgcattgatagcggcatccaggaacatctatgtgagcgattgcttgcaaagtataaactccatcagactggtattgaaaaagtatctgaacttaatgaactaaaagcacccagcgaaaatttaagcatttattggaaaaatgttgacagaagtatgcaaaaagctatcgaagaagcatcagaattttctttatttagaatgttctcgaaacctaaaattttattatacgggaacagttctatttattatatacatcaaggtgatggggaatccatacgacaggaaatgcaaatgcagactttttctcactctactgaaatgccaaggttggatgctttagatcccgtgttactagattattttttgataacatgtcgtagtgagagaatgtaa

SEQ ID NO: 20035 - DNA, 375 bp, Escherichia coli
atgagtgaaaagaaaaccgttgcttatcgcattgagggatgcgaaaacatcaaaatgattggaaacaaatcatttggtgctgatgttggttatgaaattattgattcagctaatacttttctttccaacaatattcattactcagcagaaacagttcggcttataaaagaagcagaaatcgccatacaaaataacttaagtgaaattaacgataagcttggtgcagagaagctacaagaaatatacgacattttaaatgatatcaagtttaatcagtcatcaaaacctctacaactgatggagcgattttactcagctggtgcaaacacattaactttatggcctattattcagagtctcctaaatagtctttaa

SEQ ID NO: 20036 - DNA, 393 bp, Escherichia coli
atgaagctgagatataagctggttattgttgccttctttgttaccgtcattggttccttcatctggtctgccgggcattactacagcaaatatcagcacgagaaggagcgtgctgatgaggctgtacgaaatgctgaatcggcaactgccattaccaataacgtcctgcaatcaatacaaatcgtaaatacagcactggaggctagccagcatgcaaaacaacaaatcgcactggagtcacagagaacccaggaagatatcaaagtggctgttgcgaatgatgattgcgcttcacgtcctgtgcctgctgccgctactgaccggttgcggaagtacgcggacagtttacgtgagcaccccagtagcaccactgtcaaccagcctaacttctga

SEQ ID NO: 20037 - DNA, 186 bp, Escherichia coli
atgacttcaaatcaatctgaaaacgaaatagttaatactgtcaaaaaatatgcatcatgtgctgacgatgctttgcagggaggcaaagaaaacgttaaagataaatttagaaattatccactgactagcgtagtggtagctctaagcatagggttaacgcttggttttattattggcagaaaataa

SEQ ID NO: 20038 - DNA, 423 bp, Escherichia coli
gtggcaaaagtttttacacaagaagagcgggaaaaaattaaagggcaggtggtggaactcgtgcgccagagcggtcgtgagacgttacggcaactggaagctaaaacaggtgcgactagatatctgatgagcgttcttgccagagagctggtagccagtggcgatgtatacaactccggctacgggttattcccgtctgaacaggcgcgtaaggactggcaaaacgcccgcaaaaaactctcgagggcaaaggtgaagaaacctgctgtggttgatccggaccttatctggtcattacctgatggagaaatacgccgctacgacagtcgtctaaacataatctgtcgcgagtgccggaagagcgaagttatgcagcgtgttctgacgttttatcaggggaattatcgggaggtgatgctgtga

SEQ ID NO: 20039 - DNA, 1074 bp, Escherichia coli
atgaaaaaaatactaataattcaaccctcagttcctaaatatagagtcccatttttcaaccgcttaagaaaaaaatataatattgttatttattctaataaaactgattttttgggagttacatcagataggggttgtggcaatgttgtatggggaaatgggtttctatcatttaaaaataagatattgtggcataaggggttgcctatactttccatgctaaatagaaataatatagtagtagttaacggcaatccaagaatattaaattatatgttattgttatttttttgtaagataattggtattaaaactatctggtgggggcatggatggagtgctggatcacgtggtatattgtcatctatccggataaagatgatgaaaatttctaactgcattttagtctatactgattatgaaaaagaaaagatcaatcaaaaaaaatgtttcgcattgaataatgggttggattcttcagaaatagtaagagcaataaacgagagtgatttccgacattatttttgtgagcagacaagaatggttttcgtgggacgattgacaaaaaaatctaatttggattttcttattaactctatgaaataccttcctgggaattttcagcttgcagttattggtgatggtccgttaaaagaaaagcttattggccttgctaatgaacttaatgtatccgaacgaattgtatggcatggcgctatttatgatgaaaaacgcatcgcttcagtgatgctgaaatctgatgtttttgtatatcctggttccgttggattaagtttaattcacgcatataattatggactaccttcaattattcataataatcgcgatatgcacatgccagagtatgccgcttttattgaaggttataacggatttggatataatgagatgaatgttgattccttttgtcgtgttgttttattttatgcgaatttatcaaatgaaaaaaaaatggagttaagaaataatgcatttaatactgtgaatgctgattataatattgaatgtatggcatcgaggtttgaagatgctataaatttcataaataaataa

SEQ ID NO: 20040 - DNA, 1041 bp, Escherichia coli
atggaggataatgaaaaaaaaatccttcccttgtctggagggttagactcgagattacttgcaggcataattggaaataaaaatgtgtatgcgtttacatatagtggaaataaaagaaattatgaatcagtgaatgcatctataattgcaaaaagattaaatattccttggcaacgaattcctcttacaaaattttatgaactaatggaacaatgggttgatatatatggtgctagcgaacatgctcatggtatgtatcatatagatttttatcggaaaatatgtgatagcgggagttatgatttacttctcagtggaatattcgcagatatttgggcagggaataactccgtaaatattggcggggtcaaagatattcaaaaacttggatactctcatggtttaaatttatcctctgagttatttgataacttaagcatcgaaaaatatagtttctcattagagaatttgtatttaagtgaactgcggcaacagaatttattatcttttgatgcattaaatcgaattcaaatgaagataatattaattagttatctgatgacactaccacgtttttttggtttgaaaactataacacctttcttaaataaaagaatagcagttaaaatgttatcgttgagtaaagaacagagattaaatcgaaagtggcaaaaagatatacttgctactatgggattgcagattaactcatcttggaatccattttcagtaaattatgtaaataatttggatattatatcttataaaaaaagcaattttgataaaattaagtctattatgagtagtactgacactgattgtcttttcaaaaactctcataatcttactaatatattcgaaaatgtaggcaaactgaccccattgcaagaagttaatatgtacttaaatagtacacgtggtatcaatcgtattatgaaattgtttggtatggaatcgtctaaacttcgtaatctccgtgatttgcaagtcttatttcctcttctttatttaaaatcaattagtgaaaaaatcgaattatga

SEQ ID NO: 20041 - DNA, 885 bp, Escherichia coli
atgaggcgcttcgcaggcgcatgtcgtttcgttttcaatcgtgctctggcgcttcagaatgagaatcatgaggccggtaataaatacatcccttacgggaaaatggcttcctggctggttgagtggaaaaatgccactgaaacgcaatggcttaaaaatgccccgtcacagccattgcaacagtcactgaaagaccttgagcgggcttacaaaaacttcttccagaagcgggctgcttttccccgattcaaaaagcggggacagaatgattcattccgctacccgcagggcgttaagctcgatcaggaaaacagccgtatttttctgccgaaactgggctggatgcgctaccggaatagccgtcaggtcacgggtgttgtgaaaaatgtcacggtcagccagtcctgcggtaagtggcacatcagtattcagacagaaagtgaagtatcaactccggttcacccttcagcatcaatggtcgggctggatgctggcgtggctaaactcgccacgctgtcagatggcacagtctttgagcctgtaaacagttttcagaaaaaacagaagacgctggcgagacttcagcgacagttaagccgcaaggtcaaattcagcaataactggcagaagcagaaacgcaaaatacagcgactgcattcccgtatcgcaaatatccgcagggactaccttcacaaagtcacaacgaccgtcagcaaaaaccacgcaatgatagtcattgaggatttgaaggtcagcaacatgtcaaagtcagcagcgggtacggtcagccagccggggcgcaatgtccgggcaaaatcaggtttaaaccgttcgatactggatcagggctggtatgaaatgcgccgccagcttgagtacaagtag

SEQ ID NO: 20042 - DNA, 1080 bp, Escherichia coli
atgattgttttttttattggaccatcgtcaggtaagattaccggccaatcacttgcgtttaatataatatttaaaaactattctggaagtaaatatctggttgattatccggatttttcaggtaagaaaattactcttcttttgaaatattttaaacttttttggcatttttttgcaaaaatgctgttacatatattcgagcgaaaggtcatatatataactacaagtcgtactctgttcggcttttttcgagatctttattttattcttcttgggaagcttttttttgcaaagattgttaaccatttacacggttcagattttgtctattttagagaaaatcaaaaaaaagttgttaggaaaatcattgattttatttattctaagatagatgtatctatagttttgacggaagccatgaaggaacaatatgaacaatatccgaaaatgaagatttttgtggtttctaattgctattatggtctaagtacgtttgaaacgaagttatgctttgataaagctgagttacgtttagtgtatctgtcaaacctaatgtattctaaagggatcatacatctaatacgtgctgtgaaaagatgttttaaagatggtatggcgcttaatttaaaaattgcgggttcaattagctcagacgagtattattctgagagtgaattaaaagatattttatttaaagagttacagggttgtgattatatacaatatctcggtcctgtacggggggaagaaaaaaacaatctcctcttagaatcagatgtttttatattgcctaccttttatcgttcagaggcccaaccaatctccatcattgaagccatgtactatgggtgtgtaattataacgactgggcataattatgtgaaagagtttgtaggagaaaaaaatggtattattatcgataagaatagtcagcaagccatcgttgatgcgattattttaatggatgcaacaagagaatattacagggaagtatcaagctataatatttattttgcgaagacatattattcacctaatgtttatattgaaaaaatatcaaaaatcattaatgaggtatga

SEQ ID NO: 20043 - DNA, 1119 bp, Escherichia coli
atgaaagttgcattaataacaggggttacaggtcaggatggttcttacttggcagaatttcttcttgaaaaaggttatgaagtgcatggtataaaacgccgagcatcatgttttaacactgagcgtgtagaccatatctaccaggatcgccacaatgaaaatccaaattttttcctgcactacggtgacttaactgactcatcaaacttggtacgtctcattaaagaaatccaaccagacgaagtttataaccttggcgctcagtctcatgtagcggtttcatttgaatcaccggaatatactgctgatgtggatgcgatggggactttacgtctgctggaagcgattcgtatttgtgggctagagaaaaaaacacgtttctatcaggcatcaacttctgaactcttcggcttagttcaggaaatcccacagcgagaaacaacaccattctaccctcgttcgccttatgctgttgcgaagatgtatgcatactggattactgtaaactatcgtgaatcctatggaatgtacgcctgtaacggtattctcttcaaccatgaatccccgcgtcgtggtgaaacattcgtaacacgtaaaatcacacgtgctattgcaaatatttcgcagggaatcgaaaaatgtctctatcttggcaatatggactcactgcgtgactggggacatgcgaaagattacgtgcgtatgcagtggatgatgttgcagcaagatcacccagaagattttgttattgcaacaggcaaacaaatttccgtacgtgaatttgttcgtatgtcagctaaagaagtaggtctggagttagaattctcaggacaaggtgttgatgaaatagcaactgttgtcaataaaacatctgactgtgctattggtgttagtattggggatgtgatcgttcgtgttgatcctcgttatttccgtcctgcagaagttgaaactcttcttggtgatccagcaaaagcgaaaaaagtattgggttgggaaccagagattacagttgaagagatgtgtgcagaaatggttgccagtgatctggcgaaagcaaaacagcatgcactactgaaaagccatggttacgatgttgcagtttctctggagcggtaa

SEQ ID NO: 20044 - DNA, 966 bp, Escherichia coli
atgacaaaaaaacgtatctacgttgctggtcaccgaggtatggttggctctgctatttgccgtcaattatcactgcgtgatgatatcgaattagtggtcaaaacacacaaagaactcgatctaaccgtacagaaggatgttgatgcattttttgagcaagagaaaattgatcaggtttatcttgctgcggctaaagttggtggcatttatgccaacaatacatttccggcagaattcatctatcagaatctcatgattgagagtaatattattcattcagctcacaaggccggaattcaaaaattactttttttaggctcaagctgtatttatcctaaattcgcagagcagcctatgaacgagtctgcacttttaactggcatacttgagccaactaatgaaccatacgcaattgctaaaattgcgggaataaaattatgtgaatcttataaccgtcaatatggccgtgattatcgcagtgtaatgcctactaatctttatggcataaatgataatttccatcctgaaaactctcatgttattccggcactcatgcgtagattccatgaagcaaaagagagtggtgcgccagaggttattgtctggggaaccggaacaccgatgcgtgagtttttatatgttgatgatatggctgccgcatctgtccatgtaatggagcttgacgaagcaatttatcaacaaaatacacagcctatgttatcccatattaatgttggtacgggtgtggattgttctatacgtgaaatggctgaaacaatggcctctgtggtggggtatcaaggtaaaattgtttttgatgttactaaacctgatggcactccgcgtaaacttatggacgttacccggctcaaaaacttgggctggcaatatcaatataatttacatgaaggcttatcattaacatataaatggtttattgagaatattaattcttttcggggatag

SEQ ID NO: 20045 - DNA, 462 bp, Escherichia coli
atgaataagagattggaacgcgagctatttaaaacaatagttgagcatactcctctaatctcgattgatctcataattagaaacgataaaggagaggcgctgctggggcagcgcctgaatcgcccagcacaaaattattggtttgtgccaggagggcgaatttataaggatgagtcattcgagattgcatttaagcggataacacttgaagagttgggcgttcaaattagtcttaatgatgccttatttcttggggtgtatgaacatttttacaatgataatttttttgaagcagaattttctacacactatatagtgcatggatatgaaatccaacttaaacctcagcaacttcacctaccaacggtccagcataattcctacaagtggtttgatgtagtaacgttgcttaatagcactatagttcatcaatataccaaaaattattttataccaaggtaa

SEQ ID NO: 20046 - DNA, 1407 bp, Escherichia coli
atgctacttcccgttgtcatggccggtggttctggcaccagattatggcctctttcacgtacactttatccgaaacaatttctgtctttaaatagtcgtttaaccatgttgcaagagacattgaggcggcttgacaaggtcgaacataaacctgctttggtcatttgtaacgaatcacatcgctttatcgttgctgaacaattgcgtaaagagagtttaaagcatagcggtattttgcttgagcctgttggccgtaatactgcgcctgctgtagcacttgcagcacttcaggctatggtgactggagacgatcctattctgttggttcttgctgctgatcatgaaatccaggatgaggataatttcattgatgcagttcttgtagccaagaattttgcagagcagggtaagcttgttacgtttggtattgttccaacatccccagagactggctatggttacattaagtcaggtgaatctctggatggacaaggttacaaagttgcggcttttgttgaaaaaccagatcttcacgtggctcagcggtacatatcagatggcggttatctttggaatagtgggatgtttatgttcagagcatctgtatttatcgatgaactgaaaaaattccgaccagatattttagccagttgccaacgctccttgtcctcttcgatacaagatttagattttatccgtctggataatgcttcattttcttgctgtcctgaagagtctattgactatgcagttatggaaaaaacagccgaagctgtcgtcgttccattaaatgcacaatggagtgatgttgggtcatggtctgcattgtgggaaataagttcaaaagatcaaagcggtaatgccattcgtggtgatgtattggttgaagatgctacagatagttatctttattcgcagcatagacttattggtgccgtgggcgtaaaggatttggttgttgttgaaacgaaagatgccgtattagttgctcataaagataaagttcagcaagttaaaaacatcgtcgctcaacttaaaaaaaataatcgcacagaatatttacagcatcgggaaatatttcggccttggggcagtcatgatactatagctgaagggccgcgctttcaagtgaaacatgtgattgtattacctggccacattaccgctaaacagattcattaccatcgtactgagcattggattgttgtctcggggacagctaaagttcatcttgaagataagacttaccttgtttctgaaaatgaatcaacatatatacctgttggtgttccacatgccattgaaaatcctggcaagataccgcttgaaataattgaggttagatcaggagtctacctagaagaggatgatgttataagagtttcttcttctggagtaggatactaa

SEQ ID NO: 20047 - DNA, 1011 bp, Escherichia coli
atggtaacaattaaacaatgggccgagattgaggccgcttataatgatactttacttttggggaatggtgcaagtatcgctgttaatagcgattttgcctatcgtagcttatgtcagaagttgaccgagctcagttctgatgggcagctgacagccttgttcgaactatttgatacgcaagattttgagttgattctgcatcgtctatggattgcaactcaagtaaatcaacagctcggtgtgcctgaaaatgcaacgactgaggggtataagttacttagaaatctgttgattcaatgtgtgagccaaaatcatcctgagcatcatgagatatcggatgtgttagttaaaattcgttcttttataggcaaattcaagacggttttatctctgaattatgatcttattgtgtactgggcatctttgcttgaggatacaactaccggaaaattaaaggattgcttcatcaaccgtttgtttaatgaacagttagattggagtgagtttagagacttacattggaaggatcgtgaaaaaggttacaagacgacaagcttagtcttctacccacatggttctttgattttggcccaagatttcagtggtcaagagtccaaattacatactaatcctcgtggtgaaggaaattatctccagcaaatttctcagcaatggagttctgcaacagttacaccagtttttgtttctgaagggacaagtaagcaaaaactaagtgctatagctcgtagtcgttatcttgacactgtctaccgtgaagtactaccagagaaaaaggaaagtatcgtgatctatggatggagtatgggggaaaatgacagccatatactcgatgcactgaaaaaaagtcgtccatcaagggttgcggtttcagtgtatggcactgatacctctggctgtaatgcaattgaagggaaactaaaagcggtgtttggtgaagctttgcttgtcgagtttttcgacagtgaaagcgctaactgctggtgccattaa

SEQ ID NO: 20048 - DNA, 576 bp, Escherichia coli
atgggaaaaatagtctatagcgacattgcaaattttatccccggagtaaacctgtcacgcatagagccggaagagtcaggtaaagtatatcgcttttatacagcgcagttgcatcagatcgatgactggcaaccagaagtgatagttactgataaagaacaggtggttaagagtacatcgttactaaaagtgacaagagaaaatgatgtcattattaacttagcgaatgctaaagctgtgcttgttaagcaggatcatgcagggcgaatattgggcaataactttgttaaggttgagttggatgtaagcagagtctctccattattttggatttggcatttcaatgagagcaaagctgtagcccaacaaaaatcatctgctctacaggggtcaactgtacctaagttaactctgcaaatggttcgtcaatttgaactcgatttacctggactaaaaaagcaacaagcgataggtgagctgtatcttcatctcaggatgaaagattactacgagtacaacttgatgaaattaaagcaacaatattattttgccaaaatagaaaatttatcaaaataa

SEQ ID NO: 20049 - DNA, 1608 bp, Escherichia coli
atgtctcctcagattgaagcgcaaaatttaagtgaactgcaaggccgcctgtggaatattgccgataccctgcgcggtaaaatgaatgccgatgaattccgcgactactgcctaggttttatcttctacaaatacctgtcagaaaaatttgtcgcgtatgcgaacaaaattctggcggaagatgacattcagtacaatgaactgactgtggaacatccagcgtatcaggatatcgttgatgcggtaaaagaggacagtatccagaccttaggctatttcttgccgccaacggatttgttccacactatggcagaacgtgtggctaaagaccccaaaggcacaggtactggctttattctggaagacctcgccactaccctacgcagcattgaacagagcacgctgggtaccgactctgcagatgacttcagcaacctgtttgaagatcttgatttaggttcaagcaagcttggcaacactgcgaaagctaaaaatgagctgatcggtaaagtcgtcactgaactcgacaaactaagctttaacctgagcgaagcgagttccgacattctgggggatgcctatgagtacctgatcggccaattcgcttcaggcgcaggtaagaaagccggggagttctataccccgcagccggtttccaccctgctggctaaaatcgtcaccactcataagctgaagctgaaaaacgtgtatgacccgacctgtggctctggctctttgttactgcgcgtgaaacgtgaagcctcatctgtgggtaaaatctacggccaggagatgaaccgtactacctataacctggcgcgtatgaacatgatcctacacggggttcactatgcggattttgagatcattcaggaagatacgctggagcatccgcagcatacgcatctgaaatttgacgccatcgttgctaacccaccgttctccgccaagtggagcgccagcccgctgtttatgaacgatgaccgctttgcccagtacggcaaactggctccgtccagcaaagcagacatggcgtttttacagcatatgtttcatcacctggaagatgacggcactatggcagtggttctgcctcatggggttttattccgtggcgcagcggaaggccatattcgtcagtttatgattgagaagctgaactgcattgatgcggtgatcggcctgcctgccaatatcttctacggcaccagcattccgacctgcgttcttgtgctacgtaaatgccgcaagcataacgacagcattctgtttatcgacgccagcaatgactttgagaaggtgaaaacccagaaccgcctgctgccggaacatatcgataagattgccgatacttataacgactggaaagcgattgagaaatacagtcatatcgcaacgctggaagagatccgtaacaacgattacaacctcaatatcccgcgctatgtcgatacttttgaagctgaagaagagattgatctcaacgctgtggcgcaggaaattcgcgatctggaagggaaagtggcggagattgataagaccattgctgggttctgtaaggagctgggaattgatgcgccgtttgcgctggcggaggaaaataagtga

SEQ ID NO: 20050 - DNA, 144 bp, Escherichia coli
atggtgcctaagctgagattctatcgatttttaaataatgatgaatataaatggcagtcgaaaaagatcactgatatttcaaaaacgtttatcggtttagtaactactatgacatctagctatgtagtaatggtgtcaaattga

SEQ ID NO: 20051 - DNA, 1011 bp, Escherichia coli
ttgattcgtaactccgatataaaagaaaattatgtcgaaaaatcaaaacttatcaagttagatataagttttgccgaacaatacgggagtagaaaattaaagtcaggtgatgttgttacagtccacactggcgatattggtgtatctgcagtaattgatgaggagcttgacggatgcctcggatttgcaaccttgaatactcgacccaatccaaccatcattaactcaaaatatctatgtcagtattttaattcaccctattatattaaatatgctttaagcatggcgacaggtgatggtagaaacaattataatttaaaagatttcaataatgcaataattccagttccttgtattgatgaacaaactaagatcgccgacttcctattctctgttgacgaaaaaatcgcgttactgaacaagcagtacaacttgctgtcccagtacaaaaaaggcatgatgcagaagatttttagtcaagaattactttttaaggatgagaatggggaggagttttctgagtggaatagaaaattcataggcaatattctaacgattggtagcggtcgagattataaacatttgaatgctggtaatgtccctgtttttggtactggtggttttatgacaatggttgatcagtatctttttgaaggggaaacggtatgcattggccgaaaagggactattgataagccattttactacaatgggaaaatttggactgtagatactttattttatactcatgaatttaaaggcgcgcacccaaaatttgtgtatcaattgtttttaacaataaactggaaagtttataacgaggcatccggagtaccaagcctttctaaaaatactatagaaaagattgaggttaatattccttgtttatctgagcaaaacaaaatttccagctttctctccacccttgacgataaaatcgccgctaaaaaagcagaactggacaagttaaaaacctggaagcagggcctgctccagcaaatgtttgtataa

SEQ ID NO: 20052 - DNA, 2916 bp, Escherichia coli
atggcaacgcaaagcgaatacgagttagaaacgcagctggtggaacaactggttggcatgcactacgagcgggtgaatgtcaccgatgaaaccagtatgaaagccaacctgcgaaagcagattgaaatccataaccggctggaatcttctccgctaactgacggtgaatttaaccgtatttttttgcacctgaccaaaggtaatgaagttatcgatcgcgctaaaatccttcgcgatcgctaccaattgttgcgcgatgacggcaccgagaagtggctcagctttatcaataaagaggagtggtgccagaacgagtttcaggtgacgaaccaggtgaagcagttcaacgccgagcaaaacacgcgtaaaacccgcttcgacgtcacgctactgatcaacggcctgccgctggtgcaaatcgaacttaagcgtcgcggcctggggctgaaagaggcctttaaccagatcgatcgttaccatcgggatgccttctgggtaggcagcggcctgttccagtatgtgcagatctttattatcagcaacggcgtggacaccaaatattacgccaacaaccgcgccaaccacttcgagcagaccttcttctggaccgatgaaaagaataacccgctcaaagcgctggagaaattcaccgacgcatttctgaaagtctgtcacatcgccaaaatgatcacccactacacggtgctgaatgaaacccgtaagtgcctgatggtgatgcgcccttaccagttttatgcctgtgaggcgatgatccgccatgtgaaggagaatctccacaaacagggacgtccggagaacggttatatctggcacaccactggctccggtaaaacgctgacctcgttcaaagccagccaggtgatcatggaaatgccggaagtggatcgggtcatttttgtggttgatcgccgggatctggattatcagacggcgaaagagttcaacggttttgcgaaagacagcgtggataccaccaacaacaccagtacgctgataaaacatctcaagcaaagcagcaccaaactgacgctgactactattcagaaactgaataacgctatcactcatgaagggtataaagctcagctcgcacacctgcgcaaagagcgcatcgtctttatcttcgatgaatgccaccgcagccagttcggtgacacgcataaagcgatcgtgaacttcttcgagaacgcacagctgtttggttttaccgggacgccaatctttgccgataacgtcaatatcaccaatggtgtcaaacagactaccgaactgttgttcgataaatgcctgcataaatacgtgattgtcgacgccatccgggatgaaaacgttctgcgctttgccgtggaatatgtcggtacttacaagcgcaaagaaagcagcaatgagatcgatatcgatgtggaggatatcgacaccaaagaggtgatggaaagcgacatccggttgggcaaagtgaccgactacatccttgcccaccataacgccaagacccgcaatcgcgagttcaccgcgatgttctgcgtcgggtcagtcgatatgctgatcacctactacaaactctttaaagaaaagcaggccgcactgcaggcggcggatgccaactacaagccattaaaaattgccaccatcttcacttatgccgccaatgaagcggacaaaagtgataaagaggcggtaaacggtctgctggatgaagaggatattagtctgccgcagggctcgaaagttgatacctcgagtcgcgatcatctggatagtttcatcaaggattataacgagctgtatggcaccagctactcggccaatgattcaaagagcttctacaattactacaaaaatattgctcagcgcaccaaagagaaaggcatcgatattctgctggtggtgaatatgttcctcaccggcttcgacagcccggcgctgaacacgctgtacgtcgataaaaacctccgttttcacggcctggtgcaggcgttttcccgcaccaaccgcattctcaacgagaagaaaagccacgggaatatcgtctgcttccgcaatctcaagaaagctaccgatgatgctattgccttgttctcgaacaaagatgcttcttctgtggtactggtcaaaccctttgacgagtacttcggggattatcaggacgctgtcgatcgcttgttaacgctgacgccaacggtggatagcgtggacgatttaccggatgaagaggcacaactggcgtttgtaacggcattccgcgatgtgatgcgtttgaaaaacatcctcgaaagctttgccgattttgacgatgcggctaaaccgctttcagaccagacgctggcagattttaccagtaaatacctcgatatccatgacaaggtgaaaaagcactccagcaaagagaaagtctcgattcttgacgatgtggattttgaagtctcgctgattcatcgcgacgaaattaacgtcggctacattctgcgtctgctggcgggcattcaggctatgccgctaaaagagcagcaggagcagaagaaaaagatcatggatattgtcgacagcgacgtcacgctgcgtagtaaacgtgagcttattgataactttatcgaaaaaagcctactgcatgcctcgcatgacgaggatatcactcaggtgtttgaagcctatgtcgaacaggaaaaagataaggcgctggcaaccttgtgcagcgaagagcgactcgattccatcaaactggctggcttgctggataactacctctttaccgacgtgatgccgagagaggatgaggtggcggaaacgctgacttggacaccaaagattctggaacgcaaaagcgttcgagctcgggtttacgaacgtgttcgggatgtaattgatacgtttatcaatgggatgcgcgggttttaa

SEQ ID NO: 20053 - DNA, 198 bp, Escherichia coli
atggccgttcctacctacgataaatttattgaaccagttctccgttttctggcaggtaaacctgatggagtacctgatcgcgatgcgcatgaagctgcggcagatgctcttaatcttgatgataatcagcgagcagaagtgatagccagcggtcagttagtttataaaaatcgggctgttgggcacatgatcgtctga

SEQ ID NO: 20054 - DNA, 579 bp, Escherichia coli
ttggccttggatttcatgaatgtgaagttaaaacagcagccagatgctgtcgatcttgatccaagaccaacagcaccgaaccaggaagagctggcaaaaagcagccctgacgatcgtcttgagcaagcgttaaaagagttactggaaaacttgttgcaggtttctccagcgcgttttgaggttatcgttttggatgtacttcatcgtttgggatatggtggacatcgggatgatcttcagcgcgtaggtggagcaggagatggtggtatcgatggcattatttcacttgataaattgggactggaaaaagtttacgtgcaggctaaacgctggcagaacacagttggtcgccctgaacttcaggcgttctatggtgcgctggccggacaaaaggctaaacgtggagtatttattactacttccggctttacttctcaggcgcgggattttgctcattccgttgagggaatggttctagttgatggcgaacgtttagttcacttgatgattgaaaacgaggttggtgtttcctctcgtttagttaaagtgcccaaactggacatggattactgtgagtaa

SEQ ID NO: 20055 - DNA, 654 bp, Escherichia coli
atggcccctggatatgtatacatattaatcaacccaagcatgccaggtttaattaaaataggtcgaacgctacgcgactcacgcatgcgtgcgcgtgaactcttctccaccggagtgccaacaccgtttcaagttgcttttgagctgtttgctgaacaacatgaagctctcgaggctacggtacataatgaattgaatgattttcgagttaatgtggcacgcgagtttttccgctacccactcgacaaggccgttgcattactaattcagctgccccccctcccaaactccactgaacagtatgtggccgaagatataacacaacggcttagagaaaaatatcctttatatatacgtccagaaattgtagcggtaaggattgttcaaatgcccggaggtgtctggctaaagataacgactgagaaagaaatcgctggatacctcgtagatcagataatccaacgaacagatctagcattcattgttgacacagacgaggcattctttcggtcagaagatgatgtccgtttaaatgcgaataaactggtaaatgattacgatatttactctatcgtcatgactacggacctctttcatgattacgcctgccaacaaataacacgcgcgcatcatgcccagagaaatttcgtctga

SEQ ID NO: 20056 - DNA, 975 bp, Escherichia coli
atgtcaaggactaaagtactttttgcttattgccatgagttagatcggtgtttatcgattgatgaagcaagaacagaattcttttcaaaaaaaccgcaagacagacaacgattcactttctcctgcagcgatcgcaactgcaatgtcaccattagtggtgttaattaccatgtcaaagcggaagatggtgaaaaattcaaagttgcacattttcgttctccacatccccataatctgggatgtgaatggatgcagttttctgaggaagctaaccagccccgtcaggctagtgaaacagaggctgactacacagaaagaaaggcaaggcagaagctaaatgattttatcaattgcttcgatccttgtactgatgagacagattctgggcaaaaaaaaactggacaacttacatcactttcgcaggtaaaccatctcgtcaaagacaatgatttgtctaacgataaatcccacaagtggagccgttatacacgaactaaccagctacagcgcctagtagacacctggcaggaagccaagaaaactcttacatacgacgagttcagaacattaaaactaagagtcacaaactacgggaaggtttatttccatgaatacataacgcatattcagaaagggctaaaaaaccaatatgaaggcgtcattttcggcggtggttctttggttaaacgctatggtcgtggctttctcattcactttttcgataaacataacgataaaccaattcgtctgtatatcgataagaaccttatggagaaagggcgattcagtcattatattgatgaaatattatcaacagagaatgtgagatattttcgtgtctttttgttaaacccagaagtttccgaaaaaaaagaccgaactggcaagccagttatcaaccttgagatatcaagcctgcgacaattggcgatttactacgaactcaactcttctgaagataatgattttgtttga

SEQ ID NO: 20057 - DNA, 543 bp, Escherichia coli
atggacgcagagaaaattcagtcagatatagatgctcttttgacatacatgaacgatgacatggagaatcttggtgaaacaataaaaaccgttacatttggattcgaaacaggccagaacgaccgcattgctatagacgagttgcttcactggcgggaagagtatttgttcaaaatcatcaatatttgccattcccgctctctattacgtaaggactatggagattttgagcatgtatccttgacagaagagggtcagagtcgtgctatatcaatcaaacacggaaaaaatcgctcttacgagttaggagccagtatgcaaatcgcaacgttaaatgttcatgggcctgcacaggttggtaacagtaatacgcaaaacattcacaatgtatttaatcaattacttcagcagatcgagaaatcttccgcttctgatgaagaaaaacaggaagccaaaaaacgcctggcgaaatttttggaacatcctttggttagttctattgtcggcggtcttgctggttctcttcctggtctaatgggatga

SEQ ID NO: 20058 - DNA, 1536 bp, Escherichia coli
atgtctgtagataccttacgcgaaacatttcatataaaccgcattagcacttctgatttgcaggatttcttgactgcgcaaacctacagaccagaaattacgcaagcaaaaaatcatattcttagcttgaaaaattgctcactgcaggcggtatgcacaaaaccaattcagcaaggaaagtcccctaagtatgcggagaagggcttaaagtgcattaaacctaaaaatactaatgacatgttagtttcgattgatgacattgattggattgactcgtcaacaaaagatcaaattcaaaaacagaagctcggatatggtgacattgtcattacacgttcaggttcaggaactattggccgggcatcgatttattgctatagcgaagaagcgtatacgaatgaccatctttttgttgttcgccctgacaaggctgatagtcattatatttgctcatttttaaatagcttccatggccaacgcttattggaagcaggggtatccggttctaccgggcaattaaatctttctaatgaacacattaagtctattccgctgtttagacctgatgataaagtacaaaaatacatcggggataaagttcgccaagccgaacagttgcgcgcttgggcgaagcgccttcgcacatctgttgacgatcatcttaacagtctaaatctgcctatcaacgagccccccgcactgttaaaccgagtcagcgcgcaaacaatggaggaccgactcgatccacgcccttatcggactcattacctatgtttagtgagtgaaattgaaaagctacctcatgacagtatcggcactttagttgcattggcatcaggctacccagtatccagtaacgactttttggaaaactcaggcatacctttagttcgcatccgcaatatcggttttgatgattttattggtttagatactggtgttagccaagacgtatatcaggatgcgactaagtatcaagctaaagacaaaatgatcgttgtcggtatggacggtatttttcgctcgcagtttttcatatctgacgagctacctatgctagttaatcaacgggttgcaatgctctcacctcaaaatattcgtggtgaacttttaacacattggctaaatcgccccgaaggacaaatgcaactaaatcaatgggcagttaaaacaactgtagaacatacatctctatctgatattggccgtgtattaattcctcgcctggataaaagcttagaaaataagcttgctgattatttgctcaatgcgaggctggcttatcgttatgccaaatttttaacacaagtagccaaaaccctggtcgaaaccctaatcgaaggccaactgaccgagcggcaattgatcgaagcccaacaagccctggaagatggcgacaacagcttagatcaagcgattttaagtaaactaagtgctgagggttatgccatagaaggcgccacaccgctatttagcgatgtggatgagttatacagtttgctggaagaggcggcgcaagcggaggctgaagagtaa

SEQ ID NO: 20059 - DNA, 1287 bp, Escherichia coli
atggcggggttgaataagtatcaggcgtatccggaatatagggattctggggtggagtggttgggggagatacctcgcacttggcaggcgtacacaggaaaacgactatttagtagtgttagaactccggctctttctaatgatgaacaacttgctgccagtcaaaagtatggcgttattcctcaaactttaatgatgcaacttaatgactctaaagtaatgttggcattaaaaggtacagattcatttcggcatgtagaaaaaaataattttgttataagtctgcgtagctttgaaggaggaattgagcacagtaactatcaaggttgcgtctccccagcatacactgtgttgaaaagtgttaatgacataagcttttctttttatcgctatcttttaaaaagtgagccttatatatcagctttgcaagcgtcaactgatagtttgagagatggaaaatcgattaattatgaacaatttggtgcaataacactgccctcaccatctcttccagagcagtcaataattgctcattttctcgaccacgaaaccgcaaaaatcgataacctaatcgagaaacaacaacaacttattgaactactgaaagaaaaacgtcaggccgtgattagccatgcggtgaccaaagggctaaatcctgatgtgccgatgaaagattctggggttgagtggttggacgaaatccctgaacactggaggatatgcaaattaaaaaacctagctaaaatatgtaatggacaggattataaactcgttcaagcagaaaccggttatccagtaataggctccggggggcagtttgcatgggcgaatacttttctatatgataaaccatcagtcctcttgggtagaaagggtacaattgataaaccattgtatatagacaaggcattttggaccgtcgatacaatgtattacacggaagtatttgattgcattatagagaaatatttatattatttagcactgacaattcagtttaatcgttatgcaactaataccgcactgcctagtatgactcaagaacacttaggtaattactcattttcattgtcattcaacctcagtgagcaaaaactaataattaatagcattgaaaaatcattaattaaaatagatgccctaaccgaaaaacagttaaaacaaatcgaactcctcaaagaacgccgcaccgcccttatctccgccgccgtcaccggcaaaatagatctccgcaactggaccgcccccatcgccaaaacggaagcacccacggaggccagcgcatga

SEQ ID NO: 20060 - DNA, 606 bp, Escherichia coli
atggcgaaagcaaaattaaacagcgcgtttattgccaccgtggcaggagaaatcactgtgtacaactaccggggcgacacccgcgaatacatatcctcatcggttgagtatctgcctgtgggggtgggtattcctgccaattcctgtaccgatgcgcccggcacacataaggctggttatgcaatctgccgttctgcagattttaactcatgggaatatgtgccagaccatcgcggtgaaattgtctatggcatcgaaacgggggaatcaaaagaaattactgtgccgggggattaccctgaaaatacgaccacttttgccccattaacgccatacgataaatgggatggtgagaaatgggtaacagataccgaggcacagcatagcgccgcagtagatgcagcagaagtacagcgccagtctctgattgatgctgctatggcttccatcagtctgattcagctgaaattgcaggccagacgtaaactgacgcaggcagaaacaacccgccttaacgctgtgctggattacattgacgcggtgacggcaatagataccagcaccgcgcctgatattatttggcctgtattccctgagactgattaa

SEQ ID NO: 20061 - DNA, 828 bp, Escherichia coli
atgaatattccattaaatagtactgtacagcagcttcctttctactctactcttaccgatagtgataaaataaaagaactatcattaaaaaacagcgggttgctggaacaacacgatcctactttggcgatgtttggcaacatgccaaagggggaaattgttgcgctaatatcttctttattgcaatctaagtttgttaagattgaattaaaaaagaaatatgccaggttattattagatttattaggcgaagatgattgggagctggctctgctttcctggttaggggtgggtgagttaaatcaggaaggtatccagaagatcaagaagctttatgaaaaggctaaggacgaggactctgaaaacggagcctctttacttgactggtttatggagatcaaggatcttcctgagcgtgaaaagcacttaaaggttattattagggcgctatcgttcgatctgtcttatatgtcttcttttgaagacaaggtaagaacatcttcaattattagtgatttatgtcggataatcatttttttatcacttaataactatacggatattattgcaatctccattaagaaagataaagatgtcattttaaatgaagtgctatctattattgaacatgtatggttaacagaagactggctactggagagcccttctcgggtatcgattgtcgaagataaacatgtttattatttccatttattgaaagaattttttgcatcattaccagatgcttgttttattgataacgaacagagggataatacattattaatgattggtaaagtaattgattataaggaggatgttgtgtga

SEQ ID NO: 20062 - DNA, 573 bp, Escherichia coli
atggataattcagttacatcatcaatttctagtgcgagtacttcgacatcgatgacctatgatttagggaacatgtcgaaagatgaagttgttgagctgtttaaaaaagttggcgtatttcaggctgcgcttatcatgtttgcttatatgtaccaggcacaaagcgagctatctattgctacatatgcagacatgaatgagtcatctaaggaatccaccgaggcacaaaaaatggccaatttggtggatgccaagatcgctgaagttcagtctagttcggaaaaggataaaaaggtcaaacttcctgacgaagtaattagttatattcaagattcacgaaatgggatttccgtaagtagtgatattgacatcaccaaagagttgggtgctggtgacctgcaaaccgtaaaagctgctatttcagcaaaagcaaataacctgacaacgacggtgaataataaccagcttacgttgcagcaaatgtctaatacgctgaatttattaacaaatgctcgttcagatatgcagtcgttgcaatatcgaactattcaggcaataagttttggtaaataa

SEQ ID NO: 20063 - DNA, 1140 bp, Escherichia coli
atgcttgagacaaaaagcgatatcctgtctacaacctcaggggctaatagcactacgtttatttcagatatcactcaatctgagcggacttcaacgctggattttcaactggttaaatccagcgttgcgtcagtaagtaaggctgatactggcattttaccggtacccccggcgggtcatgcattagtaaccccatctgctgctgaagatattctgagcaaactttttggcggcatcagtggtgatgttattagtcgcactggtgagacagaatcacagagtagtacacgaagtacaactggctatccttatctttctcaggtgaataacgttgaccctcaggccatgatgatgatggccactctgttatccctggatgcctcagcgcagagagttgcgagtatgaaaaactccaacgagatctacgcggatggacaaaataaagcgctggataataaaacgctggagtttaaaaagcagctcgaagaacaacaaaaagccgaagagaaagcacaaaaaagtaaaattgttggtcaggtctttggttggttaggggttgcagcaactgctattgcagctatttttaacccggcactctgggctgttgttgctgttagtgcaacagcaatggcactgcaaactgcagttgatgttatgggcgatgatgctccacaggcgttaaaaacagcagcgcaagcttttggcggtctatctcttgccgcaggtattctgacagccggcattggcggggtgtcttcacttatatctaaagttggcgatgtcgctaacaaagttggttcaaacatcgtaaaagtagtcactacgctggccgacacttttgttgaaaatgttgcatcgaaaatttcggcagtggcaaatggtttaactacttcttcgcgctctattggtacaactgtgctgaataatgacgcagcgtattataatgtgttatcacaggtttctgcttttgctgtggaaaatttaactcgacaaagtgagtacttaagtcagagtgcgaaggcagagctggaaaaagctactctcgagctgcaaaaccaggcgaattatatacagagtgcttctcagctgatgtctgattctgcgcgagtgaatagccgtattgtcagcggtcgagtttaa

SEQ ID NO: 20064 - DNA, 966 bp, Escherichia coli
atgaatactatcgataataacaatgcggcaatcgcagttaattctgttttgagcagcacgactgacagcaccagttcaacaactacatcaacttcgtcaatcagttcatctttacttactgatggcagagtggatatttctaaacttctgctggaggttcaaaaactgttgcgtgagatggtcaccacattgcaagattatcttcagaagcaattggcgcaaagctatgacatccaaaaagccgtttttgagagccaaaataaagctattgatgagaaaaaagccggtgcgacagccgctctgattggtggtgctatctcatctgtcctggggattttaggctcttttgctgccattaatagcgcaactaaaggcgcgagtgatgtcgctcagcaagccgcttctacttctgcgaagtctatcggtacagtctctgaagcttcaactaaagcactggcgaaggcttccgaaggtattgcagatgcagcagatgatgcagctggcgcaatgcagcaaactatcgcgacagctgcaaaagcggccagtcgtacatccggtatcactgatgatgttgctacttcggctcagaaagcttctcaggtagctgaagaggctgctgatgctgctcaagaattagcacagaaggcaggattattaagtcgctttactgctgctgccggaaggatttccggttctacgccatttattgttgttaccagccttgctgaaggtacgaaaacattgccaacaacgatatctgaatctgtcaagtccaatcatgatatcaatgagcagcgtgctaaatctgtagaaaatcttcaggcgtcgaatttagatacctacaaacaggatgttcgcagagcgcaggatgatatctctagccgtctacgtgatatgacaacgacagcccgtgatcttactgaccttattaatcgcatggggcaagcggctcgcttagctgggtaa

SEQ ID NO: 20065 - DNA, 408 bp, Escherichia coli
atggtcgatacgtttaatgatgaagtgtttaattactatcttgaacaaaaagggtacacaatacagaaggagtttctttgtggcagtgccttttttatcggatggcggattgagacaccttttttttcattagcgtacagactggatgaacaagaactgattttgtgctcttttgaagcacgtaaccaaacagggcttaacggccctgttttatcactgactcgtttgctcgaagagttgtatcaccacttttcgggtattaagaaaatcagtgcgatgaaatctaagattggttcagattcagaacgtcaaaagcgcgaagagttgtttaattacttcatcagaaagggtgccgtgcagcaagaaacagaagacggaatttggttcgtaatgaacgtaaatagttaa

SEQ ID NO: 20066 - DNA, 222 bp, Escherichia coli
atgaatttatctgaaattactcaacaaatgggtgaagtaggtaaaacgctgagcgattctgtgccagagttacttaatagcaccgatttggttaatgaccctgaaaaaatgttagagttgcagtttgcggttcagcaatattctgcttatgttaacgtagaaagtggaatgttgaaaacgataaaagatctggtctcaaccatttctaaccgtagtttttaa

SEQ ID NO: 20067 - DNA, 279 bp, Escherichia coli
atggttaatgatatttctgctaataagatattggtgtgggcggctgtagctgcggcaaaccataagcttcccaaatatgcggaagctatcctgaatgtattcccacaaattatacctgataaaaaagatatcgcacatttagaatttattatcttatttggattaaatagaaaaaatgatgcgataaaggctttggagggctgtatggatgatgagtcgagtcagttattgtacagtttggtccatgagaatgttagtggttgggtacgaggattttaa

SEQ ID NO: 20068 - DNA, 342 bp, Escherichia coli
atgcttaatggaattagtaacgctgcttctacactagggcggcagcttgtaggtatcgcaagtcgagtgagctctgcggggggaactggattttctgtagcccctcaggctgttcgtcttactccggtgagagttcattcccccttttctccaggttcgtcgaatgttaatgcgagaacgatttttaatatgagcagccaggtgacttcatttactccctctcgtccggcaccgccgccaccgacaagtggacaggcatcgggggcatcccgacctttaccgcccattgcacaggcattaaaagagcacttggctgcctatgagcaatcgaagaaaggataa

SEQ ID NO: 20069 - DNA, 1266 bp, Escherichia coli
gtgcagaactgcacaatccagctgaaagcaaaacgtaacagtaccacggtggtggtgaacacggtggcctcagaaaatccggatgaagccgggcgttacagcatggacgttgagtacggtcagtacagcgtcattctgttggtggaaggattcccgccgtcacatgccgggaccatcaccgtgtatgaagattctcaaccggggacgctgaatgattttctcggtgccatgtcggaggatgacgtccggccggaggcactgcgtcgttttgaactgatggtggaagaagcggcgcgtcacgctgaggaggcgaagaagaatgccggagaggcggagacgtccgcgaggaatgctggcatatcagccagtcaggcagaagagagcgctgcaaatgctgacacttcagcaggggatgcatcggagtcagcccggcaggcggcagaaagtgcagcctcagcaaagcagtcagaggatgcgtcctcgtcctcggcctctgcggccgctcaaaaagccagtgagtcattacaaagtgcaacagatgctgagttgtcaaaaaagatggcagaaagtgcagccggtaatgcagccagggatgcaacgaccgcaacagaaaaagcccgggagtcagcagaaagcgcacagtcagcggaacaaagcaggatagcggcggaagaggccgtaaaccgaatccccaccgtggtgggacctcccgggccaaagggggaacaggggcccgcgggtcctcaggggccgaagggtgataagggagagcgcggtgacaccggccctgtcggggcaaccggcgaacggggaccggcaggtgatgctggtccggcaggcccgcaggggccgaaaggtgacaggggagagcggggagagaccggtctgacgggaaatgcaggtccacagggtccaaagggagataccggtgcggcaggcccggcaggcccacagggaccgaaaggagaaacaggtgcggctggcccggtgggggcaaccggacctcagggaccgaagggcgacccgggggagacacaaatccgttttcgtctggggccggcgagcattattgagacaaacagcaatggctggttcccggatacagatggcgcactcatcaccggactgacctttcttgaccccaaagatgccacacaggttcaggggctgtttcagcatttgcaggtcaggtttggtgacgggccgtggcaggatgttaaggggctgaatgaagtgggcagtgatacaggcagaacaggagaatga

SEQ ID NO: 20070 - DNA, 270 bp, Escherichia coli
atgaatatactaaaaaaacttatgcagcgtctgtgtggttgcggaaagcatgatggccgtgaacacgtgcagtcgcttacagcacaactgcgactgggaccggcagacattctggagtcagatgagaatggcattattccggagcaggacagggtaatcacacaggtggtgatactggatgcggataaaaagcagatacagtgcgtggtaagaccgctgcaaattctgcgtgctgacgggacgtgggaaaatattggcgggatgaagtaa

SEQ ID NO: 20071 - DNA, 981 bp, Escherichia coli
atgctttcaccgataaggacaactttccataactcagcaaatatagtgcagagttcaccctgtcaaacggtttcttttgccggaaaggaatatgagttaaaggtcattgatgaaaaaacgcctattctttttcagtggtttgaacctaatcctgaacgatataagaaagatgaggttccaatagttaatactaagcagcatccctatttagataatgtcacaaatgcggcaaggatagagagtgatcgtatgataggtatttttgttgatggcgatttttcagtcaaccaaaagactgctttttcaaaattggaacgagattttgaaaatgtaatgataatctatcgggaagatgttgatttcagtatgtatgacagaaaactatcagatatttatcatgatattatatgtgaacaaaggttacgaactgaagacaaaagagatgaatacttgttgaatctgttagagaaagagctgagggaaatttcaaaggagcaggattctttgatttctatgtatgcaaagaaaagaaatcatgcatggtttgatttcttcagaaatttagccttattaaaagcaggagagatattcaggtgcacatataatacaaagaatcacggtatttcattcggggaggggtgtatctatcttgatatggatatgatacttacaggtaagcttggtacaatatatgctcctgatggaatttcaatgcatgtggatcgtcgtaatgatagtgtaaatattgaaaatagtgcaataattgttaaccgtagtaatcatcctgctctacttgagggactttcttttatgcatagtaaagtagatgctcatccatattatgatggtttggggaaaggagttaagaaatattttaactttacaccattacataattataatcatttttgtgactttattgagtttaaacaccctaatatgatcatgaacacaagtcagtatacatgcagttcatggtaa

SEQ ID NO: 20072 - DNA, 264 bp, Escherichia coli
atgaaaattccctcattacagtccaacttcaacttttccgccccggcaggatactctgctcccattgctcctaatcgtgctgaaaatgcctatgcggattacgttttggatataggcaagcgaataccactttccgcagcagatttaagcaacgtatacgaaagtgtaattcgtgccgtccatgacagtcgtggcagactcattgatcagcatacggtcgatatgattaataatactatacttggtgctttgagccgctcataa

SEQ ID NO: 20073 - DNA, 882 bp, Escherichia coli
atgctatcaccatcttctgtaaatttggggtgttcatggaattctttaaccagaaacctgacttctcctgacagtcgtattttatcctctgtaagggatgcagctgctagctcggataatggggcgcaagtaaaggtgggcaacagaacatatcgtgttgttgtcactgataataagttttgcgttacaagagaaagtcatagtggttgctttactaatctgttgcacaggctgggatggcctaagggagagattagcaggaaaattgaggtgatgctgaattcatcgccagtgaataggactatggaaagaggtgctgttcattcgaatagacctgatttacctcctgttgattatgcaccgccagagttaccgagtgtggactataacaggttgcctgtgcctggtaatgttattggcaaagggggtaacgctgtagtatatgaagatgctgaggatgcaacaaaagtcctgaagatgtttactgcatctcaaagcaatgaagaggtaacaaacgaagttcgttgcttcaaccaatattatggtgccgggagtgcagaaaaaatatatggcgataatggcgatattattggtattagaatggataaaataaatggagaatcgcttttaaatatttcgtccttgccggcacaggctgagcatgccatttatgatatgtttgacaggcttgagcaaaaaggaattctttttatcgatacaacagagacaaatgtcttatatgatcgcacgagaaatgaatttaatccaatagatatatcatcttataatatttctgaacgttcatggagtgaaaatcaaataatgcaatcttatcatggaggaaagcaagatcttattagtgtggtattaagtaaaatttag

SEQ ID NO: 20074 - DNA, 186 bp, Escherichia coli
atgggcattatgtcatgtctgaaatttttctggtgcctgtatgccattcgccagtctctcagcggcattgtccatttctgtgacgcggcctggattgccagccacaccactttttaccaactccatccatgcaacaaatccactacactggataaaattactaaattttacttaataccacactaa

SEQ ID NO: 20075 - DNA, 849 bp, Escherichia coli
atgaaagacattacccttccccccccgacgtccgcgtcctgtctgacaggggccatatctgtaaatactgaagctgtattatctcccatgcaacacacttcagccttacatgtaagagattttgcttccctgtgctcacagaacctcaaagctaatgtattgctaaatagtgatgaccacgaagtacctatacatcagaaaaatcctgctgcaataatgcaaaatatcgactctaacatcaaacagatggcaacagactgggggatgtcgattgaggaggttgaggttattatagggcgagagaaaggcattgtggaaccctcctgcggagttaccgctaatgctattatgaaactatttctggacaaggatggcttcagttactgctttgaaaatgaacagacactatcgctcgagcagcttcaggaacgcctgtcctgtatgcctgaatgtaagagctttgtattacgtgttaatgatggtgcgcttggtcatgcttacattgtcgatattcccaaaggagaaaactcttgtcgtcctgcattcttgtatcagtcagatttaggagagggcgtcaccagaaagttaagatttgaggactggatgacgcataaagcattgactccgattttgctggatgatatttgtaattacttctcctgcatgtctcaaaataagacagatttggagcagattgcaacgttatttgatattgatgggaatgttaaaatgttacgaaaggaaaatattcaatatcaaaagcatgacaattttagtttccagttgtttgagtatgacaccgataatattgaaaaaaacattgagataataaaatcactatgtagttag

SEQ ID NO: 20076 - DNA, 576 bp, Escherichia coli
atgccattaacctcagatattggatcacattcatttaatcttgggctggaggtttttcgtgcccgaattgcagccaatgggcgcggagatattacagtaggtggtgaaactgtcagtattgtgtatgatgctactgatgggagcttttcatccagtggcggtaatggcggattgctttctgagttattgattttgggatttaataatggtcctcgagcccttagtgagagaatgctaagtatgctttcggactcaggtgaagcacaatcgcaagagggtattcagagcaaaatatctcaatataagttttctgtttgtccagagagacttcagtgcccgccagagtctgctcaatgtcccattacattggagataccagaggaaggggtgtttattaagaattcaggggattcagttgtatgtagtttatttgatgttactgcattttctcggttagttagtgaaaaatcacctcacccactgacacgagagaaactaacggcatcaatggttgtaagtgctgataaatgtttttatgaccatggtaagggtagcttcgttataaaagatagttaa

SEQ ID NO: 20077 - DNA, 1239 bp, Escherichia coli
atgaatgttcaaccaaatgtgcacactggattaaccccccccttacatcttgcacacccaccacatcctgcgccaaatcagataccggaatcagaattgccacctggatgtgagactggatttgttgttaatattccagaggatatacagcaacacactccggaatgcggtgaaacaacagctctgttgggtttaataagagataaaggtctgctctcagggttagacgcatatcttgctcctcaccttgaagaaggctcagcaggaaaaaaagcattggatatgtttggtttattcaatgttactcagatggcattagaaatacccagcaccgttcctggtatctctggtaaatatggtgttcagatgaacattgtaaaaccagatattcaccccacaaccgggaattattttttacagttattccccctacatgatgaggtgggaataaacttcggtgcgctcccaggaccactccagaagtttctctctcaaaatcccaatccatggtttggagtaacagctcaagttgttcgtaaccacggcatagaactacctatagtcaaaacagataatggatggaaactagttggagaaacaccacttacacctgaagggcctaaagcaaattatacggaagaatgggtcatcagacctggtgagtttgacttaaagtatggcagcactccgttgcagagcactttaggtttagaatttggagctcattttaaatgggatttagataatcctaataccaaatatgccgttcttaccaatgcacttgcgaatgcagctggtgctgcagggggatatactctatctcaatatacaggaacagacgcaatgctgagcccccatgttggctcgatggccggacaggctttggggcatgctgtacaatgctacactccaggattaaagccagacactattttatggtgggcaggtacgactctggggctggcagatttaaacaaagccgagacaggtgaaggcagattcactgactatcctcgtatatggtggcacgcaagagaaggtgccatcttccctaataaagaagatattgcccgtgcaacaggggctgatatacgagctatggaagaaggtatccctgttggacagcggcatccaaatccagaggatgtggtaatcgatatcgaaagcaatggcttaccacatcataatccatcaaatcatgttgatatctttgatataatccaagaaacaagagtctaa

SEQ ID NO: 20078 - DNA, 606 bp, Escherichia coli
atgaaatatacattcaacccagaagatctgaccaaagagcgatctttgcatgatgtttacaaattaactaaaaaaataaaggtcaattcatttgacttttatttcacattattgttagtgatattattatctattaatgctttttgtctatcttcatcaccagagttaatttcatctattagacaatggacacctttagtattcggattcactacaacaacattaggttttttaattactggatttacaatatttgcaaccataaataaacctgaacttttcctttcattaatggagtataagcatccattatacgggataagttacttaaaatatgtttatggtgtatttatgagagtatttatatatttcatattttggtctgttatctatcttttagtccttcttttcgggcaagaaaatggattggctacaaaattactcagagccttaatgttttctcattgcactaaagttgttggagttcaaatactatatatactcgtaggaagcagtgcagtgttccttgtattaactttaaaaactttcctgttcaatatttatgctatgttaatgcaatctctacgctgggaagtagaaagataa

SEQ ID NO: 20079 - DNA, 1050 bp, Escherichia coli
atgagctttacgaaaactattgaatttgcaaactataccttaaattttggagaggacaaagttctcttagatgcttttgattgcattgtttttccttcatttttcgcacaaaaatacgttagaaaatttaaagatacagaatatttctttactgacacaaaaattattacgttagatactacagattcagattttattggtcctatagttccaacaattgcattgtgtggccgcattataaaaaagaccatatttaaacgagatcaaatatttcaagatggtcaattaattcgagatcacaggacgctagaaagtcaccccagctctatttttattcttatgcttaatgagcacagattaatgctttgcaaagaggtttctggagcccctaccctagaagaatttgaaaatactagcaagtattgccttgcacagcgatataattcttttgtggattacgaagtaaaaaaaaataaaagaattagaaagaaaaaatcatacattgatcgactgtataaaaaagatatttatcgtaaactaggagcccccaaattacgggttacccccttaacagacccaagatcattgagcaattttgttgaactcttttctgttgttaatagattatcaattgagttattgccaacaaatagtgaaaatatatctcttgatggcttctggaggaaaattgaacaagaaaaagaagaacttaatagtagtaaagctcaattagtatacacaaataaaaatgaagatggtttaaattctgaggccgtcattcaaaaaacaacaagtgcaacccgaatggccaactctaaagtaattatcagtggtaaagatgaacacggagcaaggctatcagggaataatgatagttttactctaaaagcatcaaggccacaacttagttctgatttggaaagagctgctcaagaggcgtattctgcattcacagaattaaaggatgaaggaaatattattattccagaacgtgaagattatactaaaattttttccaagttaacatcaataatttctaggtggctatag

SEQ ID NO: 20080 - DNA, 843 bp, Escherichia coli
atggcctatggtttcaaatcacgccaagcattctgtaaccaccttggtatttcacaaagtacaatggctaacagatatgcacgcgataccttccctgctgattgggttgttatatgttcaatggaaactggcgcatcaatcgaatggttagcatttggtttagatgctgaagaaggagtgccagttccttcgccagaacggcatgctgaaaaacagtctgcagatgaattttgcaatgaagttcacacccccacgataaagttcgataatgaaaaccacatggatttcactcgagggggtaaagcagcaatagagcgaattgttaaggcttacggttacaaaacgcgccaagccttagccgatcaccttggtatctcaaaaagcacattagctacacgatacatgcgagacatttttccggcagactggatcatccaatgctgtttagaaacaggagtgtctctcgagtggttatcttttggtaaggggcattccaatcaaacaaagctaagtgggttgcttacattagactgctatgatctacgtgacggcaaacttactgatcaaagagaattaatcgtttcgagcgaaattttacctcaaaatctaaaacatccctatatagttaattccgcaaatgattcatatatcattagcaaagaggagtatcttagcgatggtctatggttagtatctattaacggagaatttacttttagagacatatttaaacttccaaacaatcgcatccgcgttgaaaacacaaaatatagctttgaatgcgataaagaagatttggaatttaataataaagttaaaggaataattagaaaaagggtttaa

SEQ ID NO: 20081 - DNA, 249 bp, Escherichia coli
atgttgaacccggttgaaagagagcgtatagagcaacttgaaaacgagatctccagtcttcgcgatgaggttgctgttcaacgaattcttgtttcaggtttgatccactccttatttcgaactgactcagcaaatcaatcagcattttttgagctcctccgcgaagaattaaacaaacttcctttaggttcggttaaacaacaagaattcactcatctgatacagacactgatagatcgttaccgataa

SEQ ID NO: 20082 - DNA, 1083 bp, Escherichia coli
gtgaaagagttggaactatataatctgaatttttattttagcttgtgtacttcagatgaagtggaaagaataaaaaatgtatcaaactcggcggattacttactcaaaattagggctaatgcaactatagaacatatcagaatccatcgggtattactagctgcaatgcgtagaagtggaaataattggtcattaagtagttattttgatgattctccttttgaggattatattgatgatgtttctgagcagtacaaagaacatctagaagggatctctggcggatttgtattttgcaatgatccgaatggtcggatattaaaaactgattatggatgtgtgattactatttcagaatcacttaagtattttttgtattacatgaatttagcttttttaacttttgatgattgtgatgttcctgatgatgtaagaattgctgcattaagaattgcaataagaactatgatgcaaaaggaatcaatggattttgaaattgatccacgtggtataattccatcacaaattgatatggaaattaggtaccatgtaaatgatgtgatgaagtttattgttggtcatgaatattcacattacgtacttgggcatttgaatgatgaatcaactttcgaggcgagttttttaacctctattgatacggaagaagttaaacacaaatttttctcctatgaccaaaaggatgaactagcagcagatattcattctttacgaatgttgtcgctttctaaagaaaaattggctgggttaattcaaaaggtttgtatctacttcgtgttcatggatatatattcaaatgtaaaagatcaggtgtcaccttcacttaatttcacaaagactcaccctgaaccaatggataggcttagaaatatcatagaagagtttaaggaggaagtggaaattgattataatgaaatggataagttcatcagatcaggtgaggtcataaaggatttcttgcaagatgatgctgggtataattttgatgaaatatatgatttttatggatcaatttatttaggtcagtggaggggaaagccgttaatagatagggtagactattga

SEQ ID NO: 20083 - DNA, 816 bp, Escherichia coli
atgtctgagaagttgatttttttatctcatattactgaagaaaaagaattggcaaaaatcattaaagatgcaatcgaagatgagtttgctggatttgtcagcgtttttgtatcttcagatggagaaacgattaaggctgggcaaaatttcctaaaagtaatagaagatggccttgttaattgtattgcggctatatatttaatcagtcctaattctgtgaaaagaagttggattagctttgaattaggggctgtctggataagaaataccctaaatcagaatgctggtttgggagatattcctacacttcctttctgccattcgggcatggtttttaaagagttgcctcaacctatttgtaatctgaatgcaattgaggccaatatggcatctaaattggagtttgcatttaggtctttgcaatcagctgtgggtgctagggggcggctcagaactgattttaatgaattagcagctaaggttgttgattttgaacgcaggtatgttttatttgataatcttgagaaagtttttgatattctcaacttgtctaaaaaagttttaaaggaaataaagtctaaagttcagaataattcgtcaagtgagtttattgttagttttgacttggttcccacaacggtagagaaagaagttagagatattcttcacaaaatacctaatgatttgataaaggttcagtctgagttcctggggatgactgtaactgcaaatgattcatttcccggttgtaaactccaggtcatctttaagatggagttattgaaggattacttcaacaaaacagcatctctctga

SEQ ID NO: 20084 - DNA, 453 bp, Escherichia coli
atgacggagtattatctcaatgaaactgttgtaacttttcccgggaatattattcaggacagtacgattaatatgctgcgcctcagcgatcccgacgctgcactcattatcagccggggccagatgcaggaaggagacgacttaacctcccagattgaacagcaaatgaaaaaactggagaaacaggtaaaggatcttcactacacgcccgttcaggtaacacgggtggggattaatgatggtgaagaagggctggaaatacagagccagtttctccggggtaacgagcaggtgtaccagtgtcaggtggcatttgtattgccgggtgagcgggtcatgatggccttcacctatgcccgaaccacaccgctgaccctggcagatatgacgcgctgggctgaaattaaaaagaatctgcgcttcaggatgcggcaggaagccgggacgaattaa

SEQ ID NO: 20085 - DNA, 552 bp, Escherichia coli
atggggatcctgacatgccaggaagcgaaaggacgtgaacagcttgccacgatgctggcaggacaacagggcatgagcgttgaacaggcccgggcgattctggccgcggcggcaccgcagcagccggtggcatccacgcagagtgaagccgatcgcattatggcgtgtgaagaagcgaacggtcgtgaacaactggcggcaacgctggcggcgatgccggagatgacggtggaaaaagcccgcccgatcctggctgcttcaccgcaggcggatgccggaccctcactccgtgatcagatcatggcactggatgaggcaaaaggggctgaggcgcaggctgaacagctggctgcctgcccgggaatgactgtggagagcgcccgggctgtgctggctgcgggatcaggtaaggcagaaccggtctctgcatccacaaccgccctgtttgaacgcatcatggcgaaccattcaccggcagcggtacagggtggcgtgccacagacgtcagcagacggtgatgcggacgtgaaaatgctcatggctatgccatga

SEQ ID NO: 20086 - DNA, 951 bp, Escherichia coli
gtgagacgtaatctttcacacattattgccgcagcattcaatgaaccgctgcttctggagcccgcctatgcgcgggttttcttttgcgcgctcgggcgcgagatgggggcagcaagtctttcggtaccacagcagcaggtacagcttgatgctcccggaatgctggctgaaacggacgagtacatggccggaggtaaacgaccggcccgtgtttaccgggtggtgaacggtattgctgtactgccagtgaccggcacgctggtgcaccggctggggggtatgcggccattttccggaatgacaggctatgacggcattgtcgcctgtcttcagcaggcaatggcggatagccaggtgcagggcgtactgctggatattgacagtccgggcgggcaggccgccggcgcgtttgactgcgctgacatgatttaccgcctccgtcagcagaagccggtctgggcactgtgcaatgacacggcctgttctgcagccatgctgctggcgtcggcctgctcccgacggctggttacccagacatcccgtatcggctccattggcgtgatgatgagccatgtcagctatgccggtcatctggcgcaggccggtgtggatatcacgctgatttactcaggggcgcacaaggtggatggcaatcagtttgaagcgttgccggcagaggttcgccaggacatgcagcagcggattgatgcggcgcgccggatgtttgccgaaaaagtggcgatgtttaccggcctgtctgttgatgccgtcacgggaacagaggccgccgtttttgaaggtcagtccggcattgatgccgggctggcggatgaattagtcaatgcgtcggatgccatcagtgtgatggccacggcgctgaacagtaatgtcagaggaggcactatgccgcaattaactgcaacggaagccgccgcacaggagaaccagtga

SEQ ID NO: 20087 - DNA, 618 bp, Escherichia coli
gtgctggcgagcctcggtgggctggtttcctatgcggcaaaggttcatttcaaagaagcaggcaacgccatgaatgaattaattgcgaatcatgacttcgactttcgccagttagttaccgcagcagaaggtcaaccggtaactgacaccttccagattgccagggcatttggtaaacgccatcagcatgtgattagggctattaaatgtttgagatgttctgaggaattctcgacaacccatttttgggccgtcgagaaaatcaatgacttaggtatttttgacaagaaacagatttactaccgcatggactttagtggcttcgttatgctggttatgggatttaacggggcaaaagccgatgctgttaaagaagcctatatcaatgcgtttaactggatgtcagcagaactccgtaagtacagcgaaagttatgaagcagaacgtaacgccgtaatgctggagtacatgaaagagaaggatgtcgccagcatgtcaggccgtctgctcaatcgctgggggagaacgaaaaaacctcaattgcttgcaaagctggaacgtctggagagacagggacagtttttattaccgggattcgataaaggtattcaagcctga

SEQ ID NO: 20088 - DNA, 498 bp, Escherichia coli
atgtcgccgtcattacgcaaggctgttgcagctgctattggtggtggggctgttgccatagcgtctgtgctcatcactggtccaggtggtaacgatggtctggaaggtgtcagctacataccatacaaagatatcgttggcgtatggactgtatgtcacggacacaccggaaaagacatcatgcccggtaaaacgtataccgaagcagaatgcaaagccctcctgaataaagaccttgccacggtcgccagacaaattaacccgtacatcaacgtcgatataccggaaacaacgcgcggcgctctttactcgttcgtttacaacgtgggcgctggcaatttcagaacatcgacgcttcttcgcaaaataaaccagggcgatatcaaaagcgcatgtgatcagctacggcgctggacatacgctggcggtaagcaatggaaagggctgatgactcgccgcgagattgagcgtgaagtctgtttgtgggggcaacaatga

SEQ ID NO: 20089 - DNA, 207 bp, Escherichia coli
atggaaaaaatcacaacaggtgtgtcatacaccacgtcagcggtggggacgggatactggttactgcagctgctggacaaagtctctccgtcccagtgggtggcaataggtgtgctgggaagtctgctgtttggcctgctgacgtatctgacaaatctttatttcaagattaaagaagataagcgtaaggctgcgagaggtgaataa

SEQ ID NO: 20090 - DNA, 744 bp, Escherichia coli
atgttatcatcttgtattggggtggttatgaaggatggtgcgctgctcaggagttcttcactttttattgcctacatgggatgccttggatgggggagtgcttatttctatggatggggtacttctttttactacggcttcccatggtggattgtaggtgcaggtgttgatgatgttgccagaagtttattttttgcagttatcgtcattgctatatttcttatcggttggggtattggtgttgtattctttttcgcagtgaaaagaaaacattctatgcaagagctaaatgtatttcgcctttattttgctgtggaattattgtttgtgccggcaattattgagttttctatattgagacagaagattcaggtacctcttttgctactgtcagcagcgattgcgctggcggttacaatttcgataagatcttatgggcgatttttatcggtatcatgcttctatgataagccatttataaaaaaacatttttttgagattgtgatgattgcttttgtggcatatttttggcttttttcatttctgacaggatattacaaaccacagtttaagaaagaatatgaaatgattaattataatgatggttggtattatgttcttgctcgttatgataattgtctggttttgtctacttctttcaatgcaggtagtaaaaggtttgtcatttatcaatcagcacaagataagaatcttcaggttgatattgtaaggaccagaatttaa

SEQ ID NO: 20091 - DNA, 690 bp, Escherichia coli
atgaatacccaatatttacagtatgttcgtgagcaacttatggcagctactgctgacttgaacggagcaacgaaaggccagctcgaagcctggcaggagcatgcacaatttgatactggtacatacaaacgaaagaagccgcgcattctggatgtggtaactggcaagatgattacgctggataatacgccgacttccggtaagcagtcgtacgcaaaaggttcatccattgctttggtcagcccggttgaattctcaacctcttcatggcgccgcgcggttttgtctctcgatgaacatcagaaagcatggttgctttggtgttacagcgaaagcgttcgatgggggcatcaggtcaccataacgcaatgggcatggagcgagtttaaagatttgttaagtaacagaaaaattgcaggtaagacactggatcgcctgaagacgttaatctggctggctgcacaggatgtgaagagcgaacttgcagggcgtgaggcctatgaataccagacactggcatcattggtgggagtgacaacaaaaaactggtccgagacatttactgaacgctgggttgcaatgaagcacatttttctacagcttgatagtgatgctttattgcttgtgacgagaacacgttcaaaacaaaaggcagcatttttacagcaaaatattgcaaaactggattaa

SEQ ID NO: 20092 - DNA, 960 bp, Escherichia coli
atgaaaaaaagtgtcatcgctggcgtctttattgctctgtcatttaccacgtgttcagctatcgcgaacagccttgcattatcattagcaaatgatgatgcagggaagtttcaaccaatacttaatgatatttatggcaataaacatgaaaacagagatgattactcacaaggcttatttctgggatatagccacgatatctcagactcgagccaattatctctccatattgcgcaagatatttactctccatcaggcagtaataaaagacacaacacagctgtaactggagacagagcttttagtgcatacactcacactggtattgaatggaactcccttgcgaatgactggattcgctatcgattaggtactgacataggtgttgttggccccgacgcaggcggtcagaaagtacaaaataaagctcatgagattattggggcagaaaaatatcatgcatgggatgatcaaatagagaatcgctacggttatactgtaaaagggatgctatccatgacaccaagtatggatattttaggtgctaatgttggattataccctgaagtttctgctgttactggaaacttatttcaatatgtagcatatggcgcaaccattgccattggtaatgataaaaccttcaattcggataatggctttggtctgctggctccccgtggtttaatgcatatgtccgatacaagcggattcaaatacaagatttttgcaggtatggaaagacgagatgtcaatcgcaactatactctcgaaggaaaaacaatacagacgaaacaaacaacagtatcgctaaacaaaactgttgatgaatatcaagttggcgcaacaattgggtatgcacctgtagccttcacactagcatttaataaagtaacatcagaattcaagacaggggatgactattcatttataaatggagcaatcaccttctttttttaa

SEQ ID NO: 20093 - DNA, 900 bp, Escherichia coli
atgacaaatacagcaaaaatactcaacttcggcagaggtaactttgccggacaggagcgtaatgtggcagatctcgatgatggttacgccagactatcaaatatgctgcttgaggcttattcaggcgcagatctgaccaagcgacagtttaaagtgctgcttgccattctgcgtaaaacctatgggtggaataaaccaatggacagaatcaccgattctcaacttagcgagattacaaagttacctgtcaaacggtgcaatgaagccaagttagaactcgtcagaatgaatattatcaagcagcaaggcggcatgtttggaccaaataaaaacatctcagaatggtgtatccctcaaaacgagggaaaatcccctaaaacgagggataaaacatccctcaaattgggggattgctatccctcaaaacaggggaacacaaaagacactaatacaaaagaaaatagaaaagattattcgtcagagaattctggcgaatcctctgaccagccagaaaacgacctttctgtggtgaaacctgatgctgcaattcagagcggcagcaaatgggggacagcagaagacctgaccgccgcagagtggatgtttgacatggtgaagactatcgcgccatcagccagaaaaccgaattttgcagggtgggctaacgatatccgcctgatgcgtgaacgtgacggacgtaaccaccgcgatatgtgtgtgctgttccgctgggcctgccaggacaacttctggtccggtaatgtgctgagcccggccaaactccgcgacaagtggacccagctcgaaatcaaccgtaacaagcaacaggcagtcgtgacagccagcaaaccaaaactcgacctgacaaacacagactggatttacggggtggatttatga

SEQ ID NO: 20094 - DNA, 294 bp, Escherichia coli
atggttcgtgcaaacaaacgcaacgaggctctacgaatcgagagtgcgttgcttaacaaaatcgcaatgcttggaactgagaagacagcggaagctgtgggagttgataagtcgcagatcagcaggtggaagagggattggattccaaagttctcaatgctgcttgctgttcttgaatggggtgtcgtcgacgacgacatggctcgattggcacgacaagttgcttcgattctcaccaataaaaaacgcccggcggcaaccgagcgttctgaacaaatccagatggaattctga

SEQ ID NO: 20095 - DNA, 168 bp, Escherichia coli
atgcacttccgagtcacaggtgaatggaatggagaaccattcaacagagttatcgaagcagagaacatcaatgactgctatgaccactggatgatatgggcgcagatagcacatgcagacataaccaatattcgaattgaagaactgaaagaacaccaagccgcctga

SEQ ID NO: 20096 - DNA, 846 bp, Escherichia coli
atgagtcaaacatcaaccttgaaaggccagtgcattgctgaattcctcggtaccgggttgttgatttttttcggtgtgggttgcgttgcagcactaaaagtcgctggtgcgtcttttggtcagtgggaaatcagtgtcatttggggactgggggtggcaatggccatctacctgaccgcaggggtttccggcgcgcatcttaatcccgctgttaccattgcattgtggctgtttgcctgtttcgacaagcgcaaagttattccttttatcgtttcacaagttgccggcgctttctgtgctgcggctttagtttacgggctttactacaatttatttttcgacttcgagcagactcatcacattgttcgcggcagcgttgaaagtgttgatctggctggcactttctctacttaccctaatcctcatatcaattttgtgcaggctttcgcagttgagatggtgattaccgctattctgatggggctgatcctggcgttaacggacgatggcaacggtgtaccacgcggccctttggctcccttgctgattggtctactgattgcggtcattggcgcatctatgggcccattgacgggctttgccatgaacccagcgcgtgacttcggtccgaaagtctttgcctggctggcgggctggggcaatgtcgcctttaccggcggcagagacattccttacttcctggtgccgctttttggccctatcgttggcgcgattgtaggtgcatttgcctaccgcaaactgattggtcgccatttgccttgcgatatctgtgttgtggaagaaaaggagaccacaactccttcagaacaaaaagcttcgctgtaa

SEQ ID NO: 20097 - DNA, 1146 bp, Escherichia coli
atgataaatggacttaataatgactccgcatctttagttttagatgctgcaatgaaagttaattctgggtttaaaaaaagctgggatgagatgtcatgcgctgaaaagttacttaaagtacttagttttggtttatggaatccaacgtacagtcgtagtgaaagacaatcatttcaagagttgttaaccgttttagagcctgtatatccacttcccaatgaattaggcagagtatctgctcgtttttcagatggctcatccttaagaatttccgtcactaacagcgaaagtattgaagccgagattcgcacaccagataatgaaaagattactgtgctcctggagtcaaacgaacaaaataggttattacaatctttacccatcgatcgccacatgccatacattcaggttcatcgtgccttatctgagatggacctgactgatactacctcaatgcgcaatctacttggttttacgtcaaaactatcaacaaccttgattcctcataatgctcaaacagatccgctttccgggcctacaccattcagctctatctttatggatacatgtcgaggactcggcaatgcaaagctttcactcaatggtgttgatatacctgcaaatgcacaaatgttgcttcgcgatgcactaggacttaaagacacacactcatcaccttcccggaatgttatagatcatggtatttctcgccatgatgcagagcaaatagcaagagaaagcagcggcagcgataatcagaaagctgaagttgtggaatttttatgccatccagaagcagcaacggccatatgctcggctttctatcaatctttcaatgtgccagccttaacgttgacacatgaaaggatctctaaagccagtgaatacaatgcggaaagatcgttagatacacctaacgcttgcattaacatcagtatctctcaatcatcagatggaaacatttatgttaccagccataccggggttctgataatggcgccagaagaccgccccaacgagatgggcatgttgacgaacaggacttcttatgaagtgccgcaaggtgtgaaatgtacaatcgatgaaatggtaagagcgctacaaccaaggtatgccgcatctgaaacatacttacaaaacacttaa

SEQ ID NO: 20098 - DNA, 678 bp, Escherichia coli
gtgaacttatcatctcttacttataataaagaggatgatttcctgtatgccacccagaatagccctgcacagctacttaaaataaccaaaagtggcgacatcatggacagagccccgctgccttttatctctgatgctgaaacaattgaacacatacaagggaacatttttgctgcagtagacgaaaagacttctgaactattcttttttacagttacaaaagatatgcatatctcctttcgaaataaaattcagttagaaaaattcaataaaaagaatagagggtttgaagggctggcatggaaagcagatgatcggatgctgtttgtcgcaaaagaaagacgcccaagtaaaatatttatatatcaactttctccagacctgctgagtgtaaagcaagcaactattccagaggcactaaatgatatacgtgttaacgatatatccggcctggcctttaataatgaaagtctgatgattctgtccgatgaatcgcgtaaattactcaagtttaacctgacagagatgtctttcattgagatgcttgacctgacaaaaggaaatcattctctgaccagtgatttgccccaacctgaaggaattgtaactctgcctgatgaaagcatttatgttgccagtgaacctgatatcctcgcgaaatttgtccctaataagtaa

SEQ ID NO: 20099 - DNA, 126 bp, Escherichia coli
atgtgcgggggccagaaaaaagcggatcttccgctcaaaatgcaggtagcgaaggtggtaaaaatgcgccgggagaagcagaagattgtcccgcgatgtccgtttgagaaacacgagtttgattaa

SEQ ID NO: 20100 - DNA, 903 bp, Escherichia coli
atgggttccaccagaaaggggatgctgaacgttctgattgccgccgtgttgtggggaagttcaggggtctgcgcgcaatacatcatggagcaaagccagatgtcgtcgcagtttttgactatgacgcgtttgatattcgccggtttgattctgctgacgctatcatttgttcatggtgataaaatcttttctattattaacaatcacaaagatgccattagcctactgattttttccgtggttggcgcgctaaccgtacagctcacttttttgctaaccatcgaaaaatcgaacgcagccacggcaacggtgctgcaattcctctcaccgactattatcgtcgcctggttctcactggtgcgtaaatcccgcccgggcattctggttttctgcgctattttgacatcgctgatcgggacttttttattggtgacacacggtaatccgacgtcattatcgatctctcctgccgcgttattctggggcattgcctcggcatttgctgctgcattctataccacctatccctcaatgctgattgcccgctatggcacgttaccggtcgtcggctggagtatgctcattggcggtctgatcttgcttcccttttatgccggacaagggacaaattttgtcgttaacggaagtttgattctggcgtttttttatttggtggtcattggtacgtccctgacatttagtctgtacctgaaaggagcacaattaattggcggtccaaaagccagcattttaagctgtgctgaaccattaagtagcgcgctgctctctttgctgttgctggggatcaccttcacattgccggactggctgggaacgctgctgattctgtcatcggtgattttgatttcaatggattcccgccgccgcgccagagcggcatag

SEQ ID NO: 20101 - DNA, 1377 bp, Escherichia coli
atgtggcaatttgacatgccatttagtgaggcacttagcctgttttctgtattgtctgtcggtgatgctttggttgcccagatccctgcgcttattatttctgtcaccgcgggcgtggttgttactcgtgtgcccggtgaaagcgaaaaagaagaaaaccttgcaggtgatattgttcaacaggtttctgttaatagtcgcccttttttaatcagtgccgcactaatgctcgtaatggcgattattccgggctttcctacattggtcttcttatttctggcggtttgcctgttggggatagcctggaaattacagaagaaaagaacatttggaactggcaataataaggatgctatgggagctgatttgtctaatagccaaaacatctcaccgggcgctgagccattgattttaaacttaagtagtaatatttatagttcagacattacacagcaaattgaggtcatgcgttggaatttctttgaggaaagtggaattccattgcctaagattattgttaatccggttaaaaataatgatagcgcaatagaatttttgctctatcaagagtcaatatacaaagatactcttatagatgatactgtctattttgaggctgggcatgcagagatatcattcgaatttgtccaggaaaagctttcgactaactctatcgtatataaaacgaataaggctaatcaacagctcgctcaccttacaggtatggatgtttatgcaacaacaaatgataagataacgtttttgctaaagaaacttgtattgtctaatgccaaagagttcatcggcgtacaagaaacgcgttatttgatggacatcatggagagaaaatataacgagcttgtgaaagagctgcagcgccagcttggtttgagcaaaattgttgacatcctacaacgtctcgtagaggaaaatgtctcaattagagacctgagaactatctttgagacgcttattttttggtcaacaaaagaaaaggatgtggttatcttgtgcgaatacgttcgtatcgccctgcgtcggcatattttaggtcgctatagcgttagcggtacacttctgaacgtttggcttattggctctgatattgaaaatgagctacgagagtcgatcagacaaacgtcatcaggttcgtatctgaatatctcaccggagcgaactgagcagataattggcttcttaaaaaatatcatgaatccaacggggaacggcgtcattctgaccgctttagatatcaggcgctatgtgaagaaaatgattgaaggttcgttcccgtcagtccccgtgctctcttttcaggaggttgggaataatatcgaacttaaagtattaggaacggtaaatgatttcagagcatga

SEQ ID NO: 20102 - DNA, 1341 bp, Escherichia coli
atgatttcagagcatgattctgtattggaaaaatacccacgtattcagaaagtgctcaatagcactgtgccggcattatcattaaattcgtctaccagatatgaaggcaagattatcaatatcggcgggacgattattaaggcgcgtttaccaaaagcgcgtattggcgccttttataagatagaacccagtcaacgtttagccgaggtgatcgctattgatgaagatgaggttttcttgttgccttttgagcatgtttccggcatgtactgtggtcagtggttaagttatcagggagatgagttcaagattcgtgttggagacgcactacttgggcggcttgttgatggcataggcagaccaatggagagtaatattgctgccccctatcttccgtttgaacgcagcttgtatgctgaaccaccagatcctttattaaggcaggttattgatcagccatttatacttggcgtcagggcaattgatgggctactaacttgcggtattgggcagcgtatcggtatttttgctggttcaggcgttggtaaaagtacgcttttggggatgatttgtaatggcgcatccgcagatattattgtccttgctcttatcggcgaacgtggtcgcgaagtaaatgaattcctcgcgctcttacctcaatccacgctttctaaatgtgtactggtcgtcacaacgtcagaccgccccgcgctggaaaggatgaaagccgcatttacggcgacgactattgcagagtacttccgcgatcaaggtaaaaatgtattattaatgatggattctgtaactcgttatgcccgagccgcacgtgatgttgggcttgcatcgggagaacctgatgtaagggggggattccctccgagtgttttttcttcgttacccaaattattagagcgagcggggcctgcgccaaaaggttcaataaccgcgatttatacggtgttgttagaaagcgataatgttaatgatcctattggcgatgaagtccgctctattcttgatgggcacatcgtacttacccgagaacttgcagaggaaaaccatttccctgcaattgatattggtttaagtgccagtcgtgttatgcataacgttgttacatcggagcatttgcgtgcggcggcagaatgcaaaaagcttattgcaacttataaaaatgttgagctgcttattcgtattggtgagtacacgatggggcaagatcctgaagcagataaggcaataaaaaataggaaattaattcagaactttatacaacaaagcaccaaagatatcagtagttacgaaaaaacgattgaaagcctattcaaagtggttgcctga

SEQ ID NO: 20103 - DNA, 321 bp, Escherichia coli
atggctaagattaactctcagataaaagaggtggatggtaaactcgatgactgcgagcaatccattaaagagtcgattgcctctaagcaggcatattgtgcatcgctggtgaatttggataaagtgtcgttgtataaatatcagattaaaaacaatgcatttgatgagcaaaagcagcgattgtatgagaaaaaatcttcactttcgaaggaaaagcgttcattgctagattcacaaaaacgaacaaaagagaatctgcaacatgttaataaatcagtagaaaaattatcttttgccataaaggaacattactttgactag

SEQ ID NO: 20104 - DNA, 918 bp, Escherichia coli
atgaagccattgagttcacaattgaatatgaaaattaacgatttttatttgccgttgttgccagttatcggaaccggtcgcctctatattacgtccgaaggtcatgcttgccatgcatattttcgtgaggtcagcggtcatggtattcgtttcacgttgacatactcgggctatgaggggcgtttctggatatcagaagaacagttcattcagtggtgccaagagttattcccgtatagcgaaagccggctgataccggaagatatgataaaactcatgatcttatgggtaatgcagactgccttaccggaaggtgatgtgtcagttgatgatgttcaatttacgatgctaaataaagatgtttatccggtaatagaaaataataatggagaaaacagacttaatgtaattatactcgaaacaacggtacaaagtttacaacatctgattaatgataattggcaatttgttccacattctaatgctcttttttttgatggctatatcgtacctgggtggactgattatccagttacagagttgagagttggtgatagtctgagactctatcatgttgatgatagtcaagagagaaggtgctggattgttattaataaccctttggcaaccgtaaagctgagcgataataatttatctgtcacggatgttctggctgcagatccgttatgtactatcagcagcgagactgtgatgaatcgcatttattgtgtgattggcacagtgcatattgatatacatatgttgcgtaatgtccaaaaagatgacattatcgattcaacgggatatcatctttttggtgggtgccagttagtacggaataataccacaatcgcatacgggagtattataaaaatcaacgaagatttttattttactattagcgtagtatgtgattaa

SEQ ID NO: 20105 - DNA, 510 bp, Escherichia coli
atgtcgtcatcattatcaggtataacattcactacttttttgacaagcaatcatgcgtcatggaataagttgacccgaactcttcatatatcgaatgacgatatactagatgaactgcaacttaaagcacgcatgcagcagcgtcaccaccgggtttttgcaggcattgatgactattcaattatcaattttcgtggaaaagattatgctgtccgcttcattaaagataatgataattatgtatacaaagtaaataagataactcaggaaagtggatgtttctcaaagatatttagctttttgtatggaggcgttacgaaggccctggaaagtaaattaaatgagagacacattacgccactttcttcaacctggtttcctcgcactgcactggaaggctttttaactgaaagagggctctcttctttgttacgtcgcgtacagtctacagaaggtgtgaaccctccagagaatactacattaaactctttatcaggtgtgacagtttaa

SEQ ID NO: 20106 - DNA, 378 bp, Escherichia coli
  misc_feature (253)..(262): n is a, c, g, or t
atgaatgaacaattttgcaaagatcttgcacatacgtttgggataacattggaagagcaaactgacgccctcgcttttcacgataacgatggtcatgagtggatacttgagtgcgcacctcaatcagaaattttgtttttttattgttacctatcaaccaacgaactagatcaaatcaataaaatattagaaataaacaaccaccgagaaatgcttggtatgtttttcttatcattaaaagacgataaaattnnnnnnnnnnaaattttattaaacatcgcattcccaaaaaataaaatagatataacggaattcactaacttgatggaaaacggatatctactaaaaaaagaaataataaaactactttcactttga

SEQ ID NO: 20107 - DNA, 486 bp, Escherichia coli
atgcagtcgaaccttatgattaatcatggcaaactgactacccagctactacaggccgtagccaaacaaactggtagtagtgatacccagcaatggttcaagcaagagcagattacttttctatccagagcagtaaacaaaactgtggatgactattgcatgagtaataattcggcaattagtaaggagactaaatgtcgcatttttaaagaggttgaaagcgcgatacaacagcctctcgatatgaactgtgcacaatcatcaattagtcactttttgcaatccaataaatactttaatcagaaagttgatgagcagtgtggtaaaggagtggatcccattacacgttttaacactcaaaccaaattgatagaacaagtctcacgcgaaatctttgaacagaattttagcaccgcgaaaatcagtgatatcaaggctctaactgagaaggcgattgcagacaatgtgcaggatactcggctgtag

SEQ ID NO: 20108 - DNA, 1650 bp, Escherichia coli
atgcctattggtaaccttggtaataatgtaaatggcaatcatttaattccccctgcgccgccactaccttcacaaacagacggcgcggcacggggaggaactggtcatctaattagctctacaggagcattaggatctcgttcattgttttctcccctgagaaattctgtggctgattctgtcgattccagagatattccaggacttcctgcaaacccatcgaggcttgctgcagctacatctgagacatgcttgcttggaggatttgaagttctccatgataaggggccacttgatattctcaatacgcaaattggaccctctgcatttcgtgttgaagcgcaggcagatggtactcatgccgctattggagaaaaaaatggtttggaggttagcgttacattaagtcctcaagaattgagcagcttgcaagctattgatactgagggtaaaaacagatttgtttttaccgggggacgtggcggtagtgggcatccgatggtcactgtcgcatcagatatcgcggaagctcgtgcgaaaatactggccaaattagacccagacaatcagggagggcgtcaagccaaggacgttgatacgcgttctgttggtgttggaagcgcttcgggaatggatgatggcgttgttagcgaaacccatacttcaacaacaacttccagcgttcgttcagatcctaaattctgggtttctgtcggcgcaattgctgctggcttagcggggctggcggcaactggtattgcacaggcgttggctttgacaccggaaccggatgatcctacaaccaccgatcctgatcaggccgcaaatgctgcagaaagtgcaacaaaagatcagttaacgcaagaagcattcaaggaccctgagaaccagaaagttaacatcgatgagaacggaaatgcctttccgtctggggaattaaaagatgatattgttgcgcaaatagcagaacaagctaaagaggctggtgaggtggccagacagcaggctgttgaaagcaatgcacaggcgcagcagcgatatgatgatcagcatgccagacgtcaggaggaattacagctttcgtcgggtattggttacggcctcagcagtgcattgattgctgctgggggaattggtgctggtgtaacgactgcgctccatagacgaaatcagccaacagaacagacgactacaacaacacatacggttgtgcagcaacagaccggagggaataccccagcacaaggtggcactgatgccacaagagcagaagacgcttctctgaatagacgtgattcgcaggggagtgttgcatcgacacactggtcagattcctctagcgaagtggttaatccatatgctgaagttgggggggctcggaatagtctatcggctcatcagccagaagagcatatttatgatgaggtcgctgcagatcctggttatagcgttattcagaatttttcagggagcggcccagttaccggaaggttaataggaactccagggcaaggtatccaaagtacttatgcgcttctggcaaacagcggcggattgcgtttaggtatgggaggattaacgagtggtggcgagagcgcagtaagttctgtaaatgccgcaccaacgccgggaccagtacgtttcgtttaa

SEQ ID NO: 20109 - DNA, 1182 bp, Escherichia coli
atgcgtaatcgggaattacaacttccgatgggaaacctaacgctaggtacggaagataacgatattgtttactttccccttgaacaaggcctcaatcagtttttacttgatatacgtgaggaaggtgttttccttttatctccggttgaattttggattgatgggcaacccacgccctatgaagcagataaaccattacctgtcggaaaggttattgatatagcgggatgttgcttcatcattggtgatattgaccattccttgccattgtctgatgtgccagaaaggttttctgccaaaaatcaacgcaaaaaacgccttatcctggcgagcgtgattggtgctacttttgcgttgtctggtgccatcggcagttacgttttgctttccccaaaagctgaacccccaacgtttaccagagctgatgtatatcagcagctaaaagaaaacaaacttcatgcaatcactctggtatggcatgggaaaaatatcgcgctttatgggcgttgcgaatcaaccacggatttaactccattttttaattacctgaaagaaaaaaatattttttattacaataatatcatttgcaataaccaaatcatatccgcaattaatgatgtcttaacggaatacggttacaaagatatcattattacaaaagataataagcctggattctttctgttatcgggatacattcccccttcacccaaatggagcgaggttgaaaatctgttactgaatacgccaggagttgcaggatgggaaatacacaacaacagtaacaataaaatcaatgaactggcatcagagtttaaaaagaataaattaataaactatgtcaatattttcaaaaagaatgatgtcatcattgttgcgggggaagtttctcaacagaacgagagtaagatccttgccattataaatgcaatgaacaaaaatagtaacgtcaagatactctttcagaacattcagccgtacatttcagcagatatttttcccggaaaaatactcagaatcagcggtacgatgaagaatccaacaattgctcttgataatggtaccagcctggggattggtagcattctgaaaggaggctatgtcatagacgcaattgatcctaaagatggtatcaacatctcccgcccagacgaatatatacatattccactgtcgtattaa

SEQ ID NO: 20110 - DNA, 2820 bp, Escherichia coli
atgattactcatggttgttattcccggacccggcacaagcataagctaaaaaaaacatttattatgcttagtgctggtttaggattgtttttttatgttaatcagaactcatttgcaaatggtgaaaattattttaaattgggttcggattcaaaactgttaactcataatagctatcagaatcgccttttttatacgttgaaaacaggtgaaactgttgccgatctttctaaatcgcaagatattaatttatcgacgatttggtcgttgaataagcatttatacagttctgaaagcgaaatgatgaaggccgcgcctggtcagcagatcattttgccactcaaaaaacttccctttgaatacagtgccttaccacttttaggttcggcacctcttgttgctgcaggtggtgtcgctggtcatacaaataaactgactaaaatgtccccggacgtgaccaaaagcaacatgaccgatgacaaggcattaaattatgcggcacaacaggcggcgagtctcggtagccagcttcagtcgcgatctctgaacggcgattacgcgaaagataccgctcttggtatcgctggtaaccaggcttcgtcacagttgcaggcctggttacaacattatggaacggcagaggttaatctgcagagtggtaataactttgacggtagttcactggacttcttattaccgttctatgattccgaaaaaatgctggcatttggtcaggtcggagcgcgttacattgactcccgctttacggcaaatttaggtgcgggtcagcgttttttccttcctgaaaacatgttgggctataacgtcttcattgatcaggatttttctggtgataatacccgtttaggtattggtggcgaatactggcgagactatttcaaaagtagtgttaacggctatttccgcatgagcggctggcatgagtcatacaataagaaagactatgatgagcgcccagcaaatggcttcgatatccgttttaatggctatctgccatcatacccggcattaggcgccaggctgatgtatgagcagtattatggtgataatgttgctttgtttaattctgataagctgcagtcgaatcctggtgcggcgaccgttggtgtaaactatactccgattcctctggtgacgatggggatcgattaccgtcatggtacgggtaatgaaaatgatctcctttactcaatgcagttccgttatcagtttgataaaccgtggtctcagcaaattgagccacagtatgttaacgagttaagaacattatcaggcagccgttacgatctggttcagcgtaataacaatattattctggagtacaaaaagcaggatattctttctctgaatattccgcatgatattaatggtactgaacgcagtacgcagaagattcaattgatcgttaagagcaaatacggtctggatcgtatcgtctgggatgatagttcattacgtagccagggcggccagattcagcatagcggaagccaaagcgcacaagattaccaggctattttgcctgcttatgtgcaaggtggtagcaacatttataaagtgacggctcgtgcctatgaccgtaatggcaatagctctaacaatgtacagcttactattaccgttctgtcgaatggtcaggtggtcgaccaggttggggtaacggactttacggcggataagacttcggctaaagcggatggcaccgaagcaattacttatactgcgacggtgaaaaagaatggggtagctcaggttaatgtcccggtttcatttaatattgtttcaggaactgcagttttaagtgccaatagtgccaataccaatggtagcggtaaggcgactgtaaccctgaaatcggataaaccaggccaggtcgtcgtgtctgctaaaacagcagagatgacttcagcgcttaatgccaatgcagttatatttgttgatcaaaccaaggccagcattactgagattaaggctgataaaacaactgcgaaggcaaatggttccgatgctgttacatacactgttaaagtgatgaaggggggaacccctgtgtcaggtcaaaaagtgaccttctctaaggattttgggacactggataagactgaagcaacaactgatcagaatggttatgctactgtaaaactgtcatctagcactccaggcaaagctattgttagcgcaaaagtgagtgatgtagatacagaagttaaggctactactgttgagttttttaccccactaagtatcgatggtaataaagtgactgtaattggtactggtgtcactggttctctgccaaataactggctgcagtatgggaaggttaagctacaggctgcgggaggcaatgggaaatatacatggaaatccagtgatactaaaatcgcctctgttgatagtacgggtgtgataaccttaaatgagaaagggagtgccacaattactgtagtatctggagataatcagagtgcgacatatacaattaatgcgccaagcagtatcgtaattgctgtggataaaaatactcgagttacgtattctgaggctgaaaataaatgccagacaaatggagcagctttagcacagtcaaaagaaatattggcaaatatttattcttcgtggggggctgcgaataaatatccttattattctagctctaaatcattgactacttggattaaacaatcctcttctgaactctcatcaggtgtatcaagtacatatgatttagttacgaagaaccaattgactaatgtgggagtaaaaaataaaaatgcttttgcagtttgtgtaaaataa

SEQ ID NO: 20111 - DNA, 471 bp, Escherichia coli
atgtcatcaagatctgaacttttattagataggtttgcggaaaaaattggtgttggatctatttcctttaatgaaaatagattgtgttcttttgctattgatgaaatttattatatttcgttatctgatgccaatgacgaatatatgatgatttatggcgtctgtggaaaattcccgacagataaccctaacttcgctcttgagattttgaatgcaaacttatggtttgcagagaatggtgggccatacctgtgttatgagtcaggagcacaatcgctgttgttagcgttacgtttcccgctcgatgatgctacccctgaaaaacttgagaatgaaatagaagtcgtcgttaagtcgatggaaaatctgtatttggtattacataatcagggaataacattagaaaacgaacatatgaaaatagaggaaattagctcaagcgataataaacattattacgccggaagataa

SEQ ID NO: 20112 - DNA, 300 bp, Escherichia coli
atgaaaaagaaaaattctggctttactgccagtgacttctctcggcctgaaatccgccccggcgatattttccgtgataactacggcggtacggtaacgattaaaggcgtggcagaacggcgcatcacctaccgccgtgaaggttacgaatatgattgcgtgatgcctgtttatcaattccggcgtgatttttccctggtacatgctgcgccccgcagtaaacccaccagcagggaaaaagtgcggggaaatatccagaaaatgaaaagcatgattaacgcattcaggggcaaaaaatga

SEQ ID NO: 20113 - DNA, 201 bp, Escherichia coli
atgcacaattatgaagcgcacttacctgtagttcttaatgtgccgtcagattatacgggacgcgttttgatatttctcgataaagggaaagtgaaatcacaatgccgccttagaaataatgaggttgttggttctctggcttttttttctgaggcctgtattcgtgccggaataaaacttgaatcactgacaggaaaataa

SEQ ID NO: 20114 - DNA, 210 bp, Escherichia coli
atgttaaatcataccacacacccgcaagggcgggactcgcacaacctgaataaatacatctggcgttttatcgccctgagcaccgcacaaccgcgcgtgattcacatcgaggccaccagcgaacaggaagtccgccagcaatccacggttggctgcgtgatggtattcactgcctgtattcgtcagggggcgcagcatgcacaattatga

SEQ ID NO: 20115 - DNA, 444 bp, Escherichia coli
atgaagagatttagaacaatattactgaaaatactcggtgcaaaaacatccattgccatattatgtgttttttgtggagcaagctttttgttcggccaatatcttaatgatatgaatctattcgccagctcaggtgcaattatttcagtttttggattgttgtatacaatcaagttcacaactttaaaaaaattatctaatcgcgaagctgaaattaattcacgcagtggcgtaactggcccgccattgtctgcggaagaatcacaaaagatacgagaagaaaacttagctaaagctcgagttgaggtcagagaggaaataaaagctgaagtactcggggttggactaactgtttttggcaccattatatgggcatatggcggatacataaaaattattccatccctcgtaatgtggataagacattcattgttgatgcaatag

SEQ ID NO: 20116 - DNA, 300 bp, Escherichia coli
atgacagcacagatagcggcttacggacggctggtggctgacccacagttaaagaccaccagcaagggcacacaaatggctatggcgagcatggcggtccccctgccgtgcagccaggcagatgacggaacggcgacgatgtggttatccgtcctggcgtttggcagacaggccgacgcactggcaaaacaccacaaaggcgaactggtgagcgtggcgggtaacatgcaggtgagccagtggacaggccagaacggcgcgaccgggcggcaaaaaaggtcaacagggccaggctactga

SEQ ID NO: 20117 - DNA, 291 bp, Escherichia coli
atgacaataaccgaagccgaaatgctcaaaatgatttgccgcattaccggagccagccaggcagcaggcaaacaggaggccacgcagccggacagcgtgaccgccgaaaattacgcgcgtgtagtggctgaggtgatgcgccgtgacggtatcgagcttaacggcgtggatatgcgcaacatacgaaccagagtccttgagttgctggcctaccgtcgccgttctcaacaacggatggagagcgcgaaaaatacttaccagtggaagaagccggaacggttgcggcggtaa

SEQ ID NO: 20118 - DNA, 162 bp, Escherichia coli
atggtcgatcctgtactgcttaaggcgcataacggtctgcgcatccagatgaacggaaccacccctgatatcgcccgtgttcaggtcattaatacaactcacagtaacttcctcttactgactaaactgtgcacattattgatcgataaaagtggtagataa

SEQ ID NO: 20119 - DNA, 252 bp, Escherichia coli
atgatccgtacggggatgaaataccgttttaagcaacgagtaacagaagccggagcaatccggcttttttatgggtcctcccggtgtagtgacctgccacggggcgggagcggcgcggaaaaaggctggtttttgcattttcatggcggcggcagcatgtgtgataatttattgataattaaaagttatttctgttttcacctgtacaatatttttttctccctgtcattagaccagtttgcaattaattga

SEQ ID NO: 20120 - DNA, 1023 bp, Escherichia coli
  misc_feature (956)..(1003): n is a, c, g, or t
atgaaaagaaatttttatatactgttattgttgttttctttattgtttaatattattgtttacctttgttcagacttgattacagaatattgtgatgtttattatatattttgtattgttgtgtacataacgttgatattgcttgggacataccaacaaaagggcatcacaatgttacttatattccaagcaccttttggcttgtttattctgggacgttttattgcacactatttagatggtgcattgaatcttgagacaattgattttttctatgctacgagactaaatactgaagaggtgattaattacttatcgataaatatgtttttttttataatggtatttgttggctatgcgataccatcgataaaaatgcctggccagcactatgatttgcgtttaaatgagactgtggtgagatatttttctcgtattgtagtaattgtcactataaccggtattgctctaactttgaaagatttgtacaacgcagtaagccagtatgggtactcggcgctctatattattaaaaaggaaaatgctaacgactcatcaagcatgtttgttacattattgttggtagcaattggtattgttgccaaggagaattcccgatcagaattaaaaattctaatgacggttttattcttctatagctttgccttgctattaatgggggcgagaggaccaatgatgacttatatattgctatggctttggttatataagaaagatatcaaaatctttaagttcggcttactggctttgttgatattaagtcttgttcaatttatcagttctctgatgcgaacatcagatgcacagtacaatatatttgcaaaggcattatatgatataggtacaacttttattgttttgccatttagttattatataaccgattggccaaatatcgctcttttacaaaattttgttccgctggtatcaagagnnnnnnnnnnnnnnnnnnnnnnnnnnnnnnnnnnnnnnnnnnnnnnnnagtttcctctttatttttag

SEQ ID NO: 20121 - DNA, 1110 bp, Escherichia coli
atggttactgggagccatataccttttgagcgcaatggactaaagttttatcgaccggatggagaaattactaaggaagatgaagttgctattgtaaatagcaaatatttattttcccccttaacatcattgccccagttagaaatttgttataaggccgctgaggcatatattgcgcgttatacatcattgtttgataaaaacattttgaaaggaaaaaaaatcgggatttatgagcattcaagcgcaggtagagatttatatggtccattattcagactattgggcgcagaaataatttctcttggacgaagcgatcagtttgtacctattgatactgaagctgttgcagatgatgatcgaattaaagcgcgtaaatggtcaactaaatacaagcttgatgctatattttctacagatggagatggagatcgccctttggtagctgatgaaaatggagaatggctacggggggatatacttgggctattagcttctttagaattaggtattgaagctttagctattcctgtaaattgtaactctgcgattgagttatccgataagtttaaacatgtaacacgaactaaaataggttcaccatatgttatttcggcatttaatagcctttatcaaagatatgatgctattgccggttttgaggctaatggagggtatattgtattaactgatctggattataaaggttcaaaaatatgtgctttaccaacaagggatgctctattaccagcattaatgctttttgttgctgctcgtaaggaaaatatatctaatttacttaaaaaaatacccgcaagatacacatggtcagataggctacaaaactatccgaaagagaaaagcaagcaacttatcacacggataagacataaccccaacatattgattgatttgtttaaggaaaatcttggcggatatttaactgttgacaatacagatggtgttcggattattatcataaatagagatattctgcatataagggcatcagggaacgcaccagaaatacgatgctatgctgaatcttgtactgaacaaaaagcaaaagaatatgttaatatacttattaaatttctagaatcacagtga

SEQ ID NO: 20122 - DNA, 192 bp, Escherichia coli
atggaaaaacgccacctgcgcggcctttgtccctgccttcggctttttgctcacatgttctttccggcgttatcccctgattctgtggataaccgtattaccgcctttgagtgcgctgacaccgctcgccgcagtcgaacgaccgagcgtagcgagtcagtgagcgaggaagcggaagagcgccttatgtga

SEQ ID NO: 20123 - DNA, 1239 bp, Escherichia coli
atgccggtaaagccattaactgtgactgaagttaagggaatgaaaccacgtgaaaaggactatgccgtttatgatgggttcggtttattgctgaatgtgagtaaagctggtgggaaagtgtggcgtttccgttatagccatccgataacgaagaaacggcagacatacacgatagggcgttttcctgaattctcactcgcggaagcacgggaagtacgtgatgaacttcggcgaatgattgcacgtggagttgatccagtgacagagaagaaaaatcgtaaaattgagatgtcactaaaaaatctacaaacatttgaagctgttgctaatgcatggatcgcttttaaaaagggatcggaattgcggaaacctacgctgtataatatcgaatatgaagtatacaaatatcttgttcctttctttggtaagtacagcatagagaaaattacagcgccagtagctattaatgctctggatgccgtatccgataagaatgcgttgcaaaaaaaattaatatcaagattaaatgaaattatgaattacgctgtaaattgtggagcattgaaaacgaatccattacttaagataaaaactgcattcacaggaaagaaaaataaatcattagctgcactacctgttgaaagattgcctgaatttctgagttggtgggatagtgtgcctcataagtatcaaatagctcacaatgcacttttattccagatattgacaatggtcaggccaggtgaggcgattaaagcagagtggtccgagattgattttgattctggcttgtggattatccccgcgcataaaatgaaatgccatcgtgaacatgttgtgcctctctcatcacaggctattagaatcctaagaacaatgcaggaaataaaaagagggcgttatatatttttttcctccagaacaaaagatgctcctatgggaaagaatactatcaataccccaattgctgccagcaagttcaaagggattgtaacgttacacggttttcgttcgatgtggagtacgcttttaaatgaggagggttttaaccctgatgttattgaggctgcattagcacataaaagtggtgataaaataagagatatttataatagaactacttatttagaacaacgcaaaattatgatgcaatgggtaggagatttttttgatgaggcgagaaaaggggtaattaatagatccggtggtaagaaaggtttgagaatagtaaatggttga

SEQ ID NO: 20124 - DNA, 204 bp, Escherichia coli
atgaataccaatgaagatattttatttactaaagacgtaatgaaaattttgcgctatggggcaatgagcgcattcatcaatttctggaaagatgaaaataatggttttcctcaaccgttcagaattgggcggcggcatacctggcaccgtagagatgtagaggcatggttagataaacaacgagaacaggccaatccccactaa

SEQ ID NO: 20125 - DNA, 270 bp, Escherichia coli
atggatactggatattttgttcaattatgtgtgcaaacgttctggataatatttatcctctcattgcctacagtcatagcggcctctgttatcggtattattattagtctggtccaggctataacgcagttacaggatcaaacattgccttttttgctaaaaataatagcagtgtttgctacgcttgccctgacttatcactggatgggaacaacaatcatcaacttctcgtcgataatatttgaaatgattccgaaggtgaacggctaa

SEQ ID NO: 20126 - DNA, 777 bp, Escherichia coli
atgaatgagataatgacggtcatagtatcatcattttattgtatactcaggccgctggggatgtttattatcctaccaatattttcaacaggtgttttactcagtaactttattcgcaactcaattatgattgcgtttacgcttccgatcatagtagagaactatacattttcggaaaaattgccatctggaatctttcagttgacaggaatagcgctaaaagaaataagtattggttttttcattgggttatcatttactattcttttttgggcaatagatgcggctgggcagattattgatactctaagaggttcaacaatatcttcaatttttaacccgtccataagtgattcatcttctatcactggcgttattttgtaccaatttatctctgtgatctttgttattcatggtgggatacaaagcatcctagataagctatatttatcctacgagatattaccattacaagccgatattgcattcaatcgtgctttaatagattttttgttttctctatgggattcatttattaaactgatgttatcattttcagttcccatgattatcggtatattcttatgtgatatggggtttgggtttcttaacaaaacagcacctcagctaaacgtattcacattatcactgccagtaaaaagtttgatagcaatctttatattgctattagttattcatgtttttcctgattttattacggcaaatattcattctgacataattgatagatcgttaccgagcatgattaatgagtga

SEQ ID NO: 20127 - DNA, 927 bp, Escherichia coli
atggataatcctagagaaaaagtcggtgcaatattacgacatgatgtcagtgttatcgaaaatataaaaaaaataagtgcaacagatatttgtgtggcgaataatcactattttgattttggtgtaaatgctgcattaaatagtagcaaaatacttgaggataatggatttagcgttcatgggatgtttggagattcttatcaagaaattatttctgctgatgaacaaataaggttagccgtctttaatgttgctgaatctgagtatggcgtaaaaacggataactcacttgggtttacatctattacggatcctaatttattttcatcaattgctaatgcattaaaaaataactttatagttgtgtttataattcatgcaggacttgagaatgttttatcacctttacgttcatggtcatcaatttacaaaactttgatagattttggtgttactgcaattattgcacatcacccacatgttccacaacgatacgaacgctacaagaatggagtaatattttacagtttagggaatttcatttttcaagggcatggaatccataaatataataatattggtcaaattgtttcatttgagtttacaacctcagcctttgaatttaaagtacactatgtattaaatgaaaacaatcaagttaaattatactcgaaggctaatgaacttgactatatgctaaatcataaaattgataaattttattccgttactcgaggtgattataatcgctatcgacaattggattataagagattatttagttcattgatccaaaaatctccatttagacacatgccatattttaaaactagatctaagcgagagtttgatttccatctccataatctcagattcgaaacacaccgttttgttcagctggaatatttagaggatatgttaaaatga

SEQ ID NO: 20128 - DNA, 549 bp, Escherichia coli
atgattagggtgaatgcgttacaacagaactcgaaagctaaaatactctctcagccgtcaattataaccttaaataatatgcaggcgattcttgataaaaacgtaacgttttatacaaaagtctccggagaaaaggtggcgtctctggaaagtattacaagcggaacattgctgagagtgacaccacgtatacttgatgacagctcgaatagtcttaccggaaaacgtcgggaacgagttcgtttgttacttgatattcaggatggcaatcaatcgactaaccaaagcaatgctcaggatgccagcagcaccttacctgaagtacaaaattcagaaatgacaacagaagcgacattaagtgcaggagaaagtttattacttggcggattcatccaagataaagaaagttcaagtaaagatggtataccgctgttaagcgacattcctgttattggtagtttattctccagtacggtaaaacaaaaacatagtgttgttcgactctttttaattaaagcaaccccgataaaatctgcatctagcgaataa

SEQ ID NO: 20129 - DNA, 315 bp, Escherichia coli
gtgagccaaacaagaaataaagaactattagataaaaaaataagatcagaaattgaggcgataaaaaaaataatcgccgaatttgatgtcgtaaaagaaagcgttaatgagttaagtgaaaaagcaaaaacagatcctcaggcggcagaaaaattaaacaaattaattgaggggtacacatatggtgaagagcgaaaattatatgattctgccctaagtaagattgaaaaactaatagagacactgagtccagcaagatctaaaagccaatcaacaatgaatcaacggaatagaaataatagaaaaatagtatga

SEQ ID NO: 20130 - DNA, 219 bp, Escherichia coli
atgataacgataactgagctggaagacgaaataataaaaaataaagaagccgcaaatgtttttattgaaaaaataaacgacaaaaagaacgaaatccatgaaaaaatgaaacaccctttggataaagttacctacaatgaagcaaaggaactgctcattgcgtgtgatgcggcaattaggactatagaggtaatgcgaatcaggattaataataaatag

SEQ ID NO: 20131 - DNA, 654 bp, Escherichia coli
atgaaactttatgaatttaaaaatataaaaattgatttagtgcttacagaagatatcataccagaggataagttacaggaaattattcaatctgatgatattatcaaactggctcgaaaaaaaacatatgaacatttactgagggcgaggaggaaatcgaaagaattaaagacagaatccagaaaaaaaattgccagaaaaatgattctaatgagagaaaggattcgaaaaaacaataaaataaaattagataaagaggttaaccaatcgataaaatgggttaaagatatccaggctatcgagttggtcttaatgcaggacataatgaataaggttcatttgtcactgactaatgcattacattctttagatacatcatcaagaattaattgggatgatttacttaatgaagttgtaagggaaactctatctaataacaatattgtcggagctattaagatcactaaaaacccagacattaaacttgatcctggcgaggccaacaatatacagcttattaatgatgcaaacacaccgcataataaaattataatagaaaatgaatatattagaataactttagacccattagagcaaataagtattttattgaattcatttaaagataattatcttagcattattcaggaatga

SEQ ID NO: 20132 - DNA, 297 bp, Escherichia coli
atggaagcagcaaatttaagcccttctggtgcagtattaccactggcagccacaatcaatggaaataatccagtggatgagaagacaggggtgatgcagtcagaaggtggaacaagtcgcaacgttagaatcctgagtggagttttaataggtgcaggtgttctagccgctatcggtactggtatcgcagcaatgtgtgttgacgacccttcacaaagattaggcttaggaatcgcagccggtgtattaggtggcgcaactactgttgccggcggattagcgatgaaatatgcctaa

SEQ ID NO: 20133 - DNA, 207 bp, Escherichia coli
atgattatgaaggatggcatctatagcattatatttattagcaatgaagactcctgtggggaaggtatactgattaaaaatggaaatatgatcactggcggcgatattgcttctgtgtatcagggggttctctctgaagatgaggacatcatacttcatgtccatcgatataattacgaaattccctcggtgctaaacattgaataa

SEQ ID NO: 20134 - DNA, 1275 bp, Escherichia coli; identical to SEQ ID NO: 10814

SEQ ID NO: 20135 - DNA, 1272 bp, Escherichia coli
atgtttgcactggctgatatcaacagtttctacgcctcatgtgaaaaagttttccgcccggaccttcgcaacgaaccggtcatcgtactcagcaataacgatggctgtgtgatcgcgcgcagcccggaggcaaaagcccttggcatcagaatggggcagccctggtttcaggtgagacagatgcgcctggagaagaaaatacatgtattttccagcaattatgcgctgtaccacagcatgagccaacgggtcatggctgttctggagtcgctttctcccgcagttgagccctactcaattgatgaaatgttcattgatttgcgggggataaatcattgcatctctccggaggtttttggtcatcagctcagggaacaggtaaagagctggacaggactcaccatgggggtgggcattgcgcctacaaaaacgctggctaaaagtgcacagtgggcaacaaagcaatggccacagttttccggagtggtcgcgctgacggcagaaaaccgtaatcggaccttgaagctactggggctgcagccagttggtgaggtctggggagtaggacgcagactgacggaaaagctgaatgcgctgggtattaacacagcactgcagctggcgcaggctaacacggcattcatccggaaaaacttcagcgtcattcttgagcgtacggtacgcgaactcaacggcgagtcctgcatatccctggaagaagcaccaccggcaaaacagcagattgtctgtagtcgcagttttggtgaacgaatcacagacaaagatgccatgcaccaggctgttgttcagtatgcagagcgggccgcagagaaactacgtggggagcgtcagtattgccggcaggtgacgacatttgtacggacatccccctttgcagtaaaagaaccctgttacagcaatgccgctgtggaaaagcttccattacccacacaggacagccgggacattattgccgcagcatgcagagcgttaaaccatgtctggcgtgaagggtaccgctatatgaaggcaggagtcatgctggctgatttcacaccatcgggtatagcgcagccgggattatttgatgagatccagccccgtaaaaacagcgaaaagttaatgaaaacactcgatgaactgaaccagtctggaaaagggaaagtgtggtttgcggggcgaggaaccgcccctgaatggcaaatgaaacgggaaatgctctcgccttcgtatacaacacaatggactgagatccccattgcttcattctga

SEQ ID NO: 20136 - DNA, 744 bp, Escherichia coli; identical to SEQ ID NO: 10783

SEQ ID NO: 20137 - DNA, 465 bp, Escherichia coli
atgagtgaaaagagtcacggcagagaagaaatccgtcttcacattgtttgcgatgtccctgatgaacttattgatttcacgtttgaatggaaaggtctgaagaaattatgcgtggcagtctcctttcggtcaataatagcagaacaaaagaaagagccagaaatgacggtcagatattatatcagttctgctgatttaaccgcagagaagttcgccacagcaatccgaaaccactggcacgtggagaataagctgcactggcgtctggacgtggtaatgaatgaagacgactgcaaaataagaagaggaaatgcagcagaattattttcagggatacggcacatcgctattgatattttgacgaatgataaggtattcaaggcagggttaagacgtaagatgcgaaaagcagtcatggacagaaactatctggcgtcagtccttgcggggagcgggctttcgtaa

SEQ ID NO: 20138 - DNA, 132 bp, Escherichia coli
atggatataacacctttccttcatgcgctttgtgctgtggctgcgcagctactgattggtctttttaccgggaactgggcttacggggcgatagccggttgtacgttcttcattgcgcgtgaacacacctag

SEQ ID NO: 20139 - DNA, 738 bp, Escherichia coli
atgaacaaaaatataaaatattctcaaaactttttaacgagtgaaaaagtactcaaccaaataataaaacaattgaatttaaaagaaaccgataccgtttacgaaattggaacaggtaaagggcatttaacgacgaaactggctaaaataagtaaacaggtaacgtctattgaattagacagtcatctattcaacttatcgtcagaaaaattaaaactgaatactcgtgtcactttaattcaccaagatattctacagtttcaattccctaacaaacagaggtataaaattgttgggaatattccttaccatttaagcacacaaattattaaaaaagtggtttttgaaagccatgcgtctgacatctatctgattgttgaagaaggattctacaagcgtaccttggatattcaccgaacactagggttgctcttgcacactcaagtctcgattcagcaattgcttaagctgccagcggaatgctttcatcctaaaccaagagtaaacagtgtcttaataaaacttacccgccataccacagatgttccagataaatattggaagctatatacgtactttgtttcaaaatgggtcaatcgagaatatcgtcaactgtttactaaaaatcagtttcatcaagcaatgaaacacgccaaagtaaacaatttaagtaccgttacttatgagcaagtattgtctatttttaatagttatctattatttaacgggaggaaataa

SEQ ID NO: 20140 - DNA, 450 bp, Escherichia coli
atgactacaattttaagcgactacaataaatctatcctaattgaattactaaacaccaatcgccaaattatcgtcgttcatggcgacgatattgatgattattacacagattcttgctatgacattatctttattgattactatgatgatgatgatttcacttataacggacaggaaatatggcgtggcgatagcatttatcttgtaaaaagttatcaagatgaaattcaaaaccgtatagaaaaaggacaagagctgatatttgttaataaagaaaatgatatatcattttcagaatctattttaacttattaccatctatttgattatgctggtaaaacgtttgaaatagacggtcaaatcattgatgaacaaacaaaagtttttgccgcacccgagcgccgctgcgcatgtcgcacgtgctggaaggtgccagccaggaagacctga

SEQ ID NO: 20141 - DNA, 342 bp, Escherichia coli
atgtcgcacgtgctggaaggtgccagccaggaagacctgaacctttaccgcgcggaagtggagcgcgaccaggcctatggcaactggcgcgatttcttcctgaacaagaagggcagcgtcacatccgtgagcggtgatgccaacctcgaccagatcgcggacgtgtcgtacctgctggataccttctttgccaaggtcacccgcaccgcgttgcagaacgccgcctccatcgcgggcctgatgatcaccaccgaagccatggtggccgaggccccgaagaaggacgagccggcgatgccgccgggcggcggcatgggtggcatgggcggcatggatttctga

SEQ ID NO: 20142 - DNA, 183 bp, Escherichia coli
atgatcatgctgattctcgcgcctctggtgggcgtgctgggggcgcttttgctggcgtatggtgcctggctgatttatcccccggcggggtttgttgttgccggggcgttgtgtctgttctggtcgtggctggtggcgcgatatctcgaccgtacacagctgtctgtcggcggaggtaaatag

SEQ ID NO: 20143 - DNA, 960 bp, Escherichia coli
gtgttcccgccggtgctggtgcagatgctcgaccggctggaaagtgaaatccttactgaccgggtgagtgaggaaagccgccgctggctggcatcgtgcggcctgacggtggcgcagatacaaaaccagatggacccggtgtacacgccggcgagaaaaatccacctgtaccactgcgaccatcgcggcctgccgctggcgcttgtcagcacggaaggggcaacagaatggtgcgcagaatacgatgagtggggcaacctgctgaatgaagagaacccgcaccagctcatccgcctgccgggtcagcagtatgatgaggagtcaggcctgtattacaaccgccaccgctattatgacccgctgcaggggcggtatatcactcaggatccgattgggctgaaggggggatggaacctgtatggatatcaattgaatccgatatcagacatcgaccccctgggtttatctatgtgggaggatgcaaaatcgggggcatgtactaatggtctttgcggcacactatccgctatgataggtccagataagtttgattctatagatagcaccgcatatgacgccttaaataaaataaatagccaatctatttgcgaagataaagagttcgctggtttaatatgtaaggataatagtggcagatatttctcaacagcacctaaccgaggggaaagaaaaggatcatatccattcaatagcccttgccctaatggtactgagaaagtatcagcttatcatactcatggtgcagatagtcatggagaatattgggacgaaatattttcaggcaaagatgagaaaatagttaaaagtaaagataacaatatcaagtcattttatttgggcacgcccagtggtaattttaaagcaatagataaccacgggaaggaaataacaaacggaaaaggattacctaatgtctgcagagttcatggtaatatgtaa

SEQ ID NO: 20144 - DNA, 672 bp, Escherichia coli
ttgtcctttgaatatctgagtgaaagtatttccacactgctgtatctggatgccgatgtcgtttgtaaaggaagtctgaaacctctcacaaaaattatatttaaagatgagtttgctgcggttattcctgacaatgatagtactcaggcggcatgtgcaaaacgtcttaacattcccgaaatgaatggacgttatttcaatgcaggcgttatctatgtcaatcttaaaaaatggcatgaagcaaatttgacaccgtatttactcacgcttttacgaggggaaactaaatatggctctcttaaatatttagatcaggatgcgttgaatatcgcatttaatatgaataatatctacctcgcgaaggattttgatactatttataccctgaaaaacgaacttcatgatcgtagtcatcgaaagtatcagcaaaccattacagataaaacagtattgattcactatacagggataactaaaccatggcatagctgggctggatatccgtctgcatcatactttaatatcgcgcgtgaacaatctccctggaagaaatatcctcttaaagaggcgcggactgttgcagaaatgcagaaacaatataagcatctgtttgcccatggtgagtatataaaaggcataacttcattaattaagtacaagcttaagaaataa

SEQ ID NO: 20145 - DNA, 846 bp, Escherichia coli
gtgaccgcactgattccggcggtctggctggtgacagagatctccaccgtgccgtccggctgcgtggtgaccgtcggagcagtcgtggcaccgttgtccgccaacacgctgactgtctgcccggcaagcgtattaccgaatgcatcggtgatcttcacccgcagcgtgttcgccattgcgccgtcagccactgagccatccttaatgaccaccagatcagcgatcttcgccgtcctgacatctgcaacaaacgtcacgttccggctcgcggtactgctgttgatactggcggtgaccgcactggggcctgccgtctggctggtgacactgatttccaccgtgccgtccagccctgtgatgacagtcggagcgaccgttgtgccggtatccgccaatacgctgaccgtctgcccggcaagcgtattaccgaacgcatcggtcaccctcaccagcagcgtattcgccattgcgccgtctgccacggcgttatcctgcgtcacctccagactcgcgatctgcgccgtgctaacatcggcgataaacgtcacgttccggctctggctgctgttgttaatgctggcggtgaccgcactgattccggcggtctggctggtgacagagatctccaccgtgccgtccggctgcgtggtgaccgtcggagcagtcgtggcaccgttgcctgccaacacgctgaccgtctgtccggcaagcgcattaccgaacgcatcggtgaccttcacttgcagcgtgttcgccattgcaccgtctgccactgagtcgtccttaatgaccaccaggtccgcgatcttcgccgtcctgacatcggcgataaatgtcacgttctga

SEQ ID NO: 20146 - DNA, 522 bp, Escherichia coli; identical to SEQ ID NO: 10852

SEQ ID NO: 20147 - DNA, 270 bp, Escherichia coli
atgtccgacccgatgaaagagctggaggcagcgattgaatcgggacgctttcatcatgacggcaatcccatcatgacctggtgtatcggcaacgtggtcggcaaaaacatgccaggtaacgatgatttagtgaagcccgtcaaagagcaggcggaaaacaaaattgacggtgcagttgcgctgattatggcggttggcagagccatgctgtatgagaaagaagacacgctgtctgaccacattgagtcctacgggatccgctcgctttaa

SEQ ID NO: 20148 - DNA, 270 bp, Escherichia coli
atgtccgatccgatgaaagagctggaagcggcgattgaatcggggcgctttcatcatgatggcaatcccatcatgacctggtgtatcggcaacgtggtcggcaaaaccatcccgggtaacgatgatgtggtgaagcccgtcaaagagcaggcggaaaacaaaatcgatggtgcagttgcgctgattatggcggttggcagagccatgttgtacgagaaagaagacacgctgtctgaccacattgagtcctatgggatccgctcgctttaa

SEQ ID NO: 20149 - DNA, 234 bp, Escherichia coli
atggcacccgaaccggatgacgatgatgacgaaacatgggtactgttcaatgccatgaacggcaaccgcgctgaaatgagcccggaagccgccggtattgctgcctgtctgatgacgtacagtcatcatgcctgtcgtacggagtgttatgccatgacggtccactattaccggctgcgggattacgccctgcagcatccggaatgcagcgccattatgcgcatcattgactga

SEQ ID NO: 20150 - DNA, 783 bp, Escherichia coli; identical to SEQ ID NO: 4541

SEQ ID NO: 20151 - DNA, 159 bp, Escherichia coli; identical to SEQ ID NO: 6188

SEQ ID NO: 20152 - DNA, 396 bp, Escherichia coli; identical to SEQ ID NO: 5305

SEQ ID NO: 20153 - DNA, 2574 bp, Escherichia coli
atgtcccagccggttggtgatcttgttattgacctgagtctggatgctgtccgtttcgatgagcagatgagccgggtaaggcgtcatttttcaggtctggataccgacgccagaaaaaccgccagtgctgttgaacagggcctgagccgccaggcgctggctgcacaaaaagccgggatttccgtcgggcagtataaagcggccatgcgaaccctgcccgcacagtttacggatatcgccacgcagcttgccggtggtcagaatccctggttgatcctgctgcaacagggcggtcaggtgaaggactccttcggcgggatgatccccatgttcagggggcttgccggtgcgatcaccctgccgatggtcggggtcacctcgctggcggtggcgacaggtgcgctggcgtacgcctggtaccagggcgacgccacgctttcagaatttaataaaacgctggtcctttccggcaatcaggccggactgactgccgatcgtatgctgacgctctcaagagccgggcaggcagcagggctgacgtttaaccaggcgagagagtcactggcagccttggtgaatgccggtgtgcgtggtggtgaacagtttgatgccatcaaccagagtgtcgcgcgttttgcgtctgcatccggtgtggaggtggataaagtcgctgaagccttcgggaagctgaccactgacccgacgtcgggactgatggcgatggcgcgccagttccgtaacgtgacggcagagcagattgcgtatgttgcacagctgcagcgttccggagacgaggccggggcattgcaggcggcgaacgatatcgccacgaaaggctttgatgagcagacccgtcgcctgaaagaaaacatgggaacactggagacctgggcggataaaacagggaaggcattcaaatcgatgtgggatgccattctggatatcggtcgtccggaatcctcagcggatatgctcgccagtgcgcagaaggcatttgatgaggcggataaaaaatggcagtggtaccagagccggagccagcgccggggaaagacctcctcttttcgtgcgaaccttcagggggcatgggatgaccgggaaaatgcccgtctgggtctggcagcggccacgctgcagtcggatatggaaaaagccggtgaactggcggcaagggacagggctgagcgtgagtcgtcacagctgaagtataccggagaggcgcagaaggcgtatgagcgcctgcagacgccgctggataaatataccgcccgtcagaaagagctgaataaggccctgaaagacggaaaaatcctgcaggcggattacaacacgctgatggcgtcggcaaaaaaggattatgaatcgacgctgaaaaagccgtcaggtgtgaaggtgtctgccggtgagcgccaggaagaccgggcgcatgcagccctgctggcgcttgaaaccgagctcaggacgctggaaaaacacagcggtgtgaatgagaaaatcagccagcagcgccgggatttatgggaagcggaaagtcagtatgtggtcctgaaagaggccgccacgaaacggcagttatctgagcaggaaaaatccctgctggctcatgagaaagagacgctggagtacaaacgccagctggctgagctgggagacaagattgaacaccagaagcggctgaatgagctggcacagcaggcggcgcggtttgaacagcagcaaagcgcgaagcaggcggcaatcagcgcaaaagcccgcggcctcaccgaccgtcaggcgcagcgggagtcggaagagcagcgccttcgtgaggtgtacggtgataatccggctgcgctggcgaaggccacatcggcactgaagaacacctggtctgcggaggagcagcttcgtggaagctggatggccgggatgaagtccggctggggagagtgggcggaaagtgcgacggacagtttttcgcaggttaaaagtgtggccacgcagacctttgacggtattgcacagaatatggcggcgatgctgaccggcagcgaacagaactggcggggattcacccgttccgtgctgtccatgatgacagaaattctgcttaagcaggcaatggtggggattgtcgggagtatcggcagcgccattggcggggctgttggtggcggcgcatccgcgtcaggcggtacagccattcaggccgctgcggcgaaattccattttgcaaccggaggatttacgggaaccggcggcaaatatgagccagcggggattgttcaccgtggtgaatttgtcttcacaaaggaggcaaccagccggattggcgtggggaatctctatcggctgatgcgcggctatgccaccggtggttatgtcggtacaccgggcagtctggctgacagccggtcgcaggcgtccgggacgtttgagcagaataaccatgtggtgattaacaacgacggcacgaacgggcagataggtccggctgctctgaaggcggtgtatgacatggcccgcaagggtgcccgtgatgaaattcagacacagatgcgtgatggtggactgttctccggaggtggacgatga

SEQ ID NO: 20154 - DNA, 468 bp, Escherichia coli
atggtgaattaccgtcttatatcactggcgctgacagcatgggcaaaacggtccttcagaccatgtaagccagcaataccgcagatgttttctctccgatacccgggatgctttccagcagtttcctgcggtgtttcatatccggatcatcgtctgtcaggtcttttatctgcttctcaagacgcttcagctctgcttcaagccacagaaggtgagcatcaatgctcggcctctggacttcccgcgccgtttcagtgcgattcagttcctgcctgtgcatatctgtcagcgcctggtggcgtactaccagggcatgcaacgcgcgttcaagcgggtgatgcgcttcccaggctgcagggcgcttctgacgacagaactctgccagcatgcagcatccacggtatcagtcttgttacgcagtccttcactctgagcgaaagctttacccagtgcaggattaatgactga

SEQ ID NO: 20155 - DNA, 732 bp, Escherichia coli
ttggcagataataaaaaattacttagtaaagtatataacatggtggaaaaaaaaggtgtccttggatgcaaaaaattaatacacgtcagtacagaaatgcaaaaacactatgaagcaaaatatggagtaaacttggctgaaaggtcaatagtgctcccgatttttgaatataaaaatataacccaatcgcaaaacaaatggacagaaaataaaatacgaagtatctatcttggaggattacaaacatggcaaaatattgataaaatgattcaagtttgtgatgacacagtgataaacaatgaagcaggtaagtatgaattcaactttttcatcccacagagtaacttggaagggtttatagataaatattcgttaaaattacataatatcaatgctaatgcatctacgctatcacgtgatgaagtaattccctttctaaaagaatgtcatattggttttgtattgcgcgatgatataatagtaaacagagttgcgtgccctacaaaattggttgaatatttagagtgtggtgtcgttccagttgtgctctccccacttataggtgatttttattcgatgggatatcaatacattactacagaggaaatggctaacagaagtataagtttgttggatcttgaaaaaatggctgcacataatttacaaattttgacttcttatcagaagagaacctacaaggcacagaaagaacttattgctcaactgtgctga

SEQ ID NO: 20156 - DNA, 411 bp, Escherichia coli; identical to SEQ ID NO: 4965

SEQ ID NO: 20157 - DNA, 2649 bp, Escherichia coli
atgcctaatcactcaaattttcggctgcggggaatcgcctgctatattgcgctggcaatctctggtgggtcagtcaatgcatgggctgatgattcaattcaatttgacccccgtttccttgagttaaagggcgatacgaaaattgatctcggtaagttttcaaaaaaagggtatgtcgacgcgggtaaatataatttacgtgtatttataaataaacaacccctttctgatgaatacgacattaactggtacgtctctgaaaacgatccaacaaaaaactatgcctgcctgacacctgagttagtggcggcgctggggctgaaagaagggatagcaaaaagcctgcagtggacgcacaacgatgaatgccttaaaccaggccaattagacgggatggaagtcgagaatgatttaagccagtcggcgttgctgctgacagtgccacaggcttacctcgaatataccagcagcgactgggaccctccctcacgctgggacgacggtattcctggcctgattgccgactacagcctcaatgcgcaaactcgccatcaggagcaggggggcgaggactcacatgatatcagcggcaacggtaccgttggggcgaacctgggggcatggcgtttccgtgcagactggcaaagtgattatcagcacacccgcagcaacgatgacgacgatgacagcagtaacagtacaacgagcaaaaactgggactggagccgttattacgcctggcgggccttaccctctttaaaagcgaagctgtcgctgggggaagattatctcaattccgatattttcgacggctttaactatatcggcagcagcgtcagcaccgatgaccaaatgctgccgcccaacctgcgcggctatgcaccggatgtttccggcgtggcgcacagcagtgcaaaagtcaccattagccagatgggccgggtactttacgaaacccaggttcccgccgggccattccgcattcaggatatcggcgactccgtctccggcacactgcacgtccgcgttgaagaacagaatggtcaggtgcaggaatatgacgttacgaccgcatctatgccattcctcacgcgccaggggcaggtgcgttacaaagtgatgatggggcgtccggaagactggaaccacaagaccgaaggcggctttttctccggcggagaagcgtcatggggggtggcagatggctggtcgctctacggtggtgcgctggcagataaacactatcagtcggcggcgatgggggtggggcgcgacctcgcacagtttggcgcgctggcgttcgatgtgactcactcgcacgtcaacctggatcatgacagcgtatatggcaaaggaaaactggacggcaactcctttcgcgtgagctatgccaaagactttgacgaactcaacagccgcgtcacctttgcaggctaccgtttttctgaaaagaacttcatgaccatgagcgagtatctggacgcgaaccagtcagacatggcgcggaccggtaacgacaaagagatgtatacgatcacctataaccagaactttgccgctgcgggtgtctcgatctatctcaactactcccatcgtacttactgggatcgcccggaacagacaaactataacctgatgttttcccactattttaatatggggagcattcgcaacatgagcatctcggtgaccggctatcgctacgaatatgacgataatgcggataaggggatgtacctcagtatgagcattccgtggagcgacagcagcaccgtgacctacaacggttcctacggcagcggatcggacagcagccaggtcggttactttaagcgcgtcgatgacgcaacgcactaccaggttaacgttggcaccagcgagcagcacggcagcgtggatggttatctgagccacgacggttcgctggcgaaggttgatctcagcgccaactaccatgaaggggaataccgttcggcggggatcgccttacagggcggggcaacgctgaccgcgcatggtggggccctgcaccgtacccagaacatgggcggcacgcgcctgctgattgacgccgacgggattgccaacgtgccggtcgaaagcaacggcgcgccggtgtacaccaatatgtttggcaaggcggtggtcgccgatattaacaactactatcgcaatcaggcgtatatcgatttaaacaacttgccggaagatgcggaagccacccagtcggtggtgcaggcaaccctgacggaaggcgcaatcggctatcgcaaattcaaagtgatcagcgggcaaaaagcgatggcggtactgaggttgcgtgacggtagctacccgccgtttggcgcggaagtgaaaaatgacgagcagcagcaggttggcattgtggatgatgaaggcaatgtctatctggcgggggtcaatgcgggcgagcatatgatggtgttctgggaaggcagcgcacaatgcgagatcgtattgccgaagccgctacctgccgatttgttcagcggcctgttgttgccgtgtgaacaaaagggaacggcagcccctgattcttcagcgccagaaattaagcctgttattcaggaccagacgcggcaagtcacaccaacggaagcgccgacgtcaatttcagcaactcaataa

SEQ ID NO: 20158 - DNA, 456 bp, Escherichia coli
atgtggggaatgttagataccggtggtggaattcgggcacaactcgcggaagacaacaaagtaggaaactgtgggcgggagtggcacgttggttttttctttgatggcgtggggcgcaatattgatcaggatgcttcagaacaacgcttaagtaatgtggctcgtttatttcgggcttatcctgatgaagattccaatactgattttgtttgtcacaataaattttatttttccggtatgggaacaccctataacgaagaattgatctcaaaattatatacaatcatggatcagtctctggaaagtatgaaggaggatttaaacgatttcgcaaaagagacacatgaagaaatcagcaaggaaatccgtaacagaaggggatcgtggaatgaaaccttaaagaaaatccagaataaacttctggaccctaaagaacttagaaaaaaaaagaaatga

SEQ ID NO: 20159 - DNA, 327 bp, Escherichia coli; identical to SEQ ID NO: 5975

SEQ ID NO: 20160 - DNA, 426 bp, Escherichia coli
gtgattattttagaaggtcctaatgcggctaagaatcctgcagaaattaatgaatatttgaattatattgccaatgggtggtctcaatttaatggtcgtaatactatgaaaattggcaatgccagagatttattcattaatttagaagagaaagaagagcctaaatcaaatagtttaactcgcactgatgaaagaaaactatggtatcgtaaaaatcgatatatgaaagattggtcagatgataaagttttacaggcggcggttgatcatatgaacaaaataatgccatttattttgaaaaatggaccaaaattaccagtggataagttaggtgagctaatgttggcatttggtgattttattgaagagtccaacatgcgtggcttagatctaaaaggacttaataaccttttcacggataagtaa

SEQ ID NO: 20161 - DNA, 474 bp, Escherichia coli
atgaaaacattgtctcagaacaccacctcttcggcctgtgcaccggagactggcctgcaacaactggttgccaccatagtccctgatgaacagcgcatcagcttctggccgcagcattttggcctcattccacagtgggtgaccctggagccccgggtcttcggctggatggaccgtctgtatgaagactactgcggtggtatctggaatctgtacaccctgaacaacggtggcgcatttatggcacccgaaccggatgacgatgatgacgaaacatgggtgctgtttaacgtcatgaacggtaaccgcgctgaaatgagcccggaagcagccggcattgccgcctgtctgatggcgtacagccatcacgcctgtcgtacagagaattatgccatgacggttcattattaccggctgcgggattatgccctgcagcatccggaatgcagcgccattatgcgcatcatcgactga

SEQ ID NO: 20162 - DNA, 438 bp, Escherichia coli; identical to SEQ ID NO: 11040

SEQ ID NO: 20163 - DNA, 324 bp, Escherichia coli; identical to SEQ ID NO: 9185

SEQ ID NO: 20164 - DNA, 699 bp, Escherichia coli
atgaaactttcactctcacctcccccttatgctgatgcgcccgtagtggtgttgatttcgggtcttggcggtagcggcagttactggttaccgcaactggcggtgctggatcaggcgctggtagccgcagggattgagcgttacgcggtggtcggccatgcgctcggtgcgctggtgggaatgcagctggcgctggattatcccgcgtcggtaactgtgctggtcagcgttaacggctggctacgaataaacgcccatacgcgccgctgttttcaggttcgcgaacagttactacatagcggcggcgcgcaggcatgggtggaagcgcagccgttgttcctctatcccgccgactggatggcggcccgcgcacctcgccttgaggcagaagacgcgctggcactggcgcattttcaaggcaaaaataatttactgcgtcgacttaacgccctcaaacgcgctgactttagtcaccatgcggatcgtatccgctgcccggtgcaaatcatctgcgccagtgatgatctgctggtgccaacagcatgttccagtgaacttcatgccgccctgcccgatagccagaaaatggtgatgcgctatggcggacacgcttgcaacgtgaccgatcccgaaacgtttaatgctctgttactcaacgggcttgccagcctgttacatcaccgtgaagccgctctgtaa

SEQ ID NO: 20165 - DNA, 204 bp, Escherichia coli
atggcaattaagcattttcccgtcgttcgctttacctccagagggcgcgaatacgaggtcgacgaacgcctgattaccactatcgacaaacatcgttcggaaaaggatgcacaccacatctacctcactgacggcacttacttctgcgccactaatgtggcgcgggtaaaccttatccgacaggtacaggagcagcgtaaatga

SEQ ID NO: 20166 - DNA, 219 bp, Escherichia coli
atgagcagaaggcgaatcacacgcaggcatcgccgcacacacatgaattccttaccgacgctgaaagaactcattcaacacgagatcgctgatttctgcgcaacgctggggtcgcctggtgaaccggaaacaccagaagcgatgcagcgcgaactcatgatgcgcatcgataacgtttttgactttttcctgaataacaaaagagagcaatcaacatga

SEQ ID NO: 20167 - DNA, 552 bp, Escherichia coli
atgaaaataaaaacaggtgcacgcatcctcgcattatccgcattaacgacgatgatgttttccgcctcgactctcgccaaaatcgaagaaggtaaactggtaatctggattaacggcgataaaggctataacggtctcgctgaagtcggtaagaaattcgagaaagataccggaattaaagtcaccgttgagcatccggataaactggaagagaaattccctcaggttgcggcaactggcgatggccctgacattatcttctgggcgcacgaccgctttggtggctacgctcaatctggcctgttggctgaaatcaccccggacaaagcgttccaggacaagctgtatccgtttacctgggatgccgttcgttacaacggcaagctgattgcttacccgattgctgtcgaagcgttatcgctgatttataacaaagatctgctgccgaacccgccaaaaacctgggaagagatcccggcgctggataaagaactgaaagcgaaaggtaagagcgcgctgatgttcaacctgcaagaaccatacttcacctga

SEQ ID NO: 20168 - DNA, 567 bp, Escherichia coli
gtggataacgctggcgcgaaagcgggtctgaccttcctggttgatctgattaaaaacaaacacatgaatgcagacaccgattactccatcgcagaagctgcctttaataaaggcgaaacagcgatgactatcaacggcccgtgggcatggtccaacatcgacaccagtaaagtgaattatggtgtaacggtactgccgaccttcaaaggtcaaccatctaaaccgttcgttggcgtgctgagcgcaggtattaacgccgccagtccgaacaaagagctggcgaaagagttcctcgaaaactatctgctgactgacgaaggtctggaagcggtcaataaagacaaaccgctgggtgcagtagcgctgaagtcctatcaggatgaacttgcgaaagatccacgtattgccgccaccatggataacgctcagaaaggtgaaattatgccgaacatcccgcagatgtccgctttctggtatgccgtgcgtactgcggtgatcaacgccgccagcggtcgtcagactgtggatgctgcgctgaaagatgcacagactcgtatcaccaagtaa

SEQ ID NO: 20169 - DNA, 918 bp, Escherichia coli
atgaacttcagacgcctgaaatacttcgtaaaaattgtagatattggtagcctgacccaggctgctgaagtattgcatattgcacaaccagcgctcagccagcaggttgccacactggaaggtgagttaaatcaacagcttttgattcgcacaaaacggggcgttacgccaacaggcgccggaaaaattctctatacccatgcacgggccattttacgtcagtgtgagcaggcccaactggcggtgcataacgttggtcagtcattatcggggcaagtctcgattggctttgcgccaagaaccgctgcgtcatccatcaccatgcccttattacaggcggttcgcgctgaattcccggaggtcgttatctatcttcatgaaaatagtggtgcagtgcttaacgaaaaactgataaatcaccaactcgatatggcggtgatttatgagcattcccctgtggctggggtatccagtcaggctttgctgagagaagatcttttcctggtaggaactcaagattgcccggggcaaagcgttgatgttaatgctattgcgcaaatgaacctttttctccccagtgattacagcgctgttagacttcgtgttgatgaggctttttccctacggcggctcacggcaaaagtcattggtgaaattgagtctattgccacgcttaccgcagcgattgccagcggcatgggcgttgcagtattacctgaatcggctgcgcgttcgttatgtggcgcagtaaatgggtggatgtcacgcattaccactccttcaatgagtctctctttgtccttaaatttacccgccagagcaaacttgtcaccacaggcacaggcagtgaaagagttgttaatgtcagtgattagttctccagtgatggaaaaaaggcagtggcaattggtgagctaa

SEQ ID NO: 20170 - DNA, 2049 bp, Escherichia coli
atggcacaatttaaagttgatagttttatcgttgagctaggcttcagcgagaacgttattaagggcttgcaaagagttgaaaaggcagctttgcagtcagcacaaagaattgaacgtaatttgaatagagcgtttaaggtcgataccaagcaacttgacagcaatctgacaagttctttagggcaacttgaaaggaagtttaataagacctttgacaagattgagcagcgtcttaaaaacactagagcgtttaagattaaaacggaaattgaggatactttaaagccacttagacagccaagacagccacgaattagcggcaacagagcaatcacagcggcttattcagcgaatatgtctaagctgaaaggtcttaacccaattgtcgagaaatacattaagagtcagttttacgcattaagtagtaaatccaagacacttggaaacgaagcttttaatcgtgagttagcaaagttaaatcaaaatctacgtgaaacactttctaagtttaacaagaccaccagcaaaaataatcacagtgaaaatgcttcaaatggtttagatgtactagcttcaagtgcaattaaagcgggtacggctatttacacttttcaaagtgctttggcagcttatcagcgagtaatggaaattggtttacagcgtgcaagtgctgaacgttcaattgatttcgtatttgataaagatgcaggtcaggtaaaagagttcacaaagtcattagctcaaacaacgggtttagatatcgctgaactgcaatcacagtttgctggtttcggtgcttcagctaaagagtctatgggtattcaaggttctgaagaactttttagaagtatgattggctattctcgtctgatgggtcgaagtgaagaagagattaagcgagcactgacagcattatcacagatggctggtaagggtcaggttatggctgaagagcttaaggggcaactagctgaagctgttcctggtatggttcaggtattcgctaaagcaaccggaaagactgaacaggaattatttgatgccatgaagaagggggctttaaaatctgccgatactcttcagaaggtcactcaggaactgaatagacaaatcaccgctaaaggtggctggaaagctatttcagaaagtacacaggcacaattagggaacctgaaaaactcttggaataccacgcttgatagtatcttcagaggttctgaaagtggtctgcaagattttacaagaagcttaacaacgcttttaaacgctcttggtggaagtggtaaaagtcttggtgaatctcttggtagcttgatgactgatatgtcacatggtgtcgatagtctggccgatattagttacaaggtgcgagcgttctttgatgaggtgacattagcttatcgtggtttaaccgatgaacaaaagaaagttgttgatgctttaggttctggcttgattaatagtttaaaagtcttggctggtgttattgctgtaaataaagttgttggtgtaaccagaagtatttacgggcttatgactgctatcacaagattaggtcaggttgctgatactacagcggataacgtgaatagaaagaatgggaaaccatcaagactgaatcttgggaatatgctattagctggtagcgctctctatgcaggttatgaaagactagcctctacacctgaacgaatggaagcacaagctaaattaccagagttagctaaagaatctggacttaagccagtatttactatggacgatgtgaaaggttggtttaatagtgcagctatgaatcttgctaacttccagcatccagaattaatcaccatgagacaagatgcggcattaacgaatacggatatccaaagcctgagagatgaaattagtgctttgagcaaacgtattcaggagcctgtgaaagtttcacttggtggtgaagttgccattaaaccagatgaaaccagctttatgacctttagcagtaatatctacgaccaatacgcagaagctacgctattaagttcatcattcccagaagatgattga

SEQ ID NO: 20171 - DNA, 2652 bp, Escherichia coli
atgacagcctttcgtgccgcatttaaggcatatcgtatgcatcaggtgttaatactgcctcgctttgcacggcttacctttgcccttggcttagcaactgcggtttttcccgttgacgcagagtattattttaatccacggtttttaagcaatgaccttgctgaatctgtcgatttatctgcctttactaagggacgcgaggccccacctggtacatatcgggtcgacatttatttgaacgacgaatttatggctagtcgggatattacttttattgcagatgataataacgcagatctcatcccatgcctgagtacagaccttcttgtcagtcttggcataaaaaaatcagcattattagacagcaaggaacattcggcagaaaaacatgtgccggacaacagcgcatgcacaccacttcaggatcgtttggctgacgcatcatctgagtttgatgctggtcagcaacatctgtcactctccgttccgcaaatatatgtcggcagaatggctcgcggctatgtttctcctgatctgtgggaagaaggaataaatgccgggctactaaactatagttttaatggtaattctattaataaccgtagtaaccataatgcaggaaaatccaactatgcatatttgaatttacagagtggcatcaacattggtagttggcgactgcgcgataactcaacgtggagttataacagtgggagtagcaattcatctgacagcaataaatggcagcatatcaatacgtcggctgaacgtgacattattccgttacgctcacggttaacagtgggtgatagttataccgatggcgatatttttgacagtgtgaactttcgtggccttaaaataaattcaacagaagcgatgttgcccgatagccaacatggtttcgctccggtgattcatggtattgctcgtggcaccgcacaagtgagtgtaaaacagaatggatacgatgtttatcagactactgtcccacccggcccttttactattgatgatatcaactctgcggccaatggtggtgatctgcaagtaaccataaaagaggcagacggcagtattcagacattatatgttccttattcgtctgttccggttctccaacgtgctggatatacgcgttatgcacttgccatgggggaatatcgtagtggaaataacctgcaaagcacccccaagttcgtacaagcaagcttgatgcatggtctgaaaggaaactggacaccttatggcggaatgcaaattgcagaagattatcaggccttcaaccttggtattggtaaagatttaggactttttggtgccttttctttcgatattacgcaggccaatacgacacttgcagatgacacccgtcacagcggacaatcggttaaatccgtctacagcaaatccttctaccagacgggaaccaatatccaggtcgcaggatatcgctattctacgcaaggtttttataacttatccgacagtgcatacagtcgaatgagtggttacaccgtcaagcctcctaccggagacaccagtgagcagacactatttattgattattttaatctgttctacagtaagcgtggtcaggaacaaataagcatctctcagcagcttggaaattacggtacgacatttttcagtgccagtcgccaaagttactggaacacgtcacgcagcgaccagcaaatatcatttggattaaatgtgccgtttggtgatattacgacttcactgaattacagctattccaataatatatggcaaaacgatcgggatcatttactcgcttttacgcttaatgttccctttagtcattggatgcgtacagacagtcagtcggcatttcgtaattcaaacgccagttacagtatgtcaaacgatttgaaaggcggcatgaccaacctatcaggggtttatggcactctgctgccggataataacctgaattatagcgttcaggtcggtaacacccaagggggtaatacatcgtctggcaccagtggttacagttctcttaattatcgtggagcttacgctaatacgaatgtcggttacagtcggagtggtgacagcagccagatttattacggaatgagtggtgggattattgctcatgctgatggcatcacctttggacagccgctgggcgacacaatggttctggttaaggctactggcgctgataatgtcaaaatagagaaccagaccggaattcataccgactggcgtggctatgccatattaccatttgcgacagaatatagagaaaatcgtgtcgctcttaacgcgaattcccttgcagataatgttgaactggatgaaaccgtagtcactgtcatcccaactcacggtgctattgccagagcaacatttaatgcacaaatcggcgggaaagtattaatgacgttgaagtacggtaataaaagcgttccattcggtgcaattgtcactcacggagagaataaaaatggcagcattgtcgcggaaaatggtcaggtttatctgactggacttccacagtcagggaaattacaggtttcatggggcaatgataaaaactcaaactgtattgtcgattacaagcttcctgtagtctctcctggaaccttgctgaaccagcagacagcaatctgtcgctaa

SEQ ID NO: 20172 - DNA, 348 bp, Escherichia coli
atgacagcgcgttatctcggaatgaatcgcagtgatggcctgactgtcactgaccttgagcatatcagccagagtatcggcgatatcctgcgcacaccggtcggctcacgggtgatgcgtcgtgattacggctcgttgctggcgtcaatgattgaccagccgcagaccccggcgcttgagttgcagattaaggtcgcatgttacatggcggtgctgaaatgggaaccccgcgtcacgctgtcatctgtcaccacggcgcgcagttttgacgggcgaatgacggtcacgttaaccggccagcacaacgacaccggccagccactttcgttaaccatccctgtgagttga

SEQ ID NO: 20173 - DNA, 780 bp, Escherichia coli; identical to SEQ ID NO: 13660

SEQ ID NO: 20174 - DNA, 495 bp, Escherichia coli
atgaaggttggatcccagccgggattgaaagtgtcgacgtgggtgaatccgagccgctcgtataggccacgcaggttcgggtggcagtcgagccgcagcttggcgcacccctgcgttcgcgcggcatggcggcaagcctcgatcagcgcggagctgacaccccggcccgcatgtgtccgtcgcaccgcgagcttgtgcagatatgcggcctcccccttgagggcgtcgggccagaactcgggatcctcggccgacaaggtgcaacagccgacgatgccgtcgctgcaactcgcgactaggagctcggatctcaggacgaaggtctccgcgaatgtccggtcgatccgcgcgacgtcccaggcgggcgttcccttggcggacatccacgccgcagcgtcgtgcatcagccgcacaacctcgtcgatatcacccgagcaggcgacccgaacgttcggaggctcctcgctgtccattcgctcccctggcgcggtatga

SEQ ID NO: 20175 - DNA, 270 bp, Escherichia coli
atgggtggcttacatattcataactgggctactggcaaatctgtccatctggtggtatacgcaggagaaagcatttcccgtttcatttgccattcaggggcggttcctcgccccgcaaaccacactttcccttttcccgactggttcagttcatcgagtgttttcattaacttttcactgtttttacggggctggatttcatcaaataatcccggctgcgctatacccgatggtgtgaaatcagccagcatgacacctgccttcatatag

SEQ ID NO: 20176 - DNA, 1110 bp, Escherichia coli
atgaaagttaaacttctgacagctgccataaccacgatgttactggtatcagccagtcatgcctcagtgctgccgaaacttcctgagtcgtttaaatatggaacaggagtgattttaaatgatactgtttatattggtctcggaagtatggggaaccactggtacagcataaatctgggggacgcgactccgaaatggacagaaattgctgcctggccggatgttccccgggagcaggcaactgctacggtagtcaatggtaaaatttatgtcttgggtggtataggaaaagataaatctggcgtcgtacagctacaggatgatgtttattcctatgatccattaaaaaatgaatggaaaaatatgggaacccgtccaccgatcagccttgctggtcatgtcagtttttcctggaaagggcagataatatcgacaggaggggttaacaaaaatatttttaatggctatttttctgatataaataaagctggcgataatgcttttcaaaaaaataaaataaactatcactatttcagtaaacctgtaagtgattattttttgaataaacaagtgattacctggaatccagaaactggacaatggaaaaatatgggggaagtaccttttaccggaacagcaggttcttctgctattgtggatggtaacactatctggcttattggtggagaacggaaaccaggtctcagaacaacagcagtatggtccggaacattacaaaatgagggtattaagtggacccgactcccacccgttgcctctcctgatggtgtatcaggcgcctatgccgcattagttcatggtcaggtattactggccggaggagcaaactttccgggggctgccagcaattacgcaaaaggtaaaaactggtcccatgcaggtctggaaaaacactattctaaagatgtttatgttcttaagaatgctaaatggactaaagctggagttttgcctgaagggcttgcatatggtgtttcgctgccatggaaagatggtatgttactcattggaggagagacgacgggaggacgtgccacttctgacatgatatttatttcagaaaaagccaataaattaattatacagtag

SEQ ID NO: 20177 - DNA, 711 bp, Escherichia coli
atgaagaagtcaggttctctaattgctgttttgcttctgggattaccgttgtgctctcaggctcttactcttaatctcaggggaggctaccgaagtgccagtcatgcttatgaaacactgatacaggtcagccagggctggaataacggatggtgggcaagttttgaatcaaacagctggaacacaattcatgagaatagtaatgaatttcttgctcttaattacaataaaatagatgtaaaccgcacatataaattggatgacaaatgggcgcttattcctggtattcagacgcaatggatgtctgcaggaagccagtataatccttatctgaaactttcttatcaggtgagtcctgatctaaatctggcattacgctatcgttatgactggaaggcctttcgtcagacggaccttgacggaaatcgtgccagaaataatcagcatcagatagatggttatttaacttatcgtataaatgatgactggctttttgcatggcagacgactgtatatacgaaggttaataatttcaggtacggtaatcataaaagagctgcaacagaaaatgcctttgtgctgcaatataagctgtcaccgacctttaccccttatgttgaatatgattatctcgataaacagggagtatataaaggaagagataatattgctgaaaacagctaccgtgttggcttactcgttaatttctga

SEQ ID NO: 20178 - DNA, 822 bp, Escherichia coli
atgggacaagaatatatatataggtatgtaagttatgatattctcagtggagaggagattaaactcgataaccagtatttatctgaagaaagtattatatcggatgttaagaaaccgataattacagttgtctcttcagaacagataaatggctcttgtattctgattattcccggtggtgggtatagaagaattgtttatggccgggaagggatatctgtagcaaaatatttagtatcagcaggatatactacatttattctttcttacaggctgccagaatcgattaatgatggatattatgttctgaatgatgccaacagtgcacttaaatttataaaagaatggtctgttcgtaatgctatacagcttaagagcctgggcgttattggtttttctgctggcggacatgtagcttcatggcttgttagcaataactattcttacaatgattatattcgtccggattatctggctcttctgtatcctgtggtctctatgaataaagatatagcacacacaggttgcagaagaagactgttaatcgatgaaagcaatgaaaacatttacagtgttgagttaaatattcccggagagatgcctccggtgtttattgttcattcaacggatgataatgatgtttctgttgaacattcattaaggctgactaatgcgttactcaaaataaaaagctctgttgatgttcatttttttgagaaaggaggacacggatttggaatgtcagatacaacagggttgccagtaaaaagctggacggttctttttttaaactggttagcgtctcattcttttcactgttaa

SEQ ID NO: 20179 - DNA, 1467 bp, Escherichia coli
atggatacttgtattcagaataagcaggtgtggtacaaacacttatcaccaaagcagtggaaaatattttcagctgcatggattgggtatttacttgatggttttgactttgttcttatatcccttgttcttacggaagtcaggcatgaatttggactatccaccatagaagccgccagccttatatctgctgcatttatatcgcgatggtttggagggctttttattggtgccatgtctgacaagatggggcgtcgaatggccatggtattaagtatcattttattttcgcttggtacactggcctgtggtctggctcccggatatgcagtaatgtttattgcccgcatagttatcgggcttggaatggctggagaatatgggtcaagtgtgacttatgtcatcgaaagctggccggtaaaacttcgtaataaggcatctggttttttgatttcaggtttttccgtggggggcggattggctgctcaggtatacagcttagtggttccattatggggatggagagcgttattttttgtaggtattttgcctattatttttgctttttacttgcgtaaaaatctcccggaatctgacgactggaaaaaacgccaggaggaaaatcgccctgtcagaacgatggtcgatattctttataaagaaaaaaataaatataaaaatattttactttcatgtgttgcatttgcctgcctgtatatttgcttttcaggtgtcacggctaatgctgttctgataacaataatggctttgtgctgtgctggtgtgttcattagcttcatttatcagggaatgggtaagcgatggccaaccggtattatgcttatgctggttgttatgttttgttttctgtatggatggccacttcaggcgtttctgccgacatggctgaaggaggatatgtcgtactcaccagaagtcgttgcaaatatttttatgctggcaggttttggctctgcggtaggtagttgtatcggcggctttatgggggactggcttggtactcgtaaagcgtatgttatatcactgttgattggtcagctcgtcattattcctgtttttatggttgacagagaacatgtctggttgctcggattactgatatttactcagcaggtctttggtcagggaattggtgcactggtgccaaagattatcagcggttattttgaagttgagcaacgggctgctgctctgggctttatttataatgttggttcactgggtggggcctgtgcgccagtgctgggtgcagttgtcgcttctcattttagcctgggaactgcaatgtgttcgctggcatttatcctgacatttgttgttctgattcttattggttttgatatgccatcccgtgttcaacgctggattaaccctgcagaagcacttgagtttgatacagtggacggtaaaccttttttaggtgctaaaagacatcattcagaataa

SEQ ID NO: 20180 - DNA, 924 bp, Escherichia coli
atgaataacagtggcttcatccggataataactatgacgggtgactttatggctactttagcaatagatataggtggtacaaagatttcagcggcaattattggtcaggacagaaaactgacgatgatacggctcctccctacaccacacagcaaaagtatacatgacctgaacattgcgttaagtcagttgattgctcctttaattcctttcgccagtcgatacgccgttgcttcgacagggatcattgagcatggtgttttgacagcactgaatccgtctaatcttggagggttagcattctatccactggagaaatatctaaacgatcttacaggactacccggtgtagttattaatgatgcacaggcggctgcatgggctgaatacagtgttgttcatgaaaaaataaaaagcatggtttatatcactgtctcaacaggtgttggcggaggaatcattcatgacagaaaattactgtcaagtgaaactggccttgctggccatatagggcatcttatttcagatataaatggtcctttatgcggatgcggtcgcaggggatgtgttgaagctgtcgcatccggaacggcaataatgaattctgctcagaaagaactggcaggccacagtacgaaagatatttttttacgtgcggctaagggagatccggaagcattaaaactgaaggaaagatccacacaggcaatagccgggttgatagccgatcttaagatgctcactgattgtcagcttgttgttattggtggcagtgtcggacttgcacatggctatatttcatcagtttcagcacatctatctcagtaccctgaggtttactatgtcccggtagctcccgctgtatatcgccataattctggcatgttgggagccacgatgttggctgagacgagaataaaataa

SEQ ID NO: 20181 - DNA, 903 bp, Escherichia coli
atgttgtcttcgggattaaaagggatcatctctgcattacctactccatttaataatgcgcagcagattgatactgaaagtctgaaaaaacttgtccgctttaatattgagcaaggcatgcatggtatctatgtcggtggttcgactggggaagcttttcttcaggatgtcactgaaagagagaaagtccttgaaacagtggctgaagaggctggcggaaaacttaccctgattgcacatgttggagccatcagtacacgtgatagccagttgctggcaagagccgctgtaaaatatggttttgacgctatttcagcagttacccccttttattaccctttctcatttgaagaacattgtgctcattatcaggccattattaatgaggctgatggtcttccgatggtggtatataatattccggctttaagtggagttaagttatcactggaccagattaatacactagtaagattgccaggtgttcaggctctgaaacaaacatcgggtgatttatttcagatggagcaaatcagaaggcagcatccggaactgattttgtacaatggttatgatgaaatttttgcttctggggtgattgctggagctgatggaggcattggaagcacatataatatcatggggtggcgttataagaatatactttcagctattgaaaaaggtgatatacaaacagccagacagattcagacagaatgcaataaggttattgatactttaataaaagcaggtgtgctggcaggaattaaaacgttacttcattttatgaatgtcataaacaatcctgcatgccggaagccattttttcctgtaaataaaaaataccttcctgaattacagcaattggcacaaaagctaatggccgaaaaagataattgttag

SEQ ID NO: 20182 - DNA, 1086 bp, Escherichia coli
atgaaaaaaagaatttctcaagaaaaaacatcctgttattatatgtatcatattgataataaaaataattatgaagaatgctctcttccggaagaaagagaggttgatttctggtatgtacttcctctggccggccagtccaatgcaatggcttacggggaaggattacctcttcctgattcactggatcgtccagaccccagaatcaggcaattagcgcgcagagcatcagtcacaccgggcggaaggcgttgtagctataacgaaataatccctgcggatcattgtctgcatgatgtgcaggacatgagtatttttaatcatccccgggcaatactggagaaaggacaatatgggtgtgtaggtcagggtttgcatattgctaaaaagatgttgccttatcttcctgataatgtgggtattcttttagttccctgcagtcgtggcggagctgcgttcacgtcaggagatacaggctcattcagcctatgctcaggagcaagcagtgactccatgcgctgggggattaatatgcctctgtactttgatttagtcagcagaacgaaagcggctcttgattttaatccccgtaacagacttctggctgtttgctggatgcagggggaatttgatcttatgtcagaacattatcaggaacagccccgcttgtttaacgatatggtggatgctttcaggggcgagttacaagattattcggaacgctgtcactcgggtaatagttataccgtgccgtggttatgtggcgataccacatggtactggaaaacagaatatccagaatcttatgcctgtatatacggaaattacaggaatcaattagaaaggtatgtgtactttattaaatttcaggacgagcaagagagaggattaactaatgaaccggaggaagaccgggataatcccgagtatggatatctgggctctggatggagaacggaatcaaactggacgacaccactaagaagttctcattttagtagccaggctcgacgaggtgtggtggctggaggttttgcaaacgtgatagtcagattaatgaaagcaaatgataacatattgaaataa

SEQ ID NO: 20183 - DNA, 729 bp, Escherichia coli
atgattaataatgagaaaaaaacagtaagtggactgacagctaaaagaaaacctgttgtgacaaaaaaactttctgaaatcgtagctgaagaactcgaaggaatgattcgtcgcgaagaaattaaagaaggtgaatacctaccttcagaaagagagatgatggaattcttcggtgtaggacgtccttcagtgagggaagctctcagcacactaagacacaagggattaataaaatataacaaaggagagaaggccagcgtatcccgcccatcggcagaaactattattaacggtttatccggtattgttaaagatttcctggctacagaagatggcgtgactgaatttgagaggttacgcattttctttgaaaccaaccttgttcgttatgccgcaaaaaaagcctctgaagaggatatcaacagacttaaaaatattcttgctgtgcaccacaactgtctgaaaacaactgaatgctattctcattatgacattgaatttcatcgtattctggcagaaatcccaggaaacaaaattttgcagacaatacacactgcattttctgaatggttaatcatggcaaaacctttggagaagaacaatatgacatatacacaaaataaaaatacacatttacaacacattgaaatactccaggcaataatagaacatgatgccgataaagcagaatcattgatggaaattcatcttcagcgccgccttagttaa

SEQ ID NO: 20184 - DNA, 885 bp, Escherichia coli
atgaaatctgttcttgatgagaatatgcagcatttatcacaactatcctgccatattgatttaaggggtaaggaaatttttgaggatgatttttacggaaaagtttatgatgatcctgaacatccgggtgaatatcatttgaaccgtgtcgttacagatgtaaggtcccctctgttgactgtttttaagcccgaaaaaagtaatggcacaggtatacttgtcatccccgggggggggtatcaggctgtcatgtttgacaaggagggaacagcattagcaccattctttttgtctgaagggtatactctctttgttctgacttatcgtcttccttcttctgaaaccgaagaagggaaaaacagagcccttaatgatgcagtacaggcattgtctcttatcaaaagaaatgcggaacaatgggcgctgcaaaaaaacagaattggtgtactggggttttcagctggggggcatattgctgccagccttatatcctgtcttgaccggcacgggcaaagtgaatgtccagactttgctggacttatctacccggttatatcaatgagtgatgaaataacccatcagggctcaaaagagagactgctgggtctggaggcttcagatagtacagtgatgcaacacagcattgaaaactgcgtgaccagtacatttcctccggtatttcttcttcattgttgcgatgatccgcttgttccggttaataacagcctcaaaatgtaccaggcgttattgaaacataatgttccggtcgagatgcatttatttcagtcaggagggcatgggttcggtgttcaatgggctcgagaattgcctgttcatatatggcctgagttgtttgtcgcatggttaaaatcccagttaatgtaa

SEQ ID NO: 20185 - DNA, 1146 bp, Escherichia coli
atgaaagcgttactcaaaattttaactatacaaatatcactcattattcttagcattatcattccacctgccatacagacatctgcgaaatggataaattatcatttattcttttcagacaaagaaagcattgccggcgaaaaagacccaacgttactgagtcacagaatgatatcctttgacaaagagaataatataattacatcagaaacagccgcactggcatatgggaatacactaaattatctacattccgtcagagccaaatgtaacccgaacgttaaaacaacaaattttcttgagtgtgccaataacattcttggggataatttctattatcatcagtcaccaatggtatcacttgcatgggcgaaccattactctgactgtgatcttaatgtttatcttcttatggatgcattaaaacaggccggaaaaaactcatcaatagtttatgctccaggacatgcttttcttgctttcacagatggaagtaataactccgtccagttctgggaaaccacacacagacataatcatggagaggtttctgatatgaaaaacccggagctatacaaaatcacacctaatactttctattatacgcccatgacacaggatttcgcggaacacctgtacccggcgcttgttcttgactatatggatgataagacaagaggatttttattagaaaaacttcgcagggagtttcctgacaaccctttattaacggattactggtatgcatatgcagttgaagaactgacaactgacgatataaaaaacctgtcagagctactcaaatcagaccctacttctgttgataaaaagttaactttatcacgatactggttaattcacgacaatcctgaaaaagccagaatgtatcttaatcagattgataataatgattgtgataccgggtgtctgtacatgaaaaatcaggcaggcataaaaaacaaaataatattatacacagacattatgcttaccaaatctggaatatctctcacgccatctgaaagacaaagttcgattggtttatcaatatcactttacctggcctttaattttattttctgtgcaatatatattcgtaagtacaaaacaaaaagtaaaaaaacacccacaaaaaaaacagaataa

SEQ ID NO: 20186 - DNA, 402 bp, Escherichia coli
atgagtgtttataaaaagtgtttgattatatttggcattgtggctgttttgctgacctcatgggcttttatgtgttttcctgatccagatatcagtatgaacaggtattattcatggttgatgaacatactgatcattagcgtgactggagagatgtatgtggtactttctgttgtaatgacaattcttttctttactaacaaaaatagcacaggtagcagcaaagtattttactgtgtaattctttctgtgatatgcctgagcatatcagttagtgtgtatatgctcaggtattatgattatattctgataacgtctggttgttatgttattctgttttttttgtgggtgtttttttactttttgttttgtacttacgaatatatattgcacagaaaataa

SEQ ID NO: 20187 - DNA, 312 bp, Escherichia coli
atgaaggtgggggtaataagaaataagcacgcagaggacttcagaaaaatatgtcttctgtttatccggttaacgagcaatgtattaaaactgtttccttttgctatggtgatatgccctgtggtgtggttttatttttgccctgaacatattctctcagacattgttaacgactggcacgatgcagatacactggaaaaaatacggattgtcagactgtatctgaagacggttcttattctgacagtggtaagcgttgttgtcttgtctctttcgtcagataagtttatgtctgttaagcgcaggaaatga

SEQ ID NO: 20188 - DNA, 1263 bp, Escherichia coli
atggcactgactgacgcaaaaatccgggctgcaaagcacactgacaaggcttataaactcactgacggggctggcatgttcctgctggttcatcctaatggttcccgttactggcgtctccgttatcgtattctgggtaaggagaaaaccctggcacttggtgtgtatccggaagtttctctctccgaagctcgtacaaaacgggatgaggcccgaaaactgatttcggagggggttgacccttgcgaacagaaaagagctaaaaaagtagtccctgatttacaactctcttttgaacatattgcacgacgctggcatgccagtaataaacaatgggcacaatcacacagcgataaagtactcaaaagcctcgagacacacgttttcccctttatcggcaaccgggatatcacaacactcagtaccccggacctgcttatccctgttcgtgctgcagaagctaaacaaatttatgaaatcgccagtcgtctgcagcaaagaatatctgctgtaatgcgttatgccgtacagtctggcatcatcagatataacccggctctggatatggctggtgcattgaccacggtaaaacgccagcatcgccctgcactggatctttcacgcctgcctgaacttctgtcgcgtattgacggttataaaggccagcctgtcacccgactggcagttatgctgaatttactggtttttattcgttccagtgaactcagatatgcccgctggtctgaaattgatattgacaatgccatgtggactattccagccgaacgcgaacctctgccaggcgtaaaattttcataccggggctccaagatgcgaacaccacatcttgtgccactcagccaacaggctgtagccatactggcagaacttcagacatgggcaggtgaaaatggtctgatctttacgggagcacatgacccacgtaaaccaatcagtgaaaacaccgtaaataaagccctgagggttatggggtatgacacaacccaggatgtctgtggtcatggattccgggcgatggcatgtagtgcattaatagaatcaggtttgtggtcccgcgatgctgtggaacgccagatgagccatcaggagcgtaatggtgtacgtgctgcgtatatccataaagccgaacatctggaagaacgtcgacttatgctacagtggtgggcagattttctggatgcgaacagagaacaatgtatcagcccgtttgaatatgcaaagattaacaatccattaaaatag

SEQ ID NO: 20189 - DNA, 204 bp, Escherichia coli; identical to SEQ ID NO: 5410

SEQ ID NO: 20190 - DNA, 246 bp, Escherichia coli
atgaccattctggactatatcgccgccaatccggggtgtagcggtggagaaatcgccgcagcactgaataccccaaccacagccattaatgcggagttacgccgactctggcgcagcggttcagtcataagaaaagagcgcaaaacaggcggtcgcttttcttaccagataaacccgatgccgttcgggtgcggcaatccacttaccaacatgtttaaccagctactgaaggaagccagagcatga

SEQ ID NO: 20191 - DNA, 207 bp, Escherichia coli; identical to SEQ ID NO: 7169

SEQ ID NO: 20192 - DNA, 216 bp, Escherichia coli; identical to SEQ ID NO: 19419

SEQ ID NO: 20193 - DNA, 306 bp, Escherichia coli
atggcaaaaaacactatcaacgacaaatcaaaacagatttcaattcgtatcccacatgatgcttttgatggcatggaatccgtaaaactggacggcgaaagcaacgccggattcatagtaaccgccatgcgcggggagatcgcccgccgccaggcagaaggaagcagtgaaaatcctctgatttcttctctcgatgcattggcgcaagtggaaaaaattggtattaaagctacggaagaactcgggcaacttatcgccatcgctcgtgaagaactacagcgccgcaaggccaaagagcaggagtaa

SEQ ID NO: 20194 - DNA, 456 bp, Escherichia coli; identical to SEQ ID NO: 14435

SEQ ID NO: 20195 - DNA, 342 bp, Escherichia coli
atgagcttaagatactacataaaaaatattttatttggcctgtactgcacacttatatatatataccttataacaaaaaacagcgaggggtattatttccttgtgtcagataagatgctatatgcaatagtgataagcactattctatgtccatattcaaaatatgctattgaacacatagcttttaacttcataaagaaagattttttcgaaagaagaaaaaacctaaataacgcccccgtagcaaaattaaacctatttatgctatataatctactttgtttggtcctagcaatcccatttggattgctaggactttttatatcaataaagaataattaa

SEQ ID NO: 20196 - DNA, 1554 bp, Escherichia coli
atgatagttaaatttcatgccaggggaaaaggtggtggcagtggtccggttgattacctgctggggagggagcgtaaccgcgaaggcgcaacggtgcttcagggtaatccggaagaagtccgggaactcatcgatgccacgccatttgcgaagaaatacacgtccggtgttctgtcgttcgcggagaaggagctgccgccgggaggacgtgaaaaagtgatggcgagctttgagcgtgtactgatgcccggtctcgaaaaaaatcagtacagcatcctgtgggtggagcaccaggacaagggacggcttgagctgaattttgtcattccgaacatggagctacagaccggaaaacgcctccagccgtactacgaccgcgcagacaggcctagaattgatgcctggcagacgctggtgaatcaccattacgggctgcatgacccgaacgccccggagaaccgcaggacgctgacactccctgataacctgcctgaaacgaaacaggcgcttgctgagggcgtcacgcgaggtatagatgcactttaccatgccggagagataaaaggccgtcaggatgtgattcaggcgctcactgaggcggggctggaagtggtcagggtgacgcgaagcagtatcagcattgcagatccgaacggcgggaagaatatcaggctgaaaggagcattttatgagcaatcttttgcagacgggcgcggagttcgagaaaaagctgaaagagagagccgaatctacagagaaaatgctgaacaacgagttcaggaggctcggcgaatctgtaagcgaggctgtgacatcaaacgagacgaaaatcagagacgctatagccctgttcacagcctcgacagaggaatcgctggaaaaacaccgggaaggggtgaaagaggcgatgatgcagcacaggagggacgtgttaaagctggcagggaatacgggcatgatgttactggggatagtctttctcctgtttaccgcgagtggcgggacgctctggtatcttggagggaggatacaggcgaacctggaagaaatcaggaagcaggaagagacattgcagaaactgaacgcgaagacatggggcgtggagtttgtgcaggacgggaacaggaaattccttgtccttccgtacgggaaatcagcggaggtgattccctttcaggggaaagagtgggtacatctgaaggagtgacacagagtgacagagctggaaacacatttgctgaacgccttagagcagctgcaacaggactatatgcagcggctgagcgaatgggagagcgccttcgtggaattgcagaagatgttttcgcttacgcaacgggacaacgcgatgctgaacgagcgggtcatgcagttgagtcagcaggtgcagcacttgagcgagcagacagaacgcttgagccagttatacagcgagaactggagataagagaggaacggctgatacaggagcgcgaacatgtgttatccctggaacgggagcgtcagccggaaatacaggaacgcacgctggatggcccttcgctgggatggtga

SEQ ID NO: 20197 - DNA, 231 bp, Escherichia coli; identical to SEQ ID NO: 5413

SEQ ID NO: 20198 - DNA, 234 bp, Escherichia coli
atgacagcacttcccgaccatgccgccagtcccctgatgacccgcctgcaggacgagctgcgcacggaatctgtccgcgctcaggcccgtgaacagtttaccggtgcggtggaccggatatttgacacggcggagagcgtctgtgttgcctctgttgcccgtacggttctgcgtgccgtccgtgacacggtggtctctgttgcccgcgctgtatggaactggattttcttctga

SEQ ID NO: 20199 - DNA, 234 bp, Escherichia coli; identical to SEQ ID NO: 7244

SEQ ID NO: 20200 - DNA, 342 bp, Escherichia coli; identical to SEQ ID NO: 9277

SEQ ID NO: 20201 - DNA, 1257 bp, Escherichia coli; identical to SEQ ID NO: 13723

SEQ ID NO: 20202 - DNA, 558 bp, Escherichia coli
atgacctggctaacgggaaatataccgctcaggatgcgactacggcacgaaaaggccttgttcaactcagtagcgccaccaacagcacctctgaaacgctggccgcaacaccgaaagcggttaaggctgcatatgacctggctaacgggaaatataccgctcaggatgcgactacggcacgaaaaggccttgttcaactcagtagcgccaccaacagcacctctgaaacgctggccgcaacaccgaaagcggttaaggctgcatatgacctggctaacgggaaatataccgctcaggatgcgactacggcacgaaaaggccttgttcaactcagtagcgccaccaacagcacgtctgaaatactggccgccacaccgaaagcggtcaaggctgcatacgatctggcaaacggaaaacaaccggcagatgccacgctcactgctctggcaggacttgccactgcagcagatcggttgccttattttaccggagcagaccgcgcagcgctggcaacccttacagctattggtcgcgctattatcgctaagggcagtataa

SEQ ID NO: 20203 - DNA, 405 bp, Escherichia coli
gtgattcgtgatgcatggctgatacaccgacacaaagggaccatcagcgcactgcgaagagccgtggagcctctcggctacctgattgaagtaaaggagtggtggcaactcaatgaggagcctgggacatttcgcattgttgtcggagtacttgatcagggcatcaccgatgaaatgcatcaggaacttgaacgccttattgcggatgcaaaaccagtaagtcgccatctgacagggctggcgatcagtctgagtgtgaacggaaagattttcgttggtacgggatgctatcacggcgatgccctgacggtttacccctacaccccggagtccattattgtcgaaggggattatttccctgccccggccattcatttaattgataatctgagagtaaacgcatga

SEQ ID NO: 20204 - DNA, 333 bp, Escherichia coli
atgcaacacattgacagagaaaaagcgcagcgactgattgagcggatggaagcgctggcgaaagaagaaaatgtcaacatccaaaaaatagctgaatgtggccagatagttcttcgtcgtgaaaaagacctcaaacaactgatgtctggcgaaaccagcaaaacatggacttcaggcgagaagacggtttattgcagcttctgcaataaatcccagtacgaagtcacaaaggtgattgccggaccgtctgtttacatctgcaatgagtgcgtggatttgtgcaatgaaattatcaggaaagaagtgacagacaaaaaggaaaaaaacgcatga

SEQ ID NO: 20205 - DNA, 315 bp, Escherichia coli
atgaacagaaaacagaaacaagagttgaaatacttcttacgtaaagaaattgccaggcttgaagatgcagagtcacaatcatcagaaattccgttcggaatggatatcaacgacgcccgtatgctccaggcataccgcatagctcaggctgcactacaggcaaaaccgtcagatggactggttagagcagtacatttctatgaacaggtaaagcgtgagaatccgccagtcgaaactggagtatggaaagacgctattgactgggtgaccaaagaggcttgccaagctgtagacattggcatcaaaggagagtga

SEQ ID NO: 20206 - DNA, 366 bp, Escherichia coli
atgattgatgtcttaggaccggagaaacgcagacggcgtactacacaggaaaagatcgctattgttcagcagagttttgaaccgggaatgacggtctcccttgttgcccggcaacacggtgtggcagccagccagttatttctctggcgcaagcaataccaggagggaagtcttactgctgtggccgcaggagagcaggtcgttcctgcctctgaacttgctgctgccatgaagcagattaaagaactccagcgcctgctcggcaagaaaacgatggaaaatgaactcctcaaagaagccgttgaatatggacgggcaaaaaagtggatagcgcacgcgcccttattgcccggggatggggagtaa

SEQ ID NO: 20207 - DNA, 201 bp, Escherichia coli
atgaaagtgaaggcactggaaggcgacaccgtggattcgctctgtttccggcactacggcacgacgcagggcgtcaccgaaaaggtgctggatgccaaccccggactctgtcagcaggtatttctggacgccgggcaggaagtggagatgccggagccggagaagaagaaacgagaaatgattcagttgtggggggagtag

SEQ ID NO: 20208 - DNA, 201 bp, Escherichia coli
atgaaagtgaaggcactggaaggcgacaccgtggattcgctctgtttccggtactacggcacgacacagggcgtcaccgaaaaggtgctggatgccaaccccggactctgtcagcaggtatttctggacgccgggcaggaagtggagatgccggagccggagaagaagaaacgagaaatgattcagttgtggggggagtag

SEQ ID NO: 20209 - DNA, 324 bp, Escherichia coli
gtgagcaccattcaaacagggatcacagagcaggttattgcgtggctctttgaccacctgccaacggtgtatgcagtaggcgcggcggtcagcatttccgcgctgatgagtctttatgacggacgaacactggttcagaccgtaacgggatcgctggcgtgcggcgttcttgccatggccgtggccgggtcgctgcgcttcttcgggatccctgaggatgcagtgacgttttttggtgcctcaatcggttttatgggcgcagagaaagcacgcgacaaggttattgcaatatttgatcgcagggtgaaggagaggaacgaatga

SEQ ID NO: 20210 - DNA, 408 bp, Escherichia coli
atgaagctctggccaacgcttggcgttgctttccttctgattgccggatggggaacatccatgcgtctgtcatggtcgctgggccgggagaacgccagaaacgaagcgcaggccagcaccctgaaacgtaccgccgacaccctgaatatcatcagcgccggggtacaggatatgcagcaggtgctggcgcaactccgcgtggaaaatcagcaacgcaatcaggacggagaggcaagacgtgaacagctacgcaacgatattgcaaaagatgaatgcgcccacgctttgcctgacgctcgttttactgacaggctgcgcaggcacgcagaacgcgctacggccagcgccgtcagtccggcttataccgcagacgctgaccataccggtaacgcctccccccttccctga

SEQ ID NO: 20211 - DNA, 408 bp, Escherichia coli
gtgacggtttccattctgtccactgaaggcgacggcacagcaacggaggcgttgcttaataccgttcgcgccgttctgaatgcagaggacacccgcccggtggccgaccgcctgaccgtacagagcgccagaatcgtgacatggcggctgaatgcaaaactgtacttttaccccggcccggaatccgaacctattctggccgcggctgaatcgtcgttcaggaagtggctggctgagcaggggcttatcggtcaggacgtggcgttgtccgccattgctgccgcactgcatgtgcacggtgtgcaacgcgtggagataatcgaacccacacagaatatggccatcagcgacatacaggcggcgcgctgtgagtcattcaccatcagcgaaggtgggcgcaatgagtaa

SEQ ID NO: 20212 - DNA, 201 bp, Escherichia coli; identical to SEQ ID NO: 20208

SEQ ID NO: 20213 - DNA, 291 bp, Escherichia coli; identical to SEQ ID NO: 4611

SEQ ID NO: 20214 - DNA, 393 bp, Escherichia coli
gtgctccagccagcccacgtttacgtcctgaagcagcttgttggtgtgaaaatcagactcgtaggcgtgggatgtgccgttaaagccaatcatgatgcgatcaagcgctacctgccgggcgatctgtgtactgatacgggactgaaaatcgctgtgggccgcccaggtatcaagctgtgggtacgaaataaaggtatcgtagttcacctgttcgcactggtactgacgagacttcatatcgatcacgttattcgggttacggcgtttgatgccgtcataactgctattcgtgcgcgcaattggcccggtggtgtccaggaggattttttcgcctttctggtcggtcacgccgatcacgttaattcttttcgtaaattcggtactttcctttga

SEQ ID NO: 20215 - DNA, 204 bp, Escherichia coli
atgcccccccccgttaccgtgctttctgacatgctgcgcgccatccgtgacgcagagcacgcacagagaatcagtgaaaccactgaacgcgcccaccgcaaagcagacctgctgcggggtagcctgaccagtggaaacaaaaaacagacagaaacgggactcacaaatcccgtaaatgagcaaaaaacgcgccgcgatatatga

SEQ ID NO: 20216 - DNA, 204 bp, Escherichia coli
atgaaaacacccgttaccgtgctttctgacatgctgcgcgccattcgtgacgcagagcacgcacagagaatcagagaaaccactgaacgcgcccgccgcaaagcaaacctgctgaggactggcctgaccagtggaaacaaaaaacagacagaaacgggattcacaaatcccgtaaatgagcaaaaaacgcgccgcgatatatga

SEQ ID NO: 20217 - DNA, 735 bp, Escherichia coli
atgagcaaaaatgtaatattaagtaatggggaaagagaaaatccttctccgctgatctatgacaagcataaaaagcactgtatttttcgtacaaagacattacttagtgaagagaaaaaagaagacgaaaaatgtactgtatcagttgtatttattgatcatgaggggtatataagaaatgctggaattataaaacacacagtccctgaacttgaagaaggtcgcatgcctaaaattaatgcaataatattgcatagaacagattcttcaacaataaatggtacacttgctagtttttctaaaggcattggagctcattttattgttgaaaaagatggtaatatataccaggctgcaagcctatttgtatataccagccatgtggggaagataaagtctcgatgtaaggaggaaaaaacatggtcgtctgaagaaaaaaagaaaatagaggcattcggatggaatgctaagaagatacatgatcatgaaaaaattaaacaatatccttatagatatccatataatatggacagtgttggcattgaggttattgcattatatgataaaaaaaataaaaaatgggagtctgctacagactctcaaaaaaaatcaattgagaaacttgtagatataataaaaaatatttatgagttagaagatagggatgtttatgaacatgataaaattagttataaaacagaaggtgaaggcgctgatctctatagtgttaattaa

SEQ ID NO: 20218 - DNA, 144 bp, Escherichia coli
atgtatgacggaatagaatggagttttgttatcaatgctgctgcaacagcaatgtggatgagcaatgataaagagatttactggggatgcaataaaaaagcatgcgataatttctttttattaccatatgatgggatgaggtaa

SEQ ID NO: 20219 - DNA, 426 bp, Escherichia coli
atgattagaataattgtttttttattgttttttttgagtgggtgtacttcacaaaaagagtattccaatatagtcaggattgagaatagatgctcctcagatatcgatgtctttattcagggatatgtttccggttctacgctgatttatcagcataatatacacttgccagttggtgatagtgatgtattagtatattttcccacggcagatattgatgatggttttaaatatgagggggcattcatgatatataaagatagccgcggtgaattggattatccattcaccatttcattgtcagggcgcgaaaaaaaatttgggaagaatgacttaattagattatcacgagatatttcaacaaaagacgacagaaaatacggagttataagatatataatcgacagtcaggaaatttgcccgtga

SEQ ID NO: 20220 - DNA, 231 bp, Escherichia coli
atgccacttagtcatttattattatattcacgtcgcttggggcgtatgatttgtaaacgtaaattcaaaagttttggcaataactctttttttcggccttttgcatatgctattgaaacacaaaagattgctatcggtgataatgttgttatcaggcctggtacaatgttatttgcttcaccatatggtgaagaaaaaaacttcatatccttattgaagatgatgttttaa

SEQ ID NO: 20221 - DNA, 762 bp, Escherichia coli
gtggctaatatacttaaagggaaaaaaatccttattgctggtgccggtggattgctaggcactcatcttgttaaaaaagtcatagatgaaggtggttatgttattgccggtgattttgacttagtgtcaacacagaacaaattaaatgagctgggtatcacaactggatatgaattacatcaacttgatgtaacaagtcttgaatctgttcaggaaatactagccattgcacctgatctggatggtgctattaatacgacttatcctcgaaataaaacttatggtgcccacttttacgatgtaacgctggaaagtttcaacgaaaatctttcgttacatcttggaagttcatttcttttctcacaacagtgtgcagcatatttcaaaaaaaatcagcgttcattttcacttgtaaatatttcttctatttatggtgtcgtggcaccaaaattcgaaatatatgaaaatactaaaatgacgatgcctgttgaatatgcagcaataaaatcggcattgttacatttaaacaaatatattgtagcttatgttagagatagtcgatttagagttaatgctgtaagccctggcggtatttttgatcatcaaccagatgcttttttagaagcatataaaaaagaaactaatggtgcagggatgcttggtgttacagaaatgcttggaagtattgtatttttgctttctgatgcgtcaaaatatgtaacgggacaaaatattattgttgatgacggtttttcattatga

SEQ ID NO: 20222 - DNA, 696 bp, Escherichia coli
atgaaaataaacgcttttatatttgcacgtgggggatcaaaaggattacctggtaaaaatattaaacctctagcaggcaaacctctcctgcaatactctattgagactgccaaacagagtccttcgatttcctctatatatgtttcaaccgacgatgatgatattgctctcgttgcagaaaattgtggtgctactgttattcgtagaccggcggagcttgccggagacactagtccagaatggttggcatggcgtcacgcaattgagtgggttcagaaggaagtgggggatttcgatggatttgtaagtttaccgactacaagccctttgcgaagtgtcgatgatgtcgaatgtgctattgctaaaagagtcgagtctggtgctgacatatgcatttcagtcactccggcgagcagaagtccttattttaatatggtaaaatttcacgaaagtggttatgtgaggcttgtcaatgaaccggaagggaaagtgctcagacggcaggattcaccagacgtatttgatattactactgttgtgtacgcgacaacgccaaaatttgttttgaataattatgggctattctcaggcaaagttgcaagcattattgtgcctaaagaacgtgccgttgatatagatgatatttttgatttttacatggcggaaattttacttaaggaattgaatcgtggctaa

SEQ ID NO: 20223 - DNA, 984 bp, Escherichia coli
atgaaaaaggtcgctgtaatcgggttgggaaatatcgcaacaagacatcgccacaatcttaaaaaactttttccaggaattattgttttttctatgtcttcaagtgagcgagtgctatccgagttagtgagtgactgtgatggttacttagctaatgtagatgctatcatacaagagcaagtcgattttgtaattgtagcatcaccagcaacttaccatttacggcatagtgaaaaacttttggcagcaggaattcctacttttattgaaaaacctgttacagcttcgtttgatgacgctaagaagttacatgaaatagctgaaagacacgcaactccggtggctataggatattgtttacgctatttgccttctgcaaaaataattaaaaaaataattgaggataaatttattggcagtatttacaatgtcaatattgagattggtcaatatctgccggattggagaccgtcaaaatcatatcgtgaaagtgtatcagcaagtaaagttttgggtggcggagcgctactcgaattaagtcatgagctggattatgcgcaatggctatttggtgaactgaaacttgtgaattcagtgctacggacttcgtcagaacttgaaatggatgtcgaatctttagctgatattataatgataaattccgccggttcgcttattaatatccatcttgatttccttcaaaagaaaccatggcgacaatgtcatattattggcagtaagggacgaattgtctgggatctcatccgcaatgaaatcattcatcatactcgacagagtagcgatattatctttagtgatcctggctgggataaaaatggtatgtatacagatatgctgctcgacttcattgcggaaatatccgggagtgataacaactgtgtgacattggagtcatcaataaatattgttagcttaattgataagataaaagaaacaagtcaatgccttggagaagttcaatga

SEQ ID NO: 20224 - DNA, 1059 bp, Escherichia coli
atgaatcagcaatggaaaaatgtattaatctcaccagatagctcgatacttgaagcactcgaaattatcaataacgaagcattaagagttgcgctggtagttaatgaaaataacacgttattaggagtcattaccgatggtgatattcgaagaggaattttgaaaaacctgcctctgactgcagaagtacaccaagttatgaataaaaaacccgtaacggcaagtccagcgctttcaaaaaaagagctcaataatctgatgtcatcgcatggtatactgtctataccaatagttgataaaggtatcattgtggggctggagactattacaagtatcgctgcaacggaaaaatatgataatcctgtttttattatggccggagggtttggtactcgtttgagaccactcactgataattgccctaaaccaatgcttaaagtaggtgataaacctattttggagacagtggtaagaagctttgttaaagcagggtttactaatttatatatatctacccattttctgccagatatgattcatcagcacttcggtgatggtgatgcgtttaatgcaaaaatcacctatatacatgaagaaactcccttaggtacgggaggagcgttgggattgcttcctgactccttatctgattctttgccactcattatgatcaatggtgatgtgcttaccaatattgattttgagcggttactatcatttcataataataacaatgcggatgctacaatctgcgtaagaaaatatgactaccagatcccatatggtgttataacaggtaatggtaataaaatagtcagtatggttgaaaagccagtacatcatttctttgttaatgcaggaatctatgttgtttctcccgatatttttaaatcagtacccaaaaaccatcgaattgatatgccgacgttactcgaacaatttatgagtaagaataaagagatactaatgttcccgattcatgagtattggcttgatatagggcgaatagatgattttaatcgggcacaggccgatattcattctttagggctggattaa

SEQ ID NO: 20225 - DNA, 648 bp, Escherichia coli
gtgaatgataatcttcagagaaaaccacttgttattattggtgggggagggcacgccagcgtaattgttgatattttgaaaagacagaagcgagagattgttgctattattagccctgatgatatcactcagcgaaaggtatattcaggaattaatgttttttcgaatgataatgaaatatttcgtttccaaccaaaggatattcgcttaattaatggaattggtgccttaccagactcggaagttaggtataaagttaatttgtactttgaaaaaatgggctatagttttgaaacaattgtagctgataacgcatatgtgtcaccctttgcctttttggaagaaggagtacagatatttcctggtgccataattcaaccagggacacatattggtgcccatactattattaatacccgtgtagtcattgagcatgatgtgtctctcggtgcatataacgtaatctctcctggggctataatatgtgggcagtgcaaaactgaagagcgtgtattcattggtgcaggtgcaattgttattcagaatattgaaatcggatcaagagccgcaatcatggcgaacgcattggtagcagaaaatatacatccacaacaaaaagtttatgcatcacgcggtatagtcagataa

SEQ ID NO: 20226 - DNA, 1074 bp, Escherichia coli
atgacgcttattattgctgaagccggtgttaaccacaacggcgacgaaaaactggcttttaaacttgttgatgctgctcataaagcaggtgctgatatcgtcaaatttcagacgttcaaggcgaaaaacttggtaacagctgaagcagtacaggcggactatcaggttgcgaacactaaaaagcaagaatcacagttagaaatgctaagtcggttggagctttcatgggaagctcaccacaagctggttagttattgtaataaacttggtatcgaattcctttctaccgcctttgattccgagagcttggattttcttgttaatgagcttggcgtcaaaaggctaaagttaccttcaggtgaattgactaacgcgcctttggtacttgagcatgcgcgcaccggttgcgacattattgtctcaacgggaatggcgacattggctgagattgaggccgcgttgggtgttattgctttcggatttacagcgcctgaagaggcagtgccgagtattgaagcttttcagcgtgcgtactcgtctgaggttggtcaaaaagcgcttaaggaaaaggttatcgttcttcattgcactacggaatatcctgcaccagtggaagagattaatctacgtgctatggatacgttgcgtcaggcgtttgggttgcctgtggggtattccgatcacagtgaagggataatgattcctgtggccgctgttgcacgtggtgcggttgtgatcgaaaaacacttcacaattgataaaaacatggaaggaccggaccacaaagcatcgctggagcccgttgaactggaggcaatgattgccgctattcatcagatagaaaaagcgctagggaatagcattaaagcgcctactgtgtcagaaatcaaaaataagagtgttgcgcgaaaaagcctagttgctgcaaaaactattatagcgggggaaagcttcacatccgataatctggcaataaagcgccctggtacaggtatgtctccttatttatattggaacttaataaataaagtttctgaaaatgattatttaccgggggagttgattagtgaatga

SEQ ID NO: 20227 - DNA, 1164 bp, Escherichia coli
atgataacaacaacacgcaaggtcgcagtttttaccggaactcgagcagaatatggattactctattggttaatgaaggacatccagagcgacgaggagctgcaactgcaactgctcgtcagtggtatgcacctttcccctgaatttggcaatacatggcaacagatcgagcaggatggtttttcaattgatgagaaaattgaaattttgctctcctctgattctccggtcggtatagcaaaaagcatggggttggggattctggggtttgctgatgcattatcccggctgaaacctgatgttttggtcattcttggcgatcgttttgaagctcttgcggcggcgcaaaccgcgatgattcttcgtattcctgttttccatctacatggcggtgaaattactgaaggtgcctacgatgatgctattaggcacgccatcacgaaattgagttatttacacggtacttccacggaagaatataaaaaccgtgtcgttcagttgggtgaaaatccggctcgtgttactaatgtgggtgctattgggttagagcatctgaagcgtagcaagtttatgacggtcgaagagttatcaacatcattgaatttttcgctaaaaaagccgtatgtacttgtcacatatcatccggttactttaggtgatgagcctgctgaggcgagctttacagcattgctggacgcgcttgataaatttcccgagcttcaggttattctgacctacccgaatgcggatgatggcggcagaaaaattattcctttacttgaagcctatgctgctaaatcacctgaacgcgtcaaagctatcccgtcacttggacaggtgcgttatctcagtgcggttaaatatgcttcagcggtggtgggaaactcttccagcggcataattgaggtgcctgctctcgacgttcctacggtaaatattggcgtgcgtcaaaaagggcgtattgccgcacaaagcgtactcaattgtgatgctacaacggaatctatcactgctgcactaacaagtgcgatttcgcgaagttacataagggaaggagaaaaaatatccaatccttatgggcaagggaatgcgagtgctaagatcattgagatgatcaaatccatgaattttgtaccgagcaagacattctacgacattaagtga

SEQ ID NO: 20228 - DNA, 1143 bp, Escherichia coli
atgaatatcaattcaattatcgaatttgtccgagacgtatacaaaacgaatgagtttattcctttgcatgcgccagtttttgatggcaatgaaaaaaaatatgtattagatacacttgaaagcacgttcgtttcaagcgtaggcaaatatgtcgatgactttgagcgcaagatggaggcttatactggaacggcgagagctgttgcgacagtaaatggtactgcggcattaagtgctgcgctgtatctagctggggtgaagcgcggcgacttagtggttacccaagcgctgacttttgttgcaacctgtaatgcactttatcatttgggggctgaacctgtatttatagatgtctcgcctgtcagtctcggtctttgccctgttgcgctggaaagctggctttctgaaaataccgagctgactgagcatgggtgccagcatcgtacgacacatcagattgttcgcgctgtagtgccaatgcacacttttggtcatcctgttgaaatggatgaacttattgcggtctgcaagaagtggcgaattgttctggtagaagatgcggcagaaagcttgggttccttttataaggggctgcatactggtacgcttggtgagtatggggctctgagttttaatggaaataagattatcactactggtggtggtggtatggttttttgtcgcgcttctgaggaaggtgtgcgagcgaagcatgtcaccacaaccgccaaggttccacatccatatgagttttaccacgatgagcctggttttaactaccgtatgcccaacctgaatgctgctctgggatgcggacaaatggaacgattggatatttttttaaagcaaaaacgcacgcttgcccagcgttatcaaacattcttcgaagggtcagagtttaaattcgttaaagaacctcaatatgctcagtctaattactggcttaatgctgtaatctgtgaaaacttggattcacgtgacgctattttggcacaaatgaatgaagcaaaagtgatgacacgcccgatatggaaactgatgcaccgcttaccaatgtttgagcacgcaatgcgggatgatcttaaaaactctgagcaaattgaggctcgcttggtcaacttgcctagctctcctgtggaataa

SEQ ID NO: 20229 - DNA, 1191 bp, Escherichia coli
atgggtaatattctccaacttattggacgcaataaagcattattcggtgatgatgtatcagaaaatgaaaaagaattacaaagaattgtcgctacatcccgttttttggttctgggcggtgcaggctctatcgggcaggctgttacaaaagagatatttaaacgtaatcctcaaaagctccatgttgtcgatattagtgaaaataatatggttgagctggtacgagatatacgtagctctttcggttatattgatggggatttccaaacctttgctctggatattggttcggttgagtatgacgcatttatcaaagctgatggaaaatacgattatgtcctgaatttgtcagcgcttaagcatgttcgcagtgaaaaagatccgtttactttaatgcgtatgattgaagtaaacatccttaatacagagaaaactattcaacaatctattgcagccggtgttaagaaatttttctgtgtttctaccgataaagccgcaaaccctgtgaatatgatgggggcttccaagcgtattatggaaatgttcctgatgcgcaagagcgaagagatcgctatttctactgctcgttttgcaaatgtagcattttcagatggctcactgcttcatggttttaatcagcgactgcagaaacaacagccaattgtggctcctcacgatatcaagcgctattttgtgactccacaggaatctggtgagttgtgtttgatgtcctgtatcttcggcgagaatcgtgacatctttttccccaaattaaatgaggcgttgcatcttatctcctttgccgatatcgctgttttgtatttgaaacagcgtggctacgaacctcatctctgtgagacggaagatgaggctcgtgtgttggcgaaaactttgccagcgcagggaaagtggccatgccttttcacatccagcgacaccactggtgaaaaagatttcgaggaattttttaccgacaaagaggtgcttgatatgaagcgctttattaatctcggcattatcaagaatgatccactttacgatcccgtgcttttagaccattttaaagaaaaaattaagcacatgagggcgtcgctggagtggagtaaaaaagacattgtaaaactgttttttgaaatgattccagattttgggcataaagaaacaggtaaatatcttgacagtaaaatgtaa

SEQ ID NO: 20230 - DNA, 951 bp, Escherichia coli
atgcgtgtgttactggctccgatggagggggtacttgactctctggtgcgtgaattgctgaccgaagttaacgactacgatctgtgcatcaccgagtttgtccgcgtggtggatcaactgctgccggtaaaagtctttcatcgcatttgccctgagctacaaaacgccagccggacaccagccggtacgctggtgcgcgtgcagttgttaggtcagttcccacaatggctggcagagaatgccgcccgtgcggtcgagttaggttcctggggcgtggatctcaattgcggctgcccgtcgaaaacggttaacggtagcggcggtggggcgacgttactcaaagatcctgaactcatctatcagggtgcaaaagcgatgcgcgaagctgtaccggcgcatttgcccgtcagcgtaaaagtgcgtctgggctgggacagcggtgagaagaaatttgaaatcgccgatgcggtgcaacaggctggcgctacggagctggtagtacatgggcggacaaaagagcagggttaccgcgcggagcatattgactggcaggcgattggcgagattcgccagcggttgaatattcctgtgattgccaacggtgaaatctgggactggcagagtgcgcaacaatgcatgacgatcagcggatgcgacgcagtgatgattggtcgcggggcgctcaatattcccaacctgagccgggtggtaaaatataacgaaccgcgaatgccgtggccggaggtagttgctttgctgcaaaaatatacccgtctggaaaagcagggcgataccgggttatatcacgtagcgcggattaaacagtggttgagttatttgcgtaaagaatacgatgaagcaacagaattatttcagcatgttcgggtgttgaataattcccctgatattgcaagggctattcaggccattgatatcgataagctgcgataa

SEQ ID NO: 20231 - DNA, 843 bp, Escherichia coli
atgaaaaaatggacaatgatttttgcgagcctggtgttgctggtgatgagtgcgagcgttccaaagagctatgccggggataaactcaccagcgcgagtttcgacagtgtgaagatttattatgggaaggggaaaatgtctattcataacaccggaggtttgtatgtcacggtgttaactcccaacgaggcggcctatggggtgtacaacgatgccataaggaagaacgagcaagccagcgttatttcgtggacggggtcgggaccagcgccagtgttgatcttaactgactacggtaatgctgatagctcgaattgtcctgggataaatacggcgacatttcagtgtgcatatgagacgtttaagataaccgttcagtccgacagttatggttgcccgtggctcgcttctttttatacgatcacagatcaacccggattcgggagatatactgggccaacgaaccatgccacagtatgtccgacgatccctgtcgcgtcgtatgacatctcgtggagtgagaattacgtcagccacaataaggcgttacagttgcaatccaatggctcgacaatcaccaccacgctttcgacctacctgatggaagatggcaaactctgtgatggcagcgtttttgatagcagaggtgcatactgccgcgtggtctcggaactgttaacctttacctcctacggttgcgataaatcaacggtaacggtttctcccacacggcatccggtaaccgataaacagctacatgatatcgtggtaaatgtgaacaccagtagccgacaaccgattgattctacgtgccgattccagtatgtactgaatgaattgtag

SEQ ID NO: 20232 - DNA, 525 bp, Escherichia coli
atgaagaaaaagcgtgcgttggtttttatctgtagcctgatgctgttgtacagcgttactgccccggcggtcgacaacctgcactttaccggtaatttgctcggtaaatcctgtacgccagtgatcaacggtagcctgttggcggaggtgcactttcccaccattgccgccagcgatttaatgaacctcgggcagtcagagcgagtaccgttagtatttcaattgaaggattgcaaaagctccacgctgtttagcgtcagggtaacgctgacgggaacggaagatagcgaactgcccggatttctggcctttgacgcctcatcttctgcatccggagctgggattggtattgaaacggcggcaggcgcggcggtgccagtcaacagcacaacgggtgtcacgttcccgctaaaccagggcaataacagtctcaattttaatgcctggctacaggcgaagggcgggcgggatgtgacgtccggtgatttcagcgctacggcgacggcaacctttgagtatttttaa

SEQ ID NO: 20233 - DNA, 507 bp, Escherichia coli
atgaaaagatcttgttcagtctgggcgggaacatggttactgatgtgttgtattggtagcgactttgcagttgcagggagtaaatcagtaagtttgagtttacgagtgctcgttgatgcccctcctccttgcacggttaatggtgcgacggttgagtttggtaatgtattcatcaataagatcgatggggtaggttataaacaacccattgattactcgcttgtttgtaacaacctggcaatggatgacctgcgtttacagatgcgggcaacaacggttgtgatcaacggtgaaacagttatcagcacaggtatttcagggtttggtattcgggttcagaaaagtagtgatcactcaacactcgacttaacgtctggttcatggttgccgtttaatttttcctcgggcgtccctgcactcgaagcagtgccggtgaaacagagtggtacaaccttatcggcagcggaatttaacgccagtgccacaattgtggtggattaccaatga

SEQ ID NO: 20234 - DNA, 885 bp, Escherichia coli
atgattaagaaaatttttgcccttccggtcatcgaacaaatctcccctgtcctctcccgtcgtaaactggatgaactggacctcattgtggtcgatcatccccaggtaaaagcctcttttgcattacagggcgcacaccttctctcatggaaacctgcgggtgaagaagaagttctgtggttgagcaataacacaccgttcaaaaatggcgtcgctattcgcggtggcgtaccggtttgctggccgtggtttggtccggctgcacaacaaggtctgcctgcgcacggttttgcccgcaacctgccgtggacgctgaaatcacatcgtgaagatgctgatggcgtagcgctgacttttgaattgacacaaagcgaagagacgaaaaaattctggccgcacgactttacgctgttagcgcatttccacgtgggtaaaacctgtgaaatcgatcttgaagcacacggcgaatttgaaactacctctgctctgcatacctactttaacgtgggtgatatcactaaggtaagcgtcagtggactgggcgatcgcttcattgataaagtgaatgacgcgaaagaagatgtactgaccgacggtattcagaccttccctgaccgtaccgatcgcgtgtatctgaatccgcaagattgcagcgtgattaatgacgaagcgctgaatcgtattatcgccgtaggccaccagcatcatctgaacgttgtaggctggaacccaggaccggcgctttcagttagcatgggcgatatgccggatgatggctacaagacctttgtttgtgtagaaacagcttacgcctcagaaacgcaaaaagtcaccaaagagaaacctgcacatctggcgcaatccattcgcgttgcgaaacgttaa

SEQ ID NO: 20235 - DNA, 1140 bp, Escherichia coli
atgtttccattaaatgatctttcgttaaaaactcagtcggttcaattaaataaagtcacatctaatactgaatctacgataaaacaacacgagttagtatctgatgatgcaatcataaatgaattatcaagtgagttagtcagttgtcttggaaatggtaagcttacaccaattagtgaagacagcaacttactgaatatgctgtctgaatttaagttattgagagagcaatgtttcaggtggggtaattatactctattgtttgaaaattatggggcttatgataagacgggatctatcacgatagaaaaaagtcagggggaggggactttacccattcggcataaattagagtttatatcgactaatattgcagagttgctggacaagttaaccaaaattacagatgccagactttgcaaaggtttcagtgactgggctagttcagtcaaagaaggcgcatcgaatgacttgaaagaaaatgtggatagagcattggtgagaatgtttaaatgtgttaagctccacagtaatgaacttaacttatcatacctttttttgggttctgtgccgcctcttccagagtggattgaaatgcttagccttattcataataaacttgattcaatacaggtgcccgaatcatgcaaagaattagaactcgatttcaataaccttacagaatttccacaagtacctgatggaattaccctgatctccgtaaataataacctgatatcgcatattgactcatttccgccaaaggttaagaaaatttttattggtcacaataagctatcggaaataccagcaataccagacaccgctaaggtttttgattgtagtgagaataatataaaagaaattaggtggttccccaaaaatctgaaagaagtgcatattgaatataataagattgaggttattcctgcgatacctggcaatttaaaattactttttatggaatgtaatcctattaaagaggcatttttaatgccatggactctgacagggatttgctatgaaatatcgcagcggaaatatattgttacgaaccccgatgattatgataaatattccgatatggttaaaaagcatgtaatagatggtgaggaattcataattaaatattatatgtaa

SEQ ID NO: 20236 - DNA, 1164 bp, Escherichia coli
atgaaaagaaaagttctggcaatgctggtcccggcgttattagttgctggcgcagcaaatgcggctgaaatttataataaaaatggcaataaactggatctgtacggaaaagttgatgctcgtcatactttttccgataaccctggcgatgacggcgatgaaactatcatcgagttaggcttcaaaggtgagacccaaattacagatcagttaactggttatggtcaagcactgaccaaaacaaaggctagcgacactgaaggttctgataatacttatgtcaaacttgcttttgcaggtctgaagttcggcgagatgggctcctttgactatggtcgtaactatggtgtgatttacgacgttgaagcctggacagatatgcttcctgtattcggcggcgactcctatacctggactgataacttcatggcaggccgtgcaaatggggtagctacttaccgcaatagtgatttcttcggtctggtggaaggtctgaactttgcattgcagtatcaaggtaacaacgaaggcagcaatgcaggagaagatcaagaaggtactaaaaatggtcacgaagacgttcgcttccagaacggtgatggttttggtctttccacttcatatgactttgacttcggtttgagcttaggtgccgcttactcaaactctgaccgtaccaattctcaagtagctcttggcgggtatcactacaatgaatacagcaaatttgctggtggtgatacagctgaagcatggacatttggtgcaaaatacgacgccaacaatgtttatcttgcaatgatgtatgctgaaacccgcaatatgacaccatatggtaatgtgggtatcgcaaataaaacccagaactttgaagctgtagcacagtatcagttcgattttggtctgcgcccatctcttgcatatgtttattcaaaaggcaaagacctcggcggtaacgactataacaacaatggtcatcaagagtatgttgatcaggatctggtcaactatgttgaaattggagcgacctactatttcaataagaacttctcaacatatgttgactataaaataaacttgttggataaagatgacgatttctatgacaacaatggcatcgcaacagatgacgttgttggtgtgggcttagtctaccagttctaa

SEQ ID NO: 20237 - DNA, 150 bp, Escherichia coli
atgaacgccatcaccattttcccctcgattataaaacttgagttattcagtagtctcccctcttgcaactcacacccaaaactgcctaacgaaaagttattaattttcaatcatattgctatcaggatttacattttttcgctgtgctag

SEQ ID NO: 20238 - DNA, 408 bp, Escherichia coli
atggcatatgtttatggactggtagattcattgcagggcactgacatggtgggaatggcgggggcaggagacagaaaggaatgtgtgttcttagttcaggtatatgcacatgtggggaatactggagcctggaagcaggggcgaaaggtttttggggataaatcgatccccagaggaacagcaattgccacttttgttaacggaaagtatccctcgaggcagaatgagcataagcatgccgctttctatctggaacaggatagtcagtatatttatgttatggaccagtggacaggtaaaaccacgaaagtctctgcacgccctatttcccgaaaaggtggaatgcgcagcgatggaacatatcctgatgccagtaataatgcggaagctttttatattattgagtag

SEQ ID NO: 20239 - DNA, 453 bp, Escherichia coli
atggggacacgttttattttttctctgttgttgggttttatgttgttttattcacaatttgttactgcgtgggaagtcagttgccccgtgtttatcaatataaaatcctcaacaacagtactggagccagatatatctgcatcgtggcagagatcttcccgctatgaaccccgtctgtggttggacggggtagggatgtcgcagggaaaacctgaaaatcgggtggatctaaaaccagagacagagacaataaagggtgaaaccaggcaaatatgggataccacaatggccagtaatcagaatagtgaacgttactgggtttcctgtatttataaccatggacaggtttggttatcacaaccggtccctgcattggcgacacagtgccaggcatcttctttgccggggcagcgggtaccaggagagtcatcggtatctgtgacatgtaaatag

SEQ ID NO: 20240 - DNA, 369 bp, Escherichia coli
atgcattgggtatacaaaattaatgcacgtttattttatttaaatggtagctatcagttcaatgccagatattctggcagaccgggttttaaagatgactctgttaatgagtgtgtaagagataagggaccattgccaagaggtacatatacaattggacctgcattttttcatgccagaacaagagcatggacgatgaggctcacgccttaccccgaaaatcaaatgtgcgggcatgacggtttcatgatacacggagagagttcagcccatccaggagaagcctctgatggctgtataattctggatttaccttatcgcaaggttattgctgccagtactgataaaatattagtggttgaggactaa

SEQ ID NO: 20241 - DNA, 444 bp, Escherichia coli
atgttcaaggtaataatctgcctgttagctggcatacctgcaatttcatatgcacaaaatgatagttgcgctacggttggagcctcaatagagttgtcgttatttgatgcaatgaaaagtgatttgaatataaattcttctactattttaagagataaaacaagggtagacgttcttgatgtttctcctgtgtctaagttttatgcagagtctctggctaagattgattatgagaaggacaaagccagaaataagaaggcaatgttagatgaaaaatcgtattttgatagctactatgaaaatcatgccaagtctattgtggcaaaatatacctatattaacaatgacagagggaaagatgtttttattgcatccggcattattaatgaaaatgagtgttccgtaagattcaatggctatattattctatccagagaattttga

SEQ ID NO: 20242 - DNA, 735 bp, Escherichia coli
atgggtgactctcatgatgaagctattcagcaggcatacgatgcttatgacgacttaatgctggataaacgatatatcagggacaatgatgcctggggagatttaagaattgaccgtgaaaatggtgcaatctcattgttgctgagatggaaatataattggataaaaagatgggatgcaaaaactgactggacagatttggagaaaaatgcctttcatgggaaagttatttttgtcattaatcaaacatggaataataagatttttttatccgtttctgggaagtctgagtttgccagtaagtttaatggtaaggatttatctttctcaatagaaataattcagactgatcgtcatgggtattgggatgtggtggtgtttaaaattgataatgatgatccaaatagttttcgacagagttccattgtctggaatagtcgatacgttgaacttgactctaaagatatagttgcagcagctaaatgtcttggctcatcaaaagtttgccatgagcaaatagggctgtctcacgagcttgggcatattattggatatcttgctgatgaatactatagtgatgatgcagataaagcaactacaccattctccggggacgccagtgcgttaatgaatattggtatggaactgcgctctcgttatatgagaaatgtcattgagcggttaaatagaatggttccgggttctaatttttttgtgaaaagcgtaaaaaaatga

SEQ ID NO: 20243 - DNA, 372 bp, Escherichia coli
atgaaactaatatacgctgtgataatttttttgatagtgggtggggcgaaaaatagcatgtctgatattcctgggcatgcttatctgaatgcgagtggtgtgtataatggagttgaagagaatgttctattaaataactatggtcagccagcgtatgaatttataaagcctcgttataaatttgtcggtgagtattatatagaaattgaaaacacctatcgctcaacgaatactgaattcagaaatattcccatcaaagaaatgttttggcatttgcggggggatttaaatctgacatgtttttttcattataaagatggacagtggcgggttatttcttattttttctggcagccgggcgctaaattctaa

SEQ ID NO: 20244 - DNA, 2214 bp, Escherichia coli
atgagttttgtatctacgggtaataaaccagttggaaacggtggacccgtcatcaccacaccaccaatagctggcgaaagtggcagtatgagcacaggttcagccgtaaccgatgtatctggtgccgccgaggagatggcagaacaggccgcggcggacctgtttggtgcgttgccggaaccgtcaggtctggttaaagccgcagtaactgctgcgcaagctgccgctgctgcagcagggatctcggatatggctagtacagttcaggatgcggcgtcgtcgcttgcagccggtggtccgggggcgcataacgtcacagtaagtggtagcgcggtgccgccgcagttgcttttgtttgcaggcatgaatggttcggaaggacttgggaatctgttttcctacacagtacagcttaaaacgccggacatcctgaacctgggttacgtttctcccgctgccaacctgccgcttcagcccatggtgggcaaagacctgtgcgtcagtatcgaactggacggtggcgaaaaacggtatatcagcgggctggtgacggcggcgagggtggtcggccatgagggccgttcggtaacgtatgaattacgcattgagccatggctgaagctgctgacccataccagcgactacaaagcattccagaataaaaccgtggtggatattctcgatgaagtactggatgaatattcctttccggtggaaaagcggctggtggaaaattatccgccccgcacctggcaggtgcagtacggtgaaacggattttgatttcatccagcgcctgatgcaggagtggggaatttactggtggtttgagcacagcgagaacagccatatgctggtgctggcggatgccatcaatggtcataaagcgtgccctgactcgccactggtggagtggcaccaggaagggctgaaactggacaaggaatttatccacaccattacggccagtgagaggctacgtactggaaagtgggtgatggacgattttgattttatgaagcctcgttcgctgcttaaaagtaccgtggctagtccgcgtgataccggtcatgctgaatacgagcattatgaatggcctggtgattacttcactacgggcgaaggtgagatgctgacgcgcattcgtatggaagcgcagcgcagccccggcagccgggttggcggggcggggaatatccgcaccctcatgacgggttacacttttacgctgatgaatcatccaacggcagaaatcaatcaggaatacctgctggtacagaccacgctatttttacgggataacgcgcagcacagcggccaggatcagcattttacctatgtcaccacgtttgaactgcatcccacctgcgaagtctaccgcccgcagcgaacgctgagcaaaccccacactaaaggcccgcagagcgccatcgtcaccggcccggcggggcaggaaatctggacggataaatatggccgggtgaaggtgcagtttggctgggatcgctacggaaagaatgacgaaaacagctcctgctggatccgagtgagctacccgtgggcagggaaaggattcggcatgatccagatcccgcgtattggtcaggaagtgctggtggatttcaaaaacggcgacccggatttacccatcatcgtggggcgcacctataaccaggacaccatgccgccctgggggctgccgggcatggcgtcgcagagtgggatattcagccactcattgcagggagggccgactaacggaaacatgctgcgcttcgatgacaaaacgggtgcggaagaggtgaagttccatgcggaaaaagacctgaataccacggtaaaaaacaatgaaacccacacgatcatggtcgatcgcacaaaaaccattgtcaaaaatgaaaccatcagcgtgggagaagatcgcaatgccaccatcacaaaaaatgatggtctttccgtcaaactagctcaaaccatcaatgtcgggacgacctatcgtctggatgttggcgatcaattaactcttcgctgcggcaatgcagcgcttgtattacacaaggatggctcgattgagttttgtggaaaacaacttttacttcacaccagcgatgttatgcaactcattggcagtggcattgatatgaatccagatggcggcacagccatgactgcggatgatattgccccgttacctaccccggacgtttctgaataa

SEQ ID NO: 20245 - DNA, 4107 bp, Escherichia coli
atgtatgaagccgcacgggtggatgatcccatctaccacaccagcgcccttgccgggtttttgataggggccatcataggtatcgccattattgccgtcgccagctttgctttttttacctgcggctttttggccgggctgattttgagttttctggctgatcagatagcttccggagtcctgcaactgggagaagctatcgggcgttcgatacattccacagtgggaaaaattctgaccggttctgataatgtcagcaccaacagccgcccggccgcccgcgccgtactgagtacggtgatatgtgaagaccattccccggaaatccgcattgcccagggttccggcaatatctacatcaacagccagcccgccgcccgaaaggatgaccacaccgaatgtgatgcggtgattgaggacggctctcccaacgtctttctcggcggtggtacgcagacggtgctggagatcagcccggaaatccctgactggttgcgtcaggtggtggatgtgctgtttgtggttgccggaatggttggcggacttgccggagccgcacgccaggcggcaaagctggggacaaaattcggcaccaaatgtgcggccaaatttattggtggcgaaataaccgggatggccgtttccgaggtcgctatggggttgttcagcaacccagtggatgtcactaccgggcaaaaaatcctgctgccggaaacggacttcaccctgccgggacggctgcccgtcacctgttcgcgcttctatgccagccacctggaaactgaaggattactgggcagaggatggcggctgaactgggagataaacctgcgtgaggataaaacatttatcaccttcatcggtgtacagggacgggaactgagttatccgaaagcaatgctgacgccgggccaccagatattcgatccggaagagcaattttatctgagccgcctgcatgacgggcgctatgtgctgcattacaccgaccgcagctactacgtgtttgatgagtttgatgaccacggcgtcgcaccgttactttttatggaaacaccgtaccggcagcgaattgctttcgggcgtgagaacggcaggctggtgcgggtagcctccagcagcggacaccatctgttattgcaccgcacgatgacgccagcgggggaacgcctgtcgcatattgaacttgtgaagggcgggcgtcccggcaacctggtggaatatcgttacgacgataacgggcaactgaccagcgtggtgaacggggcaggtatgacggtacgccagtttgcctgggaaaatggcctgatgacagagcaccgcaacgcgacgggctttacctgtacctaccgctgggaagagattgaaggtttcccccgcgtggtggaacacacgaccagcgacggcgagcattaccgctttcagtacgattttgcgggcgggcagacggtggtaaccggcaggccggagcagaagtggcagtggtggtttgatgaagagacgtatgtgaccgcgcaccggacgccgggcggcggactgtaccgcttcacgtacaacgaaaaccatttcccggtcgccgtggaactccccggcgaacgcagggtaacgctggaatacgacactctgagccgggtggtgaaagagacggacgcggcagggcgggtgacacagacgcagtggaacggcagttttgatgaaatcacacgccgggcgctggatgacgaccacgtatggaaggcggattacaacgaacacggccaggtaatacgggagacggacccggaagggcgcatcacgcgctacgggtatgatgaacaggggctgacggtcagtcgcacggatgcgcggggcggaacggttgcgctggcgcacgatgcgcgcggtcagctgacgcgttacaccgactgttcagggcgcgccacgggctatgactacgatgaggatggcaacctgacggcggtgacggacgcggaagggaaaacggtacgcatcagctataaccgtctggggctgccggagacggtcagccaccccggtaaacagcaggaccgttacacctggaacgcgctggggttactgagcagccaccgccgcatcacgggcagcgtgcagtcctggcagtatacgccgcgcgggctgctggcgctccacgtagatgaagagaaacgggagacgcgctggcattataccgcggagggatggattgccagtctgagcaacggcaacggagcgctttaccggttcagtcacgatgcggacggacggctgacgggagaacagcgcccggacggtctgatacggatgtttgtgctgaatgcgggcgggttcccggtcatcatccagacgcagggtacagaaggcggggtgcgtaatgagcggcaggagcgtgatgcgctgggccgcctgctgcgcagtgacacgcagcacagtacacggaccttcagctacaaccgtcttgaccagataacggaagtgacgctcaccccgacgaaagaaggggaacggctgcaccacatgcaggcggacagggtgcgttttgcgtatgaccgcagcgggtggctgacggcggagtacagcatgcatggcagcatcagataccggcgtgacgcgctgggtaactccaccgatatcaccttaccggacgggcagcacctcagccatctttactacggcagcgggcatctgctccagacggcactggacggtatcacggtcagtgaatatgagcgtgacagtctgcaccgtcaggtgatacgcacgcagggagcgctgacgaccttcagcggctacaacgccgataaccggttaagctggcagcgcagcctgataaacgacagccattcccggcaacagagccatcccccggtgcagaacgacagcgtgacggcgcgggattatatctggaacgcagacggtgaagtcggcggcatcaatgacaaactgcgcggttgcctggtgttcagctatgaccgcagcggctggctgaccagccgcacgggtcagatgtacgaccatgaccattattattacgacaaagcgggcaacctgctgacggatgaatatcagggagcggtgccggataaccgcctgccgggctacgggcgtgaccgttaccgctataacgaatggggcgaagtgacagagcgcagagaccagcaactggagtggaacgcgcagggccagttaacgcgggtcatcagcagcaacagcgagacgcggtatcagtatgatgcgctgggcaggcgtatcagcaaggcgacatatggccgccatacggaccggggagaacgaagccggacgacgtttgtgtgggaagggttccggctgttgcaggagacaacgtggcagggaaagcggacgtatctgtacgacgcggaacagccgtacacgccggtggcagccatcacggggcgcggagagagtcaaaaaatctggtattaccacacggacctgacgggcacggtacaggaggtgaccgcggcgaacgggacgctggtgtgggcgggctaccaggcgggatttggcgaaaaccggggcgacatcagcaacagcggggcgtactttgaacagccgctgcgactgccggggcagtattatgatgaagagacggggctgcactataatctgttcagatattatgcgccggagtgcgggaggttcgtcagccaggatccgatttcgatccgtggcgggctgaatctttacaggtatgcacctaatcctttaagttggtttgatcctcttggtttaagtaaaactcaagatatggttaatgatgcccatagccagttggatgtgggttctcaatcaagaaaaacaacagcaataggcgtcgattctgatgggaattatcatatagcatcaaataatgatacagtgccaagatctcaacgtgtttgggcagaaaataatggtgttaatgttgtgaacggtgttggtcatgcagaggaaaccataatgaataatgtatctaatattgaacatatagatgcttccaggccggtttgcattgattgtgaaaatatgatgaaaagcaaaggagtgacaacagacacctcaatgtctggtaaaaaaagtagaaatcgtatggggtcaggagattgctaa

SEQ ID NO: 20246 - DNA, 543 bp, Escherichia coli
atggttagtatattaaatgaatatggggaagatttcttaaaaaaggtggttgatttctctccagaaaaaaagttaatgcttgggttaatctatattaacagacaaaagaatcttgttttgttatttgataagatttatcacactaaactacatgattttttttgtgattatatacagtatgggattgatattatagttgaaggtaagtctattattattgatacaaatgagatatattctataatacctgatgcagatgattattcagaaaaagaatgctcttatgttcaaaatgctttattgtctctgtattatttgttcgagttttacataacgaaagagattgatttttttcagcaatcattagacatggtgttggaaaatgtagatgtgatttcttatggcaaagataaggtatatgatgagagaaaagttttctcgcatgaagttcaggttttaacggatatttctgataaagtgaatttatattgggggaatttgcatgatttagtttggaatgaagatgaattatctccattatga

SEQ ID NO: 20247 - DNA, 4248 bp, Escherichia coli
atgtcacgttataaaacaggtcataaacaaccacgatttcgttattcagttctggcccgctgcgtggcgtggacaaatatctctgttcaggttctttttccactcgctgtcacctttaccccagtaatggcggcacgtgcgcagcatgcggttcagccacggttgagcatgggaaatactacggtaactgctgataataacgtggagaaaaatgtcgcgtcgtttgccgcaaatgccgggacatttttaagcagtcagccagatagcgatgcgacacgtaactttattaccggaatggccaccgctaaagctaaccaggaaattcaggagtggctcgggaaatacggtactgcgcgcgtcaaactgaatgtcgataaaaatttctcgctgaaggactcttcgctggaaatgctttatccgatttatgatacaccgacaaatatgttgttcactcagggggcaatacatcgtaccgacgatcgtactcagtcaaatattggttttggctggcgtcatttttcagaaaatgactggatggcgggggtgaatacttttatcgatcatgatttatcccgtagtcatacccgcattggtgttggtgcggaatactggcgtgattatttgaaactgagcgccaatggttatatccgggcttctggctggaaaacatcgccggatgttgaggattatcaggaacgcccggcgaatggctgggatattcgtgctgagggctatttacctgcctggccgcagcttggcgcaagcctgatgtatgaacagtattatggcgatgaagtcgggctgtttggtaaagataaacgccagaaagatccacatgcgattaccgctgaagtgaattacacgccagtgcctcttctgaccctgagtgccgggcataagcagggcaagagtggtgagaatgacactcgctttggcctggaagttaattatcggattggcgaacctctggaaaaacaactcgatacagacagcattcgcgagcgtcgaatgctggcaggcagccgctatgacctggttgagcgtaataacaatatcgttcttgagtatcgcaaatctgaagtgatccgtattgctctgcctgagcgtattgaaggcaagggcggccagacggtttccctggggcttgtggtcagcaaagcaactcacggtctgaaaaatgtgcaatgggaagcgccgtctttgctggccgcaggcggaaaaattacggggcagggcaatcagtggcaagtgacgctcccggcttatcaggcaggcaaagacaattattatgcgatttcagcgattgcctacgataacaaaggcaatgcctcgaaacgtgtgcagacagaagtggttattagcggagctggtatgagcgccgatcgtacggcgttaacgcttgacggtcagagccgtattcaaatgcttgctaacggtaatgagcaaaagccgttggtgctgtctctgcgcgacgccgaggggcagccagtcacgggcatgaaagatcagatcaagactgaactaaccttcaaaccggctggaaatattgtgactcgtaccctgaaggccactaaatcacaggcaaagccaacactgggtgagttcaccgaaactgaagcaggggtgtatcagtctgtctttactaccggaacgcagtcaggtgaggcaacgattactgttagcgttgatgacatgagcaaaactgtcactgcagaactgcgggccacgatgatggatgtggcaaactccaccctgagcgctaacgagccgtcaggtgatgtggttgctgatggtcagcaagcctacacgctgacactgacagcggtggactccgagggtaatccggtgacgggagaagccagccgcctgcgacttgttccgcaagacactaatggtgtaaccgttggtgccatttcggaaataaaaccaggggtttacagcgccacggtttcttcgacccgtgccggaaacgttgttgtgcgtgccttcagcgagcagtatcagctgggcacattacaacaaacgctgaagtttgttgccgggccgcttgatgcagcacattcgtccatcacactgaatcctgataaaccggtggttggcggtacagttacggcaatctggacggcaaaagatgctaatgacaaccctgtaactggtctcaatccggatgcaccgtcattatcgggcgcagctgctgctggttctacggcatcaggctggacggataatggcgacgggacctggactgcgcagatttctctcggcactacggcgggtgaattagaggttatgccgaagctaaatggacaggatgcggcagcgaatgcggctaaagtgaccgtggtggctgatgcgttatcttcaaaccagtcgaaagtctctgtcgcagaagatcacgtaaaagccggcgaaagcacaaccgtgacgctggtggcgaaagatgcgcatggcaacgctatcagtggtcttgcgttgtcggcaagcctgacgggtgctgcgtctgaaggggcgactgtttcttgttggaccgaaaaaggtgatggttcctatgtcgctacgctgacaacaggtggaaagacgggtgagcttctcgtcatgccgctattcaacggccagccagcagccaccgaagccgcgcagttgacggtcatcgccggagagatgtcatcagcgaactctacgcttgttgcggacaataaggctccgaccgtcaaaacgacgacggaactcaccttcaccgtgaaggatgcgtacgggaacacggtcaccgggctgaagccagatgcaccagtgtttagcggtgccgccagcacggggagtgagcgtccttcagcaggaaactggacagagaaaggtaatggggtctacgtgtcgaccttaacgctgggatctgccgcgggtcagttgtctgtgatgccgcgagtgaacggccaaaatgccgttgctcagccactggtgctgaatgttgcaggtgacgcatctaaggctgagattcgtgatatgacagtgaaggttaataaccaactggctaatggacagtctgctaaccagataaccctgaccgtcgtggacagctatggtaacccgttgcaggggcaagaagttacgctgactttaccgcagggtgtgaccagcaagacggggaatacagtaacaaccaatgcggcagggaaagtggacattgagcttatgtcaacggttgcaggggaacttgagatcgaggcctcggtgaaaaactctcagaagacggtcaaggtgaaattcaaggcggatttcagtaccggtcaggcgagcctggaggtagacgccgctgctcaaaaagtggcaaacggcaaagatgcctttacgctgacggcaacggttaaggatcaatacggcaaccttcttcctggcgctgtggtcgtctttaatctgcctcggggcgtcaaaccgcttgcagacggtaatatcatggtgaacgccgacaaggagggtaaagcggaactgaaagtggtttccgtgactgccggaacctatgagatcacggcgtcagcaggaaatgaccagccttcgaatgcgcagtctgtaacgtttgtggccgataacactacggcgaccatctccagtattgaggtgattggcaaccgtgcagtggcggacggcaaaaccaaacagacgtataaagttacggtgactgatgccaataacaacctgctgaaagatagcgaagtgacgctgactgccagcccggaaaatttagttctgactcccaatgggacggcgacaacgaatgagcaagggcaggctattttcaccgccacgaccactgtcgcagcgacatatacactcacggcgaaagtggaacaggccgacggtcaggaatcgacgaaaactgccgaatctaaattcgtcgcggatgataaaaacgcggagctcgccgcaacatctgatgtgcattctctggtggcggatggggtaacgacagcaacactgacggtaaccctgttctcggcaaacaacccggtaggaggaaccatgtgggtcgacattgaggctccggaaggggtgacagaggcggattatcagttcctgccgtcgaaaaatgaccatttcgcgagcgggaaaatcacgcgtacatttagtaccaacaagccaggtacatacacattcacattcaactctttgacatatggagggtatgaaatgaaaccagtgactgtgacaattaacgccgttcctgcagatactgaaggcgctgaggagaaataa

SEQ ID NO: 20248 - DNA, 174 bp, Escherichia coli
gtgattcttaagctgagtggcattacacttgtggtttatcagcgtatccatagcaccatcatccgccagattgagcgaatcggcttaaagtttgatggcgggactgcggatatgaagcatgagagttacctcagtgttttatataaggattcggtcctcatagtagaacggtaa

SEQ ID NO: 20249 - DNA, 219 bp, Escherichia coli
atgtggcgttacaactggatgaacagcgatagggtaaaaatagtaaatgccgggaaatatgctcgtcttaattcaagttgcatgtacggcgactcgaattattcagcgtatactttacccggctggcagaatggcaatatgcaaaattatttacgtgtcagcttttctaaatctgcttctatctcgctgattttattggtcaccactgactccaggtga

SEQ ID NO: 20250 - DNA, 1518 bp, Escherichia coli
atggcacagattgatttccgaaaaaaaataaactggcatcgtcgttaccgttcaccgcagggcgttaaaaccgaacatgagatcctacggatcttcgagagcgatcgcgggcgtatcatcaactctccggcaattcgtcgtctgcaacaaaaaacccaggtttttccactggagcgcaatgccgccgtgcgcacgcgtcttacccactcgatggaagtccagcaggtggggcgctacatcgccaaagaaattttaagccgtctgaaagagcttaaattactggaagcatacggcctggatgaactgaccggcccctttgaaagcattgttgagatgtcatgccttatgcacgatatcggcaatccgccgtttggtcattttggcgaagcggcgataaatgactggtttcgccagcgtttgcacccggaagatgccgaaagccagcctctgactgacgatcgctgcagcgtggcagcactacgtttacgggacggggaagaaccgcttaacgagctgcggcgcaaaatacgtcaggacttatgtcattttgaggggaatgcacaaggcattcgtctggtgcatacattgatgcggatgaatctcacctgggcacaggttggcggtattttaaaatatactcgtccggcgtggtggcgtggtgaaacgcctgagacacatcactatttaatgaaaaagccgggttattatctttctgaggaagcctatattgcccggttgcgtaaagaacttaatttggcgctttacagtcgttttccattaacgtggattatggaagctgccgacgacatctcctattgtgtggcagaccttgaagatgcggtagagaaaagaatatttaccgttgagcagctttatcatcatttgcacgaagcgtggggccagcatgagaaaggttcgctctattcgctggtggttgaaaatgcctgggaaaaatcacgctcaaatagtttaagccgcagtacggaagatcagttttttatgtatttacgggtaaacaccctaaataaactggtaccctacgcggcacaacgatttattgataatctgcctgcgattttcgccggaacgtttaatcatgcattattggaagatgccagcgaatgcagtgatcttctaaagctatataaaaatgtcgctgtaaaacatgtatttagccatccagatgtcgagcagcttgaattgcagggctatcgggtcattagcggattattagagatttatcgccctttattaagcctgtcgttatcagactttactgaactggtagaaaaagaacgggtgaaacgtttccctattgaatcgcgcttattcaacaaactctcgacgcgccatcggctggcctatgtcgaggctgtcagtaaattaccgtcagattctcctgagtttccgctatgggaatattattaccgttgccgcctgctgcaggattatatcagcggtatgaccgacctctatgcgtgggatgaataccgacgtctgatggccgtagaacaataa

SEQ ID NO: 20251 - DNA, 489 bp, Escherichia coli
atgagtgagatagtgatacgccacgcagaaacacgggattacgaggccatcaggcagattcacgcccagccggaggtgtattgcaacacactacaactacctcatccttcagaaggctggtggccagaaagattgaaagatcgccaggggtttaaacaactggttgccagcattgatggcatcgtggtgggtcatcttttcattgaggcttatcaaggcccacgccgtagtcatgttgcaacttttggtatctgtgttgactcccgctggcacaaccgcggcgtcgccagcgccctgatccgcgaattgattgaaatgtgcgacaactggttacggatagatcgtattgagttgacggtgtttgcagataacgccccggcaatcgcagtctataaaaaattcggctttcacatagaaggcaccggcaaaaattacgcttttcgtaatggtgaatatgtcgatgcatattatatggcgcgggtgaaataa

SEQ ID NO: 20252 - DNA, 228 bp, Escherichia coli
atggaaactactgtatttttaagtaatcgcagtcaggccgtcagattaccgaaagcggtcgctctgccagaggacgttaagaaagtagaaattattgcgattggtcgtacaagaatcatcactcccgccggtgagtcctgggacagttggtttgatggcgaaaatgtgagtgcggattttatggatatccgtgatcaacccgcaatgcaggaaagggaatcattctga

SEQ ID NO: 20253 - DNA, 399 bp, Escherichia coli
atgctgaaattcatgctggataccaacatctgtattttcactattaagaataaaccagtacatgtcagagagcggtttaacctgaattctggccggatgtgtataagttctgtaacattgatggagcttatctatggggcagaaaaaagtcagatgccagaacgcaatttggcggtgattgaaggtttcgtatctcgtttggaagtgcttgattatgatagtgctgctgcgacgcatactgggcaaatcagggccgagcttgcccggcagggaaggcctgttggaccttttgaccagatgatagcgggacatgctcgcagtcgcggtttgattgtggtaaccaacaatacccgagagtttgagcgagtggcgggaatcagactagaagactggagctaa

SEQ ID NO: 20254 - DNA, 339 bp, Escherichia coli
atgacacacaagagaattcctaaagattgggtaatcaaacgctcaactccgttcttcacaaaagagaacgtaccttcagcgttattaacacatcataatacagcagcaggtgtttttgggcagttgtgcgtaatggaaggcactgtaacatattatggttttgctgatgagaatactactgaaccagagataaaagtagttattaatgctggctcttttgcaacaagcccaccacaatactggcaccgtgttgaactaagcgatgatgctcagtttaatattaacttttgggtcgctccagacttctcaggcgaaaaagtctatagcaccaaaaaatag

SEQ ID NO: 20255 - DNA, 561 bp, Escherichia coli
atgaatggtattccttatttcgactatagcatggcgcccttctggccgtcttatcagaacaaaatcatcggtgttctcaaccgtgcgctgcgtgaacagtcctgctcccgggtacggcggatcctgcttcgcctgccgggggaacatgacaacatcttcagtgacagaaatacctggttaggcatggattttatcgaaaccgtcagtgcgctgatgaatgcaacccccggacgtgatctctgctggctcctgacccgtcatccggaaaagctggaataccacgtggtgctgtgcgtcagacaggagtatttcgacggccctgaactggacaggttgattctggatgcctggagcaacgtactgggcttcgcgtcaccgggtgaagcggcaccgtaccagaaacagataacacgggatgtggtactggatcgccggtcaccggactgcgaagccctgtttaaggaccttatctgggcgttcagtgatttcgcccgcgatcgccgtggagtgtgcgatccagaagcccgttgccttgccggcaatcccggttggcagtgctga

SEQ ID NO: 20256 - DNA, 234 bp, Escherichia coli
atgttgaccacaacaagccacgactgcgtgttgctgcgtgccgacgatcccctgatcgacatgaattacatcactagctttacaggtatgactgacaaatggttttacaagttaattagtgaaggtcattttcctaaacccatcaagctgggccgcagcagccgctggtacaaaagtgaagtggagcagtggatgcagcagcgaattgaggaatcacgaggagcagcagcataa

SEQ ID NO: 20257 - DNA, 168 bp, Escherichia coli
atgcttgattatgcctgcactgtccggcagatagcagttgaactgaaacggcacccagtaagtgtcattaacaagctggtgaagtacctagacgatgacagtatccagaatcgtattactcaagatttttacgatgtccctgtgcgggagctagtgcgatggtggtag

SEQ ID NO: 20258 - DNA, 195 bp, Escherichia coli
atgagtgagcaaataatgaccgtcaaggatgtcgcgtcgtacctcaaactcaacgagcgtactgtctatcgcatggccacagcagcaaagatcccagcgttcaaagtgggcacctcgtggcgttttaagaaagaagagatagatatatggatagcgcagcaacataaccaaatatcaagtaataaagagagctaa

SEQ ID NO: 20259 - DNA, 2682 bp, Escherichia coli
atgctaggactgaagttacgtgaggagttttctggtcgtcgtattaaaggaacgatgatcgaaatgcataaccggaatggcactggtgcgctcgataagtctgcaagtgaatttcttaagatcacttacccttcaatcgacatgctcaagacagtggaagctgtacaagctggtcgggctgagcctgtcgtaattatcggtgcacggggccaaggtaaatcacaccttatggcagcactgtcacatatgcatcaggataaggatgcaacagtaaactggttgaatgattggtctatccgactgaaaaatcctgacattgcaaatctcaaattgcagtatggcatgcatgtcattactgaaagcttgcacttgcaacgctataagcatgtatgggatgttttgttcgaccagcatccgcatggcaatatcattaaagccaagtgggaggtgcacggcaccgaggttccaagttatgacctgatactggaaatggcagagaataaaccattcatccttattctggatgaattccagacgtggtttgaaggcttaacaaactccaaccagtacaaacgtaaggcctgggcctttaacttcattcaaatcctctcggaaatatctgcaaagtacccagaacttctgacacttgtcgtatctgtgcgcgaaggcaactccgacgcagcgcagcaactgttacgtgtgaaccccgtactgattgatttcaaagggccagaagccaaacgagacagacagcgtttgttgctctatcgaatcttcgaaaaccggatgaacattccagagtctgatattgcttcactgataaaaactcatgtggatgaattcctgcgtttgagtcatatctcaggctccgagcatgaaaaacataaacagcaatttatcgaggcatggccttactcgccaagactcctgcaattgctggacgatcaggtgcttatcgcaaccgaaactcaagagacacgcgatctcttgcgtattctggtggatgtgtttaaggaatctggtgacgacacagccatacttacacctgccaacttcagcttaaccagtgaaaaatcaggcgttacctcactactggattcggtagcgagtcagttgcatcgggatttacgtgagaatgcactgcgcaacctcgaagctgttaaaaacggtgtacctgctgctcaggtcccacatcttgagcccattctttccgctctatggctacgttccctatcattggagaatcatgccggtgctgagccgtcagaattgcagttggatattactgagcgaaaagcgattgatgacaacctgtttgccgctgagcttgcagtcatcgaagacaacagcttcaacattcaccgccaagccaaccgtttggtcttcaagaacgaggtgaatccacaggccaagctgttagcacatgctaaaaacgacaagctctttcaaaaggatgaggatatagaacacctcgccaaagagattcgctacgccctagttggggatggcaatcagtcgaatatctatcgaaccattgtcttaaagaagcagtggcgcacttcgccatgggcggatattgaagaaaaagaccatcctcagcattgggataaccggattccagtgattgttatgcccaaggcatcgctggacaacaaagagctgggagaatggctgaagacacatgttgccaagggaagaaacactgtgcgcttcctgctgccacgtgtgggtactggcgacatcttctacgataagtctttgctggtattagcccgtgcggtttatcttgctagcgattggaaaaactccgagcgtgagtacgctcaattgcatctgaaataccagaaggaactgcgtgagcagttgcaatcccgctttgatcgttttgcagtcttggtcgtatggaatttcgcagacccatctcaatgcgaatttgagatttcacagcacggtgcagaagggttacagatcctcgaaaagctgaatgcgaaaatctgcagcgagctgttcattcctgaagaattcgacaccatactgcttgatgccgcgaccaatagccgtagcgtggccgacctgatcgaacaactcaaagagccagccccaaaaggtgcagaaagcattccttggcttggtgaaacagccgttaaagagcgcattgggcgagcctgtgcagaaggcaaaattgccatcaacgccaaaggcagtctgtacgagaaaaagccgtcagaaaccacggaagatgcttggttgcgagtacgtgggaaactgggcagcggtaaagatctggaagacacgacactgcacctgcccggaggctctgttggttcaggcggttctgtccctgttcagcctgttcctggcgtgccagaagaatgcatcaccggtggtgttaacgagccaaccgcaggctcaggcaatggcggcacagcatccggtacgataccaacgccgggatcgctattcggtgcttccagtggcggcttcgttgctcatcacagcgcccagaatacatccacattaagcttgctcggtaagcttgaacaatggggcattaacaaaggcagtaaggtgaaggacgtaaaattgtctacctcgcagctcactggtgcacagttagagcatctgctgaaaaacttaccggatggtgttacttactctcttgatttggataaagaacaataa

SEQ ID NO: 20260 - DNA, 999 bp, Escherichia coli
atggataagtcactgatcgctgatatacatagactgcccgcacaagaagcatggccgaaaattttttcggccctatggctcctgtttgcagaacctatcaggcaggatctggcggatgcaaaaacaaccgaacgggaccgcgccatcaaaccattggatgacgtgttggcaggcagtgcctgggatttgtgggcatcgttcgagagtgcttcgccaaaaacgacagatgctctgaaagcattctggcaacgccagacaacaccgaaagctatcctgattctggatgcactgtcgctccgcgaagcgccctggattctcgaaagtgcgcagcagcgaggctacacagttcactgtgccggtgcgaccgcctccgagctacccggtgataccacaccgtttgcacgggccatggggtttgggcagcgcaccagattgcaaaacaaccaagggaatagtgctgctttccctgaagccttcactgagtccaccgacttgccatgggtggattgtgcatctctgatcaaggctgacccgaatattattttctggcatcactggcctgatgaacgtatgcatcatctggccgaacagggagctggttatcgggtgttggcgaaagaagccgcagccgtattaaccagcgatgaattctgggccttcatcgacaaactagccacgggccgtcgtctggttattactgccgaccatgggtattcaaaccccgcgttatttcctgatgtttacccggaagaccaaaaagcctatctgaaagggcaattcaagtctggccgcaacagcgaagtgaaagacgcaaaaaccgaacagcattgggtaccgccattatctcaggtactaacgacacagcatggcaactggaacattgtgcttggccgcaagaaatggcgttcacaaggcggctacccaagcctagctcacggtgggttgagcttgttagaggtggccgtaccctttatcgaactgtcgaaaccgaataattaa

SEQ ID NO: 20261 - DNA, 3264 bp, Escherichia coli
atggcatctaacaaaacgaaagcagaactgacagaagaattggtggcagaggccgttagtgccggtaaaaaagcacaactggaatcggtcgatttttctgaccccaatcgccccttaacctgccttgaggttgatttcccgattctgccaatcaaccagattgcgcaaatagaaggtaatgcgggcaagccaatctaccaaatgagtaagtggtgggcacgtcgccgctccagcgtgttccgctctatgttgattgcagcagccaccaaagcgcccgatgaaccatccgaatctgccaaattggtttgggataactactacgccaatcaccaagacaaccaagcgttcagaaaattgaaagtggctgacattttcatggggggcggtaccacattggtggaaggtgcacggctcggtatgcagatgacaggcaacgatctcaacccggttgcctggctggttgtaaagaacgaactggctgatgtcgatctggatgaagtgaacaaactgtttgatcacatcgaacgggaggtaaaaccccagatcatgccgttttacgcttgcgaaggccctgatggcgaaaaaggcaaatggacacagcgttctaccggtaaagtcatgggcaatgattttgagccgctggctctgacacctgaagaacgcaaagactacacatacgaaggcccagaagtcatttacaccttctgggctaagcacggcccatgtgcagctcccggatgcggtcaccgcactccattgatgacctctcccatcgtagcggtgaaatccctttcggttaaaacctggcaagatgttgaatgccaacactgtggaacgagctttgatcttgagcgccaggaagcccgtatggctcccgatgttccgctggtcgttagcgattcagaagctccttacgccatcatggatgatactggaaactatcagtgccctcattgccaacacaaatatcgtgatgagatggcagcgcagaagggggagtcttcgcgtttactcaagaagatgagtaaaaataagaaggttgatttatctctgcttgttcatcctgattggctcaaaggttcttcaaaagcagacgaaacaggaatatttggcggcacctcccttagtgaggtggaagcaacgcagcgttggaatctgcacagaacaaagacacttaagctgctggaagtacggggtaaattgcccgaagaaattacctgtcctgattcaggtttggtgataaacactcggcaaggcactattcctaaaaagtctaatttcacctgtcaggaaagcacttgcggtcgtcaacaagatgttctcgacagtattaaagcttctggtcagaccggcccgatggctgcttacgtattacagtgttattcacccagacgtgatgcaacaggtgcaccatacaatggccgctactttgcgccagttgacagcaatgctgccaaaagacaaaatttggcggtctctgagtgggcgcaaaggaaaaattcggatttgcgaggttattggcccgagtcagaattaccatatggatttatgacacaccacttgcaaggcggcgttcctaatcatggttttacgcactggaacaccatgtttaacccgcttcagcttctgattcatgctcaaattctcaaggctattgatacatctcatggcttcagcgacaccagtaaagaaatagttttgggtgcatttcagcagtatctgcgcaatcagaatatgttctgcttttggaataacaatgccgacaaaatggagccgatgtttagtaacaataactatcaccctaaatcgactgtaattgagaattcagtatttgctaatttagggagaggaaattgggcatcatgcagagcaaacactctcaaggggctagggtggtgcaagcagccatgggaaactgtatcgaacgagatgctgagcaatatatccgctgacattggcaaattggtcaacgggaaaagctcaaaagccatgccaaacgacccagtgttgccaggaaccttagtgacatgcggctcatcgacggaattaaaacagtatgccgatcagtcgtatgatctcgtcattaccgatccaccatttggtggtttgctgcactacgccgagttagcggatttcttctacgtatggctacgtctgctgctgaaggataaatacccagaggtttatgctggggaatacacaccaaagacgctggaagctgtttctaacaaagcacgccatccagatgatccagatgcgttttataagcgcctgctgaccgaatgttggcgggaggcgaatcgcttgctgaaaccagggggcattttggcatttaccttccatcacagcgaagacgagccttggttggacgtattagagagcttatttgacgcaggttactacctagaagcaacgtatcctattcgcagtgatgaaactaaaggaaagggcgagtttggttccaagaccattgaatacgacattattcatgtatgccgtaagcgtactgaagcgcccagtaaaatcagttgggctcgcttgcgtcgcaagattcttgcagatgtgcgtcagttgcaagagttgttggaacatcaccagtcaaaaggtttgccagtagcagatattcaggtcatcaagcgcggtaaggctttagaatatttctcacgccactatggccaagtatatgttgaggaaggccgcgaattcacggttaacgaggcgttggtagggattaaccaaattctggatgaccaatcagaatcagaatcgggtggaaccccggtggtgtgtgagccaaacacacgccaatttctgcgtattttttcacgcaaaccttctgtcgagcgcgatcagatgcagaaattcctgcgaggtagcggcatagcaccatcgacttttatcgctttgggctgggctaccgaaaccacacgaccaaaggcttttcattggcgatctccgctagaaattgcgcaagagcaaatggccagcagtcgcaacgtgagccgcgactttgatcaggccatgttgcttgtgggggcctgttatccggaaagcggtatcaataccaagaaaattctggatgataactttaagcctcacccggcattaggtcatctattagattggcttgttcacaacggagccgacttatctatgcgcagtgcctgcactttggcaaggcaattgtttaatagatgggaagcagatcatcagcaggttatgcaggaacaaatatcattgtttggtatggaagatgaaatatga

SEQ ID NO: 20262 - DNA, 507 bp, Escherichia coli
atgaacgatgtgctgaccaacgacaaatggaagcgacgcggtatctcagtgctttggtgtggcaaaacactggctgaattaaatgctgcaagtcaggtgatcagtctgcgtcagttcatcggctattacgaagcgggctggccggacgatatgcctctgctgaatgacgatggcttatacgtcgcagggttggacgtagccgtagacgctttatcaccagaagatgcactggaatggctggaatccgagatttacgaaatgatctacgactttcagaaccatgccgatgccgcgttgattttttggatgccggatcagggacgctggaaggaagatctgaccactggtacctacaactggtgcttggctggtaaatacgatgcgcaaattttcccgttggggcaatgtatctggaacggcgcacaaaaggacgtgcgccggattgaatccgcttttagcggaaaaacgaacgaatggctgggtttatacctagagcggatcagctaa

SEQ ID NO: 20263 - DNA, 2724 bp, Escherichia coli
atgacttttaaacccggtgaacgcgtcagccattttgaatttggccaaggcgttgttatctcggcagcgggtggctacgcccgtgtcttctttccccaaggtgaacgacaagtacccgtcagcaccttggtggcggcacttagccataatgagcgcgtggtagccagcattggcagccatacagatagtgacacgaaagcctggctctcctggaaggcgcatgaattaccccttcaggattcagccagctcgctgacttcagccaagattgatttgctaccccaccaggtggtgctgactcatcgggttgcctgcgcgagcccacgccgctttctgattgccgatgaagtgggtttggggaaaaccattgaaacagcattagtgttgcgggaattggccagtcgtggcgagcttaaccgggctttaatggttgtgccggcaggtctggttaacaactggcaccgcgaactgaatgaagttttcaatttgaattttgaagtattcggccgcgaaggtgatgtgagcgaccgccgcagtaatgcgtttgctaaacataacctgctgattgccagcatcgacaccttaaagcgtccagcaagaatcaagaaaatactcgaagccccccgttgggatttgattgtttttgatgaagcgcatcactgcactgcctataagcaaggtggcaaaacccgcaagacccagaactacaaattagcggaagccttacgtgaccacagtagggatatgattctgctgtcggccacgccacaccagggcgatcattttcgtttctggaagctaattgatttgcttgaccccactttgttttccagtgaaacagagatggtggaagaacgtcaccgcctgaatccaatcatcttccgccgcaccaaagccgacgcctgtaaagccgatggctccacgttgtttgctaggcgctgggtgcataccgaagccttttcaatgtcagatcaggagcgcgatttctataacgccttgaatgaatacctgcgcgacggttttgctctggcgaagaagcaaggcggcaaaggaacggctctgggctttgtaatgacgatctttcaaaagattgcggcgtccagctttgcggcggtgcatcgtaccttgagacgaaggctgttggccctaactgttcatgagggcttgatgcacgatgaaaacctcgacatcgacgccagagactttgcttttaatgaggcgaaagaacagattcgcattgagttcgatttaggtcatgaccgtctttctgaccttgagatcgaccgtatattgaatgacatcaagcgtcgcctccttaaaaagatcaatgaagagcagttggccactgcatccgatacgtttaccgatgagctggaaacagccgccgctgaagatgcagccatggatgctgtggcatacgccctgccagaagagcgattccgcattaaagaactactggggctgttcccttcagcccgtgaaactaaagtagataagctcattggagctttgggtgtgctgtggcaacaaaacccagaggaacgtattgtgatatttgccacctatctgggtacggttgaaatgctgggtgaccagattgaaaaagcgtatccaggccaaggtgtggttgtgcttaaaggtggtgatcacggaagtaaactcgcggcagagcggcgcttcaaacaggctaatggccctcgcgtaatgatctgtacagcagccggtcgggaaggtatcaacctgcaacatgcacgggtgctgtttaactttgacctgccgtggaatccaatggatatggaacagcgcattggtcgtattcaccgctatggacagcgagatacagcgcaagtttataaccttgtgttgggtgacaccattgaaggtcgcattttcctgctactggatgaaaaactggaggagattgccaaggcgcttggcaaagtggatgaaaagggccaagtggaagaagaccttcgatctcaaattctaggccaattatctgagcaggtgaactatcagcaactttattcgcaggcactgcaagacccagagcttaaacggacccggctggagcttgaaacggctatggataatgcccgtcatgctaaggatgcagtattcgaactattccaggacctagatggcttcagtttagatgactacgcatcactctcagatacaagggaatccatagacgatctgatccggtttatgcagaaggctttgccatacgaaggggaagccattgagattcgcggacaaaagcaatgggccctggtaaaagatggtctcgaacaaatgctgtttaccactgttcgagaaaacgcgaccaattcagaaaaattgcatttgattggtttggatcatcctgtgattgcaaaacagctcgataaataccgcaatcttgatcctgaataccttggtttctattctagtgagctgaatgctggtgaaaccgtttctttatgggaagtaagggctgccaacgaaaaaggacacaatgttcactccatcatgaaacttgctgtcgattgcgatggtaaccggctacctcatttagaaaagcaaatagacgcagtgtttaaacctaagggaaataaaggcgatcacgaagtagatttgcataaaattgaagccgtcttggagcgtgaacttcatcaccggaatatcgtgaaacctgagcagtctttctctgccaagctgatctgcttagcgtgtggttga

SEQ ID NO: 20264 - DNA, 363 bp, Escherichia coli
atggtgctacatgcttacaattatcagtgcgctatctgcggctttaacatgcgccacgacaatgcgccgattgctctggaagctgctcatatcagatggaaacagcaccatggcccttgtgaagtacctaatggcctggcattgtgcacaatccatcataaagcgtttgatcgcggttcgattgacctggatgaaaatatgcgtgtagtggtttccggtgcggtaaatggtggtggagtggtacagcgactgttctgggattttgcggtaaaagcgattgcgttgccaccggttaaagaaaattatccgggcgaacagtttgtggaatggcagagaaaagaggtgttcagaggagaacattga

SEQ ID NO: 20265 - DNA, 741 bp, Escherichia coli
atgaataaggtttttgttgtttcagtggtggccgcagcctgtgtatttgcagtaaatgcaggagcaaaggaaggtaaaagcggtttttatctgaccggtaaagccggtgcctctgtggtgtcactttcagaccagcgtttcctgtcaggagatgaggaagaaacatcaaagtataaaggcggcgatgaccatgatacggtattcagtggcggtattgcggccggttatgatttttatccgcagttcagtattccggttcgtacagaactggagttttacgctcgtggaaaagctgattcgaagtataacgtagataaagacagctggtcaggtggttactggcgtgatgacctgaagaatgaggtgtcagtcaacacactaatgctgaatgcgtactatgacttccggaatgacagcgcattcacaccatggatatctgcagggattggctacgccagaattcaccagaaaacaaccggtatcagtacctgggattatgagtacggaagcagtggtcgcgaatcgttgtcacgttcaggctctgctgacaacttcgcatggagccttggcgcgggtgtccgctataacgtaaccccggatatcgctctggacctcagctatcgctatcttgatgcaggtgacagcagtgtgagttacaaggacgagtggggcgataaatataagtcagaagttgatgttaaaagtcatgacatcatgcttggtgtgacttataacttctga

SEQ ID NO: 20266 - DNA, 2658 bp, Escherichia coli
gtgactttcttttatttctggggaaaaacccgacgcggcgagaaagacgggggcgaagactatcaccttctttgctggcattcgctggatgtagccgcgatgggctatttaatggttaaaagcaattgcttcggactggctggctattttcgtcaattaggtttcgctgacacggagctggcagcacaatttttcgcctggctgctgtgctggcacgatattggaaaatttgcccgctcttttcagcaactttacctgcacccacaactcaaggttccggaaggcgcaagaaagaattacgaaaagatctctcattcaacgctgggctactggttgtggaaccattatttaagtgaatgtcaggagttgcttccttcatcttcactctctccgcgcaaacttaaacgggtgatggagatgtggatgcccatgactaccgggcatcatggtcgaccccctgagcgtatggatgaactggataattttctgcctgaagacaaaggtgccgcacgagattttctccttgcaatcaaggtactgtttccgctcatagagatccccacattctgggatgatgacgagggcgttgaacttataaaacaactttcctggtatatctctgcaaccgtcgtacttgcagactggacgggatcgtcaacgcgatattttccacgcgttgcacaggcaatggatattgaagattactggcagaaaactttagttcaggctcaaaacgccttaaccgtctttcctccaaaagcagaaagcgcgcctttcaccggaattaatacgctgtttccttttattgagaatccgacaccgctacagcaaaaggtgctggatctggatatcagccagccgggaccacagttatttattctggaggatgtaaccggcgcaggtaaaacagaagcggcgcttatcctggcgcacaggttgatggctgcggggaaagcgcagggtttgttttttggcctgccaacaatggcaacggccaatgccatgtacgatcgactggtcaaaacctggcttgctttctattcgccagagtcccgccccagcctggtgctggcacacagtgcccgaacattaatggaccgctttaatgaatcactctggtccggtgatttagtcgggtcagaagaaccggatgaacaaacgttcagtcagggatgtgcggcctggtttgccgacagtaacaagaaggcgctactggctgaaattggcgtcggcacgctggatcaggcgatgatggctgtgatgccgttcaaacataataatctgcggcttctgggactgagtaacaaaatcctgctggctgatgagatccatgcctgtgacgcttacatgtcatgcattcttgaagggctgatcgagcggcaggcgcgtggcggaaacagcgtcattttgctttctgccacgttatctcaacagcagcgcgacaaactcgtcgccgcctttgcgcgtggtatagagggccagcaagaagctccgttgctggaaaaggatgattacccctggctgacgcacgttacgaaatccgatgtgcattcacaccgggtagcgacgcgcaaagacgttgagcgcagcgtgagtgtgggttggcttcatagcgaacaagagtgtattgcgcgtatcgaatcggcggtaagtcaggggaaatgtatcgcctggatccgaaattctgtcgatgacgccatccaggttcatcgtcagttacttgcccgcggcgtcattcctgcttccagcctttcactttttcatagccgctttgcttttagcgatcgccagcgaattgaaacggagacgctggcacgctttggtaaagaagactgttcacagcgtgccggaaaagtcctcatttgtactcaagtcctggagcagagcgttgactgcgacctggacgaaatgatttccgaccttgcccctgttgatttactgatccagcgggcggggcgattacagcggcatatccgcgatattaatggtctgttaaagcgtgacggaaaagacgagcgttcccctcctgaattgctgattctggctcccgtctgggacgactctccgggtgacgaatggtttggcagcgccatgcgtaacagtgcatatgtctaccccgatcatgggcgaatctggctgacgcagcgtgtgctgcgtgagcaaggcgctattcagatgccacacgcagcccggcttcttattgaatcagtctacggtgaagacgtggcaatgccggaaggatttgcccgcagtgagcaggagcaagtgggcaaatattactgcgatcgcgcaatggctaaaaagtttgtcctgaacttcaagcctggctatgccgccaatatcaacgattaccttccggaaaagctgtcgacacgtctggctgaggaatctgtttccctgtggctggctacctgtattgacggtgtggtgaagccttatgccaccggtgctcacgcatgggaaatgagcgttgtcagagtgcgtcgaagctggtggaaaaaacatcgggatgagttttctttactggaaggggatgcgttcaggcagtggtgcattgaacagcggcaagatccggagatggcaaacgtgattttagtcaccgatgacgaaagttgcgggtattcggctatggaaggattgactggcaaggttggttga

SEQ ID NO: 20267 - DNA, 1203 bp, Escherichia coli
atgaaaccacaagctgttattcacagaaagaatatacttttctttactattggcctatcgctgctgactattatgggcattctaggtgtggacacttatttgccttcaattcctgacatcgcaaaagaatttagacaaaacatcccgtccatgcaattgtctatcatggtttataccctttgtataggttttggacagctaatttttggcccattatctgattctattggtcgtcgaagaattatgctttcaggtgctattatttattgtgtgacaacatattgcctcacactctcgaccggattgggtacgtttcttacaatacgcatcatacaggggctttctatatcaataactctggttacagcaattagtgccgttcgtgatgtaacacgcggttcagtggctgctacactgtacgctattatcataactattgaaggtgtcgtgcctattgcttctccactgctgggaggaataattaatgatgtatggggatggcgtgcaatttttctaatgatattaggatattctgttgtaacattaacgtatgtctattttaacttccctgaaacactcagtcataaaaaacggattacatattcactaaaatcatcatttcttacgtacaaagagataagtaagcaaccaagattttatctaccttgcctttctcttggactttcattctctctaatttattgttatgtcacagcttccccatttattttgatggttaagtatggatactcatctacgcaatttggtgttatctcatcaattattggaggattccttctactgggagcagcactatcaggtaaactacttaagaagcggtctgcaccacaaattttgagtttatggctgaagctcattgcttcatttatcgtattgtacactccgctaataatattcgttcatcatgtcaatgtttttatattattcttcattgttttgatgtttgccggaggtatgttcgaatcactttatacttacctaactatgtccagccaacgtaccagtctgggtgccacatctgcgttaatgggggccgcttctctggtgattccttcagtgatcggcggaattggtagctttttaattgaacgaaatatcaccatttggattgtttacttactttcaattattctaatcatgatctttatgttaagaaagtatcgaagatttacagcagcctag

SEQ ID NO: 20268 - DNA, 174 bp, Escherichia coli
atgaataatccccgttttccagttgatgtattaaaggcgaggctgaaacgtgatcctttgctggcgttagagcttgttaaccctgaactggatttagtccgccagctggcgcttaacggtaagacgcgcgcaatacgggaacaagcgatgagaaaacttgatgagttgcattga

SEQ ID NO: 20269 - DNA, 357 bp, Escherichia coli
atgaagagattctttttgtttttctttttgtcgggatgcactgttggtgattatgttcgcccattgttacccggtagtgtatatttgcaagacggacagatttgttcaaaaccagacgatgggaatattatttcaaattatgttttatatgaaggtaaatatggcaatgcaataaagttgaaaagagtgacaggtcagttcgaacccgtatgtattgatataagtgagctatcttcagatgttatgtatatagggaaatatatgctctcttccggaagtaaaaaagaatactatggttttagcataattagaaccggagaacgtattttaagacttgatgataatcatatcaaataa

SEQ ID NO: 20270 - DNA, 681 bp, Escherichia coli
atggcggaaccggtagctttctccgttctcgtttgtcagcgtgaccagacgcccgtaagcatcgtacccgaacgccgtcctgcgccccgtcgcgtctgtccggctgcgcacccggccctgcccgtcccgctgccagcgcgttatcctccccatcgggctggtgtacttcaccagcctgcccgccgcgtccgactggtaattcaccgtgcggccgtccgccagtatcacctccgtcaggtggccgctgtcgtcatacccgtagcgcgtgctgtggctctgcgcgtctgtcatccgtatcagccgcgtgcgttcgtcgtagaaccaggccgtctgcgagccggaacagtccgtgtgccgcatgagctgcccgtcttcgttccactgaaggtatttattccccccgcgcgcatcggttatctgcaccacctggccgtggcggtcatactgataccgggtgttctgctgcagcgggtcggtcaccgcaagaagattgccgcgttcatcgtactcacagcaccagctgttccccgccgcgtccacctccgtttccggctggtgccacaccgggtgccactgtgtctgtgccacccgccccagcgggtcgtgcgtctccgtgatatgcccctgccggtcatacacatagcgccatttgccgccctgcgcatcggtcattcccagtaa

SEQ ID NO: 20271 - DNA, 864 bp, Escherichia coli
atggcttatagcatcgatatcatctcctgcattaccgaacggtttatggcgttaacagccactgaaaagcgtatcgcacaatttattcttgatgacgtctctgccgcagtagagttgccaattgctgagctggcacggttaacgcaaaccagtcaggcgtcggtgacgcgttttgcccgtgcactggggtgcaaagatgtccgcgagttgaaagtcaaactggcgcagtcactggctgtcgggcagcggtttattctcgatgtaccggatcttgacggtgttcaggggatctacgaagcgattattagcgtgctggagacgcatcgtcgttcgctggatatgaatgccatcagccaggctgtaagctggttaagtcaggcgcggcaaattcttgcgttaggaactggcggcggttccactatctgttcacaggagattcagtaccgtttattccgtctggggctaccggtggtcagtcagaatgatgccctgatgatgagaatgatgtgctcggcagtcatgccgcaggatgtggtgattgtgctttcgctgggcggttatacaccggaaatcatcgaaagtgcggcaatcgcccgtcagtatggcgcgcgtgttattgccattacgccagcacaaacaccgctggcggaacaggtggatctggtattgccgttactggttcaggaaagtgattacatctttaagcccaccccttcccgctacgcgatgttagccatggtcgatgtactggcaacagaactggcaatggcaaataaagcgcaggcgaaagatcgcctgcggcggataaaactcgtgttagacagccaccgtgggggcgctaaccgccagccacttggcgattag

SEQ ID NO: 20272 - DNA, 1470 bp, Escherichia coli
atgaacagtcatatctttttagtcggctttattatttatgccatcgccatgatttggcttggttggtttgtttctcgtaatcagaaaagcggagaagattttctgctgggcgggcgttcgctgccgctgtttctgacgctggggtcaaccgttgccacgatggttggcacgggttccagtatgggcgcagtgggctttggctacagcaatggctgggccggaatgctttatggcgtcggtggggccgtaggtatattactggtggcgtggctgtttgcaccggtacgtaaattacgatttatgaccatgagtgaagaaatatcttattatactggcggcagccatttaattaaaaatattgtcggcctgatgatatttattgcctctattggctggctgggggcgcatatattaggtggaagtatgtatcttgcctgggcaacaggtattgatcttacggtggcaaaattaattattgccttagcttttgcgatttacgttattatcggcggttattcggcggtagtgtggacagatactattcaggccctaattctgttctttggctttatattaatggctattcttgccgttgttcacgttggcggctggagtgcgattgagcaggcgatggacccaaaagcgatgagcctgtttgcgattgataaaatgggcgtgctgcctgcgctttcgctggcactggttattggcgtaggtgtgctggcaacaccgtcttatcgccagcgtatttactcgggtaaagatgttccctctgtacgccgttcgtttgttattactggggtgttatatctgttcttctcgattttgcctgccattatcggcatggcggcgttcaccatgaacccaaatctggaaaacagcaactacgccttcttgttcgcgaccagtttcttacctgccattcttgggctggtggtgctgattgccgggctttcagccaccatgtcttctgccagctccgatgccatcgcggcggtggcgattatgatgcgcgacgtctacaccatgattaccggcagaatgccgccggaggacaaggccattacttactcacgctggatgttgacctttgttattggcctggcgctggtctttgctctgacctctaatgacatcatcagctacattaccaaaatgatttcgatgctgatgtccgggctgtttatctgctcgattctcggtcgcttctggctacgctttaactggcagggcgcgctggcggcgttagtgagcggtatggtgatgtcaattgtggtgctgatgaatgccgactggctggcttactggggtaacccgtgtattccgtcagtgctgggcagcctggtcgctggcgtactggtgacgttggtaacgccagcaagtcaggtcagccgggaagaagctttggctattatcaccaatgagcgtgaaaaccagagtgtcgtgatcaccaaacctgaagaagcataa

SEQ ID NO: 20273 - DNA, 390 bp, Escherichia coli
atgagtattaaacgttacggtacggaaggtggaacaggcactggcgggcagcatttgccgtttgccagggcggttgaggcgggcggctggctgtacgtctccgggcaaacacccatgaaaaacggtgaagtggtagaaggcggaatcgttgaacagtcacgactggcgattcaaaactgtgtcgacatcatgactgaagccggttatagcctggcggatgtggttcacgtgaaagtgatcctgaccgacgcccgctatttccagtcatttaataaagtattcagagaattttttggcgagaatccacctgcacgtatttgttgtgtggctgatctggttgtcgattgtaaagtcgaagtcgatgtgacctgttataacgcgacccgctaa

SEQ ID NO: 20274 - DNA, 1443 bp, Escherichia coli
atgcaggttgactggttaatcaaaaatgtgaccgttatcgacggtagcggcggccctgaatttcgcggtgacgtggcaataacaggtgatcggattgtcgatattgcccctgcgcttaacgttacggcgcagcaggtcattgacggggaagggcgggtgctggcacctgggtttatcgacgttcatacccatgacgatatcaacgttattcgcatcccggaatatctgccaaagatcagccaggggatcactacggtgattgtcggtaactgcgggattagtgcggcgtcggcgaaaatgaaaggtgaagttcctgacccgatgaatctgttgggggaagcagagcactttatttatcctaccgttgaaagctatgcccaggcagtggaagcagccaggccgtcactgaacgttggcacgctgattggtcatacggcgctgcgcaataaccatatggacgacctgtttcgcccggcgacggtggatgaaattgccgctatgcgtgccgacttacgtctggcgttgagtcagggggcgctggggttaagttccgggctggcctatgcaacggcatttcaggcgactaccgaagaagtcatggcgctggcggaagaattagccggtgagaagggcgtttataccacccatctgcgttctgaatttgaaccgattctcgatgccctggatgaggcgtttcgtattgggcgtcatggcaaagtgcctgtcgtggtttcccaccataaatgtgccggggcgaaaaactgggggcggacaaaagaaacgttggccttttttgaccaaatgcgtcaacaccaggaaattggctgcgatgtctacccttactcagccagctcttcaacgctggatctcaaacaagtcaccgacgaattcgatattgtgatcacctggtcacaaacacatccgcagcaggccgggaaaacactggcgcaaatcgccatcgactggcagatgagtatgctggaggccgcgaagctgctaatgcctgccggggctatctattacaacatggacgagcgcgacgtccgccgagtgttgagttatccggtcagtatgattggctctgacggcctgcccaatgatcccatgccgcatccacgtttatggggcgccttccctcgcgtgctgggccactattgccgtgatgaaggcttattcccactgaccacggctatccacaaaatgaccgggctttctgccagccgttttcgcctgccccagcgtgggctggtgaaagtcggttattttgcggacctggtgttgttcgatccacaaaccattcgtgatgttgccagcttttctgatcccaaacgcccggcagatggcattgaggcggtgatggtgaacggcgttatgagctatggtcgcgataaacacattacaggccgtgcgggacgcttcctgcgccgccagacctcacattaa

SEQ ID NO: 20275 - DNA, 1221 bp, Escherichia coli
atgaaataccactcagaacctctggttccccataaatctgccctgatgcaaatgcccgcaaatctccttgccgaagatgtctgtttacctgccgcgatcattaaaaagcaggccctggagaacaacattacgtggatgcaacgctacgctgacgcgcgcggcgtttcactggcaccgcacggtaaaaccaccatgacgccgtggatttttcaggcgcagcaggcggctggtgcctgggcaataggtgtcggtagcgcatggcaggctggtgcggcaatggcgagcggtattcagcgagtgctgatggttaaccagctggtcggcaaggcgaatatgcagttgattgcccagttgcaacgacattacccgacggtcgattttatctgctgtatcgacagcattgagaacgcccgcgctttgtctgccttttttgccagtcagcaacagacactgaacgtgatgattgagttgggtgtccccggcgggcgctgtggttgccgctcaagggatgccgcactgacactggctaaacaggcagcccaattaccggggttacgcctgcgggggcttgagttatatgaaggcgttttacacggtgacgatccacaaccgcaggtagaagctctgctgcgggatgccgcacaactggcctgtgatatggcaagtctggttgatggcgagtttattctcaccggagcaggcacggtctggtatgacgtggtgtgcaatatctggctggcggcagaaaagcctgataactgccgcattgttattcgccctggctgctacatcactcacgacaccgggatctacgacgcggcacaacaacagttgcttgcccgtgatcctgtggcctgcgatctggcaggcgatctcacatctgcgctggaactggtcgccatggtgcaatcggtgccggaagctgatcgtgcggtggtaaattttggtaagcgtgattgcgccttcgacgccggactgccgcaaccagtcgcccactaccgcaacggcaaatcactggcatttgatccacaggcgattcgcagtacaggtattatggatcagcactgcatgttgcaactgtcagctaatagcgacgtgcaagtgggggatattctggtgtttggcacatcgcatccgtgcctgaccttcgacaaatggaaaacgttgttattgactgatgacgactacaacgtactggcagaattagacactctcttctaa

SEQ ID NO: 20276 - DNA, 2094 bp, Escherichia coli
atgaaagctacagaagcccgcctactcgattttttaaaacgttcgcagcagtttgttattcccatttatcaacggacttattcatggacagaacaacaatgtcggcaactttgggacgacatcattcgtgccggaaagcgtgacgatatatcagcgcattttatcggttcggttgtttatatagagcagggattgtatcaggtttctggtatttctccgttgctggtcattgatggtcaacagcggctgacgaccgcaatgttgctgattgaggctttatcacgccatcttggcgaagacgaagtttttgatggcttttcagcaatgaaattgcgtaattattatttactcaatccttatgagtccggcgagaaaggatttaaattactgctgaccgagactgataaagacagtttgctggcgttaataaaacaaagaccaatgccagaaaactattcccatcgaataatggaaaactttactttctttgatgaacaaattgccaaactcggtgatgacttgatccccttatgtcgtgggttagcaaagttattaattgtcgatgtggcgcttaatcgtggtcaggataatccgcaactgatttttgaaagtatgaactccaccggtaaggcgttaagtcaggccgatctggtgcgcaattttattctgatgggcctcgaaccagagcatcaaacccggttgtatgaagatcactggcgtccaatggaagtcgcttttggtcagcaaggttacagcgaatattttgacagctttatgcgtcattatctgacggtaaaaacgggggagatccctcggacagatgaagtctatgaggcatttaaactccatgcccgcagccagagtgttgctgaaaaaggcgtagatcggctggttgaagatattcacatctacgcggagtattactgtgcaatggcattgggaaaagaaagtgacaaatcgcttgctacggcttttcaggatttgcgcgagttaaaggtcgatgtggcatatcctttcttactggcgctttatcatgactataaaaatggcgatttgcctcacgaagatttcctgagcataattcgtttaattgaatcttatgttttccgccgtgcagtatgtgcgattccgacgaattctcttaacaagacgtttgccactttttataaagtcattaataaagaaaaatatctggaaagtattcaggtacattttctgaatctgccttcatatcgtcgtttccccaacgatgatgaatttaaacgggaattaaaagttcgcgatctctataacttccgtagtcgcagctactggttacgacgactggaaaacgataaacgcagagagcgcgtggaagagtttacgattgagcatattatgccgcagaacgaaaatctgtcggctaaatggcgcgaagagttgggaagcgactggcagcgtgtgcataaagaattgttacatacgttggggaatctcactttaacgcgctataactcccgctacagtgacagacctttcgcggaaaaacgcgatattgaagacggctttaagcatagcccgctttatttgaatatcggtcttggacagtgcgaaaaatgggatgaagccgccattcacgcccgagccgatcgtctggccgatcttgcggttcaggtttggcaagcgcctgctcttcctgaagaggttttagctgtttatcgggcgcagccggagaacaaaaccagttacagcctgagtgattatccttttcttgctgatggttcgcatagccgggtgttatttgatcatcttcgcgatgaagttatgcgcctggacgcagggatcacgcaggaagtattgaagctctatattgcgtttaaagctgaaacgaattttgttgatgttgtgccgcaaaaaagccgactgcgattgtcgcttaatatgcagtttcatgaactggtcgatccgaaaggtattgccaaagatgtgacaaatgttgggcgatggggcaatggcgatgtggaaattggtttcagtgacctcgcacaacttccttacattatgggattaattcgtcaggcatttgaaaaacagatggagaacgcgttggtataa

SEQ ID NO: 20277 - DNA, 258 bp, Escherichia coli
atgcggcgtgaacgccttatccggcctacaaatctggcagaagtgccgctgctggataataacggcaaatttaacggtcagtacgaattgcgtctgatggtggcgctggatgtcagtggcgcaatcaaaggccaacacttcgatatctatcaagggatcgggccggaagccggacaccgcgcaggttggtacaaccactatggacgtgtctgggtgctgaaaacggctccgggcgcaggtaacgtctttagcggctga

SEQ ID NO: 20278 - DNA, 378 bp, Escherichia coli
atgaacaaacaatcagggatgacactgcttgaagtcttactggcgatgagtattttcgccactgttgcgctggctttaatgagcagcatgcaagggcaacgaaatgccatcgagcggatgcgtaatgagacgctggcgctgtggatcgcagataaccagcttaagtcgcaagatacattcaacgatgaaaacacgtccagttcaggcaaagagataattaatggcgaagagtggaactggcgcagcgatgtccattcaagcaaagacggcacgcttctggaacgcaccataacggtgacgttacccaacggtcagaaaaccgctctgactcgttatcagagcatccatgatagatccgggcaggcgcaagatgattaa

SEQ ID NO: 20279 - DNA, 123 bp, Escherichia coli
atgacaatgctactgccgctcttcattctggttggttttattgcaggttattttgttaatgccatggcctatcacctctcgccgttggaggataaaacggcgttaacgtttcgccaggtatag

SEQ ID NO: 20280 - DNA, 327 bp, Escherichia coli
atgaataaaaacaatgatgtaattaatatacccgggaaggatgccctttatattctaagtgaggtagagtacatattgatatcacttaagaatattgcaaggtattatttcaatggtatagagcagaacgttattgatgataaattgttgaattcttactttaaagaaaccactaaatttattgatgataaaaatattacacatcggttggctgaaataagaagggttattactgaaaattttaataccgatcttggagatgatgatatggatgatattgagagagaaatagaaaagataaaatgttgggagaagccgggtgattaa

SEQ ID NO: 20281 - DNA, 294 bp, Escherichia coli
gtgcggcattatactaatcgtaaaggttcaaatgcgattgctgaaagtgggataattaaggcgcatgataacggtcgtgtatatttggaacctgcgaataaaaaaccactcagtcaagtagacatagaggcgaaatatcaaataggtcgtgggaaaggtagagattatgtggaaacagatgtacctaacgagcaattagagtgggtaacaaaccctcgataccatatagatgaattgactgtgaaaggtgatattgttctttctgataatgcaaaaataactcggcgtaaataa

SEQ ID NO: 20282 - DNA, 2679 bp, Escherichia coli
gtgaaaggctcacaatggaataaatgggatttacacatccacagtccaatgacgtggctggctaataattacactcctgacgatattgatggttatgtacgtaagctgggtgagcagcagctatccctcgttgccgtgacgaactatttttacttcaagcagaatgaactggaaactattcgagacgagatctccagacaggggttggagattactgttctcgggaatgttgaattcaggattgatcagcagaataagaataacgaatggataaatgttcatatcctattttcagacaaactgagtacagaacgtattaatgacaccctgtcacgtttaccgcttaagctcacagatggcgataggaaaaccatttactgctgtgagcggagcgtgaaagaaagtggccatggtgttgataccataatggtagattttagccaactacttgaccatctgaatgctacgcttagcccctgtcaagattatcttgttgctgtctgcccgaacggatatggtggatatcgcccagatgcaactggacgttcgcaggctgccgcgaccgaaatagatcgccaaggtcagatcatttttggaggattacgtgatcgggattatttcctgagaacaaatcgttacgaaggagcaagcatccgacccgtgttccagtgttctgatgcacattgtactgaacacattggacgaggttttagctgggtaaaagcattaccaacgtttgaaggtctgcgccaagcgatgctggagcctgaagggcgtctagcgttagatttggtatcgccagctctacaactaccgaaagtgcacttcagccgccttgatgtggaaggctctatttttaacggccagagtatttgtttcaggaaattatccattccccttaacccagatatggtggccattataggtggccgcggaacgggaaaaagccttcttttggacgctgtacgttcacagtttgccggcgcggccagccgtggtagtgagattcgtgatgttaatgttcagcatctaactgtagagcttgataaagctaatggtgaaaaggtgctgtttgaatgtagaaacgaaggatacgaatatcttcatgtatctcaaggagagataaagcttatctgtcagcaaccaggactgatcagcgatgaaatcaagaaaatgttacgtctatcgatggaagacataccggaggaactcagagaggagctagttgctaatctgggtgactatcgggcatttcgagagtaccacagttttcgtgatgagcaacagcagcccgtaaacactgaaggctatcatcttgggatgatgaaggcagctcaggacaaaattaataccctgaccagcgcaaagaataagctcctgatcgagcagtttcaagctaacagtacacgcagtatggccctgaccaaagcactagccagtgcaagactcctatttcgtgagttagcagaagcggagacaagtctgaatactcgaattcaggaggtgaatggctccagtacgaacgctatgcccattccatcacttgatttatcctctcacaaaacctccgtttcggctcatattgctgtgctggagaaacaaagtgggcagcttgaagaggaaaacaaaggtattattttttccttccgggaacaagggatcgaacaggacatttcaggggttctggaaaagattcgcggctaccaggaacaaattcagcatgccatcctgcgtcagggagaaattcaacagcgtgtacagcaggctaaactaggaacagagttgcgggcaactctggcaacagactttgtacaccatctattgggtaaaaaagaaaggatcgatagaacctttgcgtccctgacagataaagagcatctgacgcctcctcagcaggaattgatacgagaaatactaacagatatccgcatcttcgggcagccacattttgatatccattctttttatagtggtatgcttgaacgccttaaccggggaaagttccgtgtttctggcgagttatctgccgaggaaaagctccggacggtctttggtgtttctagcattaaggattttcaagcccttattgcagggcaggagatgattacattgcctgagaaaccggatgaaaaaatcactatcgaaacatttatgtggaagagtgagtatttcaattcccagggaccttttgcacttcttgcctttctcttcagtccagagcatatttcaacatatctgacggtaagagctgaatttgaatacaaaggaaaaacggtcgaaaagctatcggccgggcaaaggggaacgttttacgtttgtctcaagctggcgactgatactttcggttcaccctttgtatttgatcagcctgaagatgatctcgataatgacttcataatgcacaatcttgttcctctattccgtaagataaagcagtaccgccaggtgattatcgttactcataatgccaatctggtcgttaactgcgatgctgagcaggtgattatcgccagtaacactgatgaggttataagctatcgctctggagccctagaatatggcgatcatgggaaggcaaacagtattcgaaaagcaatatgtgatgttcttgaggggggacgtgccgcatttgaagcccgtgagcagaaatatggcatgccgtggttaagttccctctga

SEQ ID NO: 20283 - DNA, 1170 bp, Escherichia coli
atgttcaatcaaattatcgctcctaaaaaaagtatgcaagatcaattcgatacattgataaacagtatatgtactaatgtaagcggaggagaactaaaacaacttggagctttatttacgcaaagttttctacaaggactatcaaaaataatttatgaaaacgaaatgaataatcatccctcatgcgatattgaagtagagtcccagttatgttggattgataaagctccctatgctcaactatgtgatggtattccatttgatcgaaaagtagagttgggtgatgctatgtttatattcgataaacaatttatagataataactcacaaaaattaatatcagaaagaaaaaaagcttttattctacaagcaaaggttacagacaaagatgacaaaaatgctttggtccctattacaggatacgatcccattaaaaaaaatagcacatttaaggagctagaactttataagcagtggttaccttttaatatatcctacgcttcaaatacaaatagaattgaagagcccaaagttgatgtgataaaatatcgaaccactgatacctatcgatttgcttggtatggagttgttgctgacaaaaaaaatggttctcattataactggccttgccggtggatggtggggaaatccttgatgggtcaaccttgtgacagaaccatgggagagttattgagtggtttttatcaagataataatgttgatggagttcatgtcggagaatattattcaggaactactgattctaatgctgcatggggcaaggttgtgtggcatgttctaacccgctgccaacaacttaaaatgccaaaagaagtgccccaacactctatattaaattgtaggaaaatatcttataaaaaatcttataaaaataaattacactctttaggtttggataagaaagtaatcaatgacattgcttcattattaatatatcaccccaacctacccatgcagctcattgtatataaaaccatatgccaccacctgaaaaataaaaaaattaaaccaaatgattttatatgcaaagctgcaattaaagctatttcaataggagccacaccaataacagtcaatgttaaaggaataaagaaaccacgttcatttcctataatacgcatcgtagttaaacgttacaacaatgaataa

SEQ ID NO: 20284 - DNA, 246 bp, Escherichia coli
atgcttcaaatgttaactcttgaagaatgggctgctgaaaaatacagaagtaatcctccaagtgtgtccacattgcgtcgttatgctaagcagaatttattttgtccaccggccatgaaacaaggccggttatggcgagtgcgtgaggacgccgagttagttggggagttggtaacacctgtaatcaagaaaaatgactcattacttttgcaacggattttgagtaatggcagccagaccgcgtaa

SEQ ID NO: 20285 - DNA, 342 bp, Escherichia coli
atgaaccagttttatgttcacgttcgtctatttgaagccacagccgaacagaccaaaaaatttgaagaattaatgcttaactttctgtaccagaaaacagttaaagagtctgacgatagctgctgcagactgattccagagggatatatcctcagaagtacaatgaactgccaacaaatccttgatcaaacattttcaattgctaacagtgccggtgttgacgcaaatatatttgtctgtaaatttgaacaaagcgcatgcttacttccgtctgcttccttagttggtaacgatttcgttcattacgatcttacgcctaagcccatcaagctcgattcttaa

SEQ ID NO: 20286 - DNA, 309 bp, Escherichia coli
atgaatgagcagaatttgaagcatgtgatcgcattgttgctggaagacgctaaacgtttgcagcagatagagccaaatgcaggcactgaggcccgcattttgttagcaaaacaggcattaaagacttgcggggcgcaagcccctggtcgaaccgagttcatgaatttcatggctaacacactcacccctctgccatgcaatggagagaaggtgagccgtgtttatcacgacacaatggttaaggctttaagaatcgagcttgatgggcttaggcgtaagatcgtaatgaacgaaatcgttaccaactaa

SEQ ID NO: 20287 - DNA, 180 bp, Escherichia coli
atgaataagaaacaaagaattaattatttttatgataaaactacttcttggaatcatttaaataccatttttcttactcaatattttatggcatgtagtatgaaagctaatttgaaaatgacaaaacctaaaatgactaatggggttttaaattcgaattccggcagtcaagttttttga

SEQ ID NO: 20288 - DNA, 2427 bp, Escherichia coli
atgcatgattttaaacaaaaactagaatctagtttttgtgaaaacatcaccctctttttgcaagcagggactttggatactagtgaaaatgtatcaggctattcattaataaattttaatagttcaaatgtgatatcagacggaagaattttttataggaaatataataaagaaaaaacatgctatgaaccatgggaagaaagaggaaatggtggtgtttttgatttcaccactgagaaaactctaacttttgactctgaaaaatttgcaacattatctaatgagattctagagaaaactgataaggatttattaattaacattggaatctctgatgaaaagaaaaaaagtctaagagctctatttactgaaccaaatttccttgaatttgctcttggagccatgccttctatggagattaagtccacacaagaattactagaaggacgaaacaaccttgtgattgtaggaaaccatagctcaggtaaaacatctcttttaaaatacctattcattaagagtctagaaaaacaggcctgcaaagacttcagtaactttgcatttttcttagatttaaatgcaattgaattaaatagcttaaatacaattgtaagcgcattatgtacacaatatttcaatgcagattcgaccacatcttttgaagaaaaaattaaaaaaatgttacatgagggaagatgtgttatatatattgataatctggacaatataaatacaaaagaacaatgtgtaatttctgatttttttataaaattcaaagaatgtagatttatcgtaactgctggctataataattcagatctggtagttaaaatattatcagatgaaagcaaagctaaatttcatgcaattgctataggttcattacgcagatctaatgttcgcgatattgtatcaagatggcacgacacaacatcacaaaatataatatacaaagaaatcacgcgaacaatcaacaattcgcaacttcctcataattattttacatactcaatgcttttagctatttatgaagttgatcatgacgttaaaggaatattaagtgagtctgatattatagaaaacttcatagaaattttgcttcgtaaacattttatggatactccgcctaataagccacaatttaaagaacttcggcattttcttggatatttaggatttacattattcaaaaacaaatgtaattttatttcaaataatgatcttctgcagactgcaataattttcaatagagataccatgcatgattatcaagtagaagactatataaaaccattaaaagaatgtggaatattgaaagaagagctatgtaatgtgattttctcgcagccttgctttttatactattccatcgcttatttcatgaagcataacgaagagctaaagaaagaaattttatccgataataattatctacatctacataaagttattgaatactattcatcgcagaactcatctagtcttgatttattatacttacttaaaaagaagactaatgcaatcaaatcttctttatctgaacgaatgctcgaagataagggaataaatattgaagatataaagattgaagactctaatactttctctattttagatatggtatcaacccaagatgatttcgaaaaaaagatagaatcactccgtgcagatagagaaaaagatgacgcgcgactagatgaattatcacctttatctgataaagataaaaaagctaatatatcaaatgttagagcggaaggtaataataatctgttacatgatcttattaacactttatctctttatgcaagggtattccgtagtactgaattatctatggaaagagaaaatatattaaatatatttaatgaccttgtaaagggttatgttttttacatgaaagcgtcactagtactaatggatgattcatttgttcttccagtaatactccctgcattagaaaagaaaatgcaagaggataaattaaccgataacgaaaggcaacgagtttttgaaatgtttaaactagtattgtctttagttcgctcaatgatcccaaataacatacagtttattatgagcaatgacttaagctcgaaaaaaccacgtattgcaaacattattactgaatcaaaagactcaaatagcaatcctgtagaaaaggctattttaactttcaccttaatggatattaaagatgaaatggttatacaattagctaacgatttagcaaagatacaaaacaaagttgttcaagaatctcttttcttcaagattaatcaaattataacaagtaactatgatttaaaaagaactgaagaagaagcattgaaagagttagcaaaaaacattggcattaaaagaaaattaattctcacacccaagattagtgatgcctttaatacgttaaaccgcataggacattaa

SEQ ID NO: 20289 - DNA, 750 bp, Escherichia coli
atgaaatcaattgtacacttatccgacttacacttatcagactcaaaaaaatatggttttcactggaaaaaagccaaagaactggtcacagtattagttaatgatatacattcattaagtaaagaaaacaacctccagatagatgccattttttttactggggatttaacgttttctggaaccaaagagcaatttcaactatttgatgaacatttcctctctccacttattcaaaagctgaacatcagtaaaaaaaacatttttataaccccaggcaatcatgatgtggacagaagtaaagttcatccacttgaaaaacaactgcgaactggttcggacgaaaatttcatatcatcatactttgatatgataaataatggagagtattcatgggaacgtctctacgagtactgtgaatataataaaacaatattagatcatcattctgatgttgaacaatctggacgcatgattacatgctttaaagtaacaaacaaattatacgtcgttagcgtaaatagcgcatggttagctatggatgataatgatattggtaacttacgaattacccaaaagcaaattgattttatcaatcgtgccaaaataccttctgatgcaaaaataatattattatgccatcatcctttagattggttgaataagaatgatcgtgacattttttcaacatttattgaaaaaaagtttcaattttcttttttggtcatatgcatgattttaaacaaaaactag

SEQ ID NO: 20290 - DNA, 570 bp, Escherichia coli
atgattcaggatttactgatcgaagcaattagtcacgataggatgcataaaaagttaaatgaactgaattgctacttctacaatcgcaaacatgaaactcaaatacgtgatgagttagttgttattctcaatcaaatcagcacactaactgctttaagtgagcatccaaaactcggtatcggcgctgttgacatatcactttataaccagtcgatattaacgtctgaacataatggcaatgttgcaaccatcgagatcaaacaccattacccaaaggatttactttatcggcaagttcaagaagacatcatttccgatatttcaagagtaatagtttcaccaactacacattttatccatataatccagcaaagaactaggattaatactccttcttttggccaagtgaaattccttgaacgtgatgcaagtgatatcagcacttatgtgcaatgccttgaagagctaagttccttccccagtatctttcataaaaaaagtatatgtattgaggtacttggtgaaattatgtcgacatatacctttaacgtatattcatttgacaactga

SEQ ID NO: 20291 - DNA, 336 bp, Escherichia coli
atgaatagttatgaatgggaatggcttttaaacaaagatgacaccctatgctttttccccgtaggccattctgtagaaggtaattacaaaattcactttgagttgagcggtagttgtaaccttagagtctcagatgctgaatggcatggtaaacctgttctgctgttcgaatacttcgatgaagatgatgaccgccctgcaataatcgaaatattagaaacaaccactacaactgtggaggcgatgatcgcacatctgaatagtatcgatagtatttaccatgaaccgatttacaaagcggtttacgagtgggccgtaaagtttttctatcgatga

SEQ ID NO: 20292 - DNA, 330 bp, Escherichia coli
atggctgaacacgatattacgccagaagtcgccatttccaaaacacagcgccgctataaagtcggctatgtcagagcccgccacataaacagcaaaacctacatgaccacgtactactcacgacaccccagcctgaaccttaagggcgactggctgaaagaggccggatttgataccggacggggtgtcacggtgaagatttcggaggggtgcctgaccatcatcgctgacagtgacgaggtgcaggaactgcgggaggaactttatcaggttaaacaggtggttaaggggatgcggaacgggatgtttagtgtgctgaacgagaattaa

SEQ ID NO: 20293 - DNA, 195 bp, Escherichia coli
atgccctgtgcctttatggtcatcatgaccatatacacgaccagtattagaatcaatagggtaacctttcctataacggacagtaccatctcttttcttaaattgttccatcttatgtttttttctaataccggcggcatcctgcgaaccgatccctcttactttttgagcatcaggaaaggcctccatcaataa

SEQ ID NO: 20294 - DNA, 243 bp, Escherichia coli
atgttacatacagattgtgctattgaagattatctcaacagcaagaacattatcccggcggtttatgccagtttttattcaactgccttattacagatagatactttattttatggagttagtgttatttgttatgtaattaatgttgaagagttgaattatgactttcgtaatccagcattatatgcatatgaatattataacaaaactccctctattataaaggttgatttgcatgattga

SEQ ID NO: 20295 - DNA, 1158 bp, Escherichia coli
atgattgaatttttattgttcatcttatgtagctttatcttatatcaggctttttatgttactaaggaatttaagagtaatcttttcttaatcatgtgggggtatacttttctattcgtaactcccgttatatacattttttatggtggtgagaaatatcgtgtctttagtgatgaaagtgcattaacattttatttgttgggttgtctctccgctgtgtttataattttaatgcttctgttcaaggtttcacttaaccgaataacaatatgtaaaatcaatttatttatctccgattttatattaaaaattatattttctttctgtatagtgtttgttgttctttatattctattttattggagggagtggcctttttttgattttgtctcgggagatatctcagaccgtccggatattgtaaaaggaacctttcaaggtttttttatctattctttatttacgagcataataatccccgggatatattttcatttaaaagaaaaaaaaggaaaagtgtttaatttacttttctttatttttgtttgttttagtatggtggtaagtggtaataaaggtgtttttctatattttattatttttaatgtgttatttgaatggaaaaagatacgtctaagtacgtatttgattattatcgtaggtctgatggctatctatgccttaattcgtctgccatttataggtgacaatttttctttatcatatctaattgaatcgatatctgagaggatttttttaacgcaagggatggctatgccagccgttatcgagttagcaaagtcaaccgatgtgacaatgatgaactctaatgatctaaaatacacactttttaatttcgtttatggctatagccccggttcgatgcctcttttttatacagctgaattatatgtcaggtatggttggttaatgatgtctttcatatctgtaataatttcgcttgtatttggatttggtgcatttgttattaataagaaaaaggattctgccattagatgggtttattatatctctttatatgcactaataatggggggggtaggaagtgctaatcttttcttttttattgtggcaattttatggtggttattattaactctcagtaatggaacaattacaagtaggagtggcaagtga

SEQ ID NO: 20296 - DNA, 741 bp, Escherichia coli
gtgattgcagaagtatcaataattatgccgatgtacaatgctgaacattatgtcagagcgtcaatttgttcaattttaaatcagacgtttaaaaattttttattatatattattgacgactgctctacggattcatcaaagcagattgctgaatcttttaacgacccgcgaataatcattatttcgaatgctatcaatgttggagttgctcgaactcgtaataaaggaatagagcttgcgcagacgaaatatatcgcattttgtgatagtgatgacatctggcatgagcaaaaactggaaaaacaaatctcactacttgatagtgggaaatataatgttgttggaagtttttactcaacttttaaggatggaaagtttgaaagtgcaaagttaatatctgcgcctgaacttgttttttatcgtgatatgcttaaatctaattggattggtaatcttactggcatttataatgctcatgttttaggtaaggtttttcaacaagaaattggtcatgaagattatgtaatgtggttgaagcttattgaaaaaagtcgagttgcttacatcattcaagaacctttggcttattataggattaggtccttatctctttcttcgaataaaatgaaagcttgcttgtggcagtggagaatttatcggaaaatacttcattttaatttttttaaaacttcttgttatatgttcttttatattattgctgcattaaataaaagacggtaa

SEQ ID NO: 20297 - DNA, 489 bp, Escherichia coli
atgaaccaattagaagaaaagcttcaaagaatgatttccttatacaaggaagataactgccaaaaagttcctgaaaacatcgcagagttaatggaattggcaagtgaattttctggcatgcttaagtcgtcaggtgttcggtcagcgttctttgttgaaatgctgatgcacggcggacttatggcaacaatgagacgtgtaatggaagaccagagaaaagaacctcctcaggtatacgttttgtcatcgaagaaaactgggctaaccaaaattgggtattcatccaacattccacaacgcatcaaatcgcttggcaactctggaccagactgcttgaagcttgagtgcctgatccctggtggaagagaaactgaaaacatgcttcatcgcaaatttgccgcaaagagaaagcacggtgaatggttcgccctgtccaaggatgacattgagggattgaaatctgtagcgattacttctgatggctattaa

SEQ ID NO: 20298 - DNA, 441 bp, Escherichia coli
atgactttatccatacaatgccacttttttcaaagcataaaccgatacccaatactggtttcagtaatgaaatggcggggcgggcgagatcctgttccagtttttgtcgcaaatgcctcatataattacgcaaatagttgctgtgtccgaccgcgtttggatcctacacctgccggatgcggcataaataaagaactctttgtcaacaaacagaaagggcgaccattcaatcgcccttttttactttgctttattaaccgtgtttatttttcagttcaaagcgtggtgagaccagaccatacagtgtccaaccaaggaaggtcacgatggaaccgtacagcatggcttcttccccggatgagtacagcgcatagaaactgtacatcgcaccaacaaaggcaacaaagtttgctactttcgcttttgatggtggcacattag

SEQ ID NO: 20299 - DNA, 810 bp, Escherichia coli
atgacgaaaattagtgaacgatggaagcacaatggcattactgaaggttattgcaatatttgtgggaaatatggcttgctcacaaaagatcatgttcctccaaagtgcgccataaccttaggccctgttttgcagaaaacagttagcgaattttttggtattcaggaaccagttaaaccattaaatgctaaaaatggctcttatttcagaaccatttgcagccactgtaacaataaggtattaggtgggctcgatgttgcaattgaaaatgtaacaaagtcctttaaagaacagttaagtcgatatatgaatggtatgaatgtatatccattcattagaataccttttgatagcatatttttcactaaggctatgattgggcacgtgctatcagcaacttcagttgaagattgtaaaaaagaacccgtagatagccccttctatacacctttaaaggattatgttttgggtaaaaattcaagttttgaggaaactcatgatatttactactggttttacccacacagaatgcacatatccgctcaaagtgtagcatttatgaacgaaggacatgtggcatttatttgtgctttacatttttttcctatcggttttattatcacaatgaaaaatgaaggaacataccctgcccactctacaaaattagaacttgaagataaattccttacatttaatatgacctctataaattatgagtatacgacatttccatttgtaaatcttaagggaaaccaaatgtatgcgataagcaacggtcatacttgtgtgagttatccaataattaagtga

SEQ ID NO: 20300 - DNA, 804 bp, Escherichia coli
atggctatccctgcatttggtttaggtactttccgtctgaaagacgacgttgttatttcatctgtgaaaacggcgcttgaacttggttatcgcgcaattgataccgcacaaatctatgataacgaagccgcagtaggtcaggcgattgcagaaagtggcgtgccacgtcatgaactctacatcaccactaaaatctggattgaaaatctcagcaaagacaaattgatcccgagtctgaaagagagcctgcaaaaattgcgtaccgattatgttgatctgacgctaatccactggccgtcaccaaacgatgaagtctctgttgaagagtttatgcaggcgctgctggaagccaaaaaacaagggctgacgcgtgagatcggtatttccaacttcacgatcccattgatggaaaaggcgattgctgctgttggcgctgaaaacatcgctactaaccagattgaactctctccttatctgcaaaaccgtaaagtggtcgcctgggctaaacagcacggcatccatattacttcctatatgacgctggcgtatggtaaggccctgaaagatgaggttattgctcgtatcgcagctaaacacaatgcgactccggcacaagtgattctggcgtgggctatgggggaaggttactccgtaattccttcttctactaaacgtaaaaacctggaaagtaatcttaaggcacaaaatttacagcttgatgccgaagataaaaaagcgatcgccgcactggattgcaacgaccgcctggttagcccggaaggtctggctcctgaatgggattaa

SEQ ID NO: 20301 - DNA, 1227 bp, Escherichia coli
atgagtgaatataaaagaatttttcagtatttagcatttgaccttacaaataaggttttaccattcgtagttccatactttattgcttcctatttgagttcagtagagttagggtattatacaactaaacagcttttatttttattgttctttaatgtcataagtatggggggaggcgcaaaattactagtctctatctcaaagaaagatggagaggagaaaaaaatctcatccattttattaaaaatgttttgttttaatgcctgtattattttatttttttatgtattacttccttttttcattgttagtgaaaatgtaattgaagattatataccattggtaatatgctctttattttattctattatacagctgcaattgtcgatttatagaggatataatagaataaatgcttacgggatgttaaatctaagcctctcagtttgtgtttgtatcgtgatattcagttatatattatatttcaaaacgcaactagggttatggtattggctaattataccatatgcacttttttctattaaatttttgaaaaattatctgacagagcgagtattatcatctactgttttacttgatacattaaaattttgtttttatcaatttcctcatgtgctaagttcgtggtgtcgtttaggtattgataggctatttttggctaatatattcgctatgtcattggttggatactactcaatgatgcttcagtttggtttgattgttagcgcagtacttcagtcattgaataattattattccccttatctcttcagagttctctcagaaaaacaatcgtataaaaaactgtctctatttagtaaaaataataaagctgctcgttcatcgtttctgttttttgtagcctcttttgttatcgttatagtggtgaatatttttgcatatgtcgttgttcattattttttacccagcgagtattctccatattattatctggtaccattggttacttttgcctatggattgcaaggatgctactttgctgttgttaattatatttatttttgggggaagactcagtatcttaatatcccatcgatattatcatgtttatttcaggtggtaattggctatttctttatcttacatttctctctattgggagcatcattaagtttattaatgtcttggagtttgcaactgctatttacattagggggggtgatgtatgttgcaaaaaacaaataa

SEQ ID NO: 20302 - DNA, 489 bp, Escherichia coli
atggaaacattaataactgaattgaatgagtatgattttaatcagcgaataaaaaatattttcccgtttattcaaaatgggttatcaactcctcataagaaagggaaaggtattttagtcgaatcaatggaacgtattctattgagaaatggggtgatcctgaattatttcaaagttgatgattgctttgaagatattgtttcttatgataatgaaaaaggtcttgattatatctataaattatttttctataatataaaattatcttctgatgtcctgttttttactccttttatggatacaaataatgggaataaaggagttgtaatgcgttttgactatctccataattttttgatctttgagaacactaaatattataaatatgggctagatattagcagtaatgacttgtttttttatctgtatggagagaacaaattttttggtgtagaacataatagcccaccatattggctatctctataa

SEQ ID NO: 20303 - DNA, 801 bp, Escherichia coli
gtgctgtttttccgtccgcctccccagcgcatcgtacacataccggtatgtcccccgcgctgtcgtcacttccaccatccggtgttccgcatcataacggtaactctgcgttccgctccgcccctccttttccaccgcacggccaaattcgtcgtaacggtagtgcacaccacggtaagacatcagccggttgaacggcaccacgctgttttctgccgtggccctttcccccgcgcgccgcgccagcaggtttcccgccgcgtcgtactgccagctcgccagatacccctcatcctccgagcggcacgccgtgatgcgccccgtggggtcgtagaagtaatccgtttccccccgccggctgtgccgcgtcttcagcagttcatcctcgccactgtagctgtactgccggtccgtgaacgtctccggtaccaccccgcgcatcccgctgtatgtctccctgcgcttcagccgcccggcggggtcataaagctgccgcgtgctcagtcgcccctgacttctgagcacctcccggtgcagggcgtcacgagtgaactcgctgatgacctcccggtccagatttatctgctggagatggccgctgccgtagtacagatgacgctgcgttctgccgtccggaaaggtggtggctgtccggttgctgagttcatcgtactgatgggtcaggacgccctgcgccgtctcctcggtcagcatccgccccagtctgtcgtaactgaagcggataatctccggtgcgtctgtttccccggcatccgaccgtcggcggcggatttccagtag

SEQ ID NO: 20304 - DNA, 402 bp, Escherichia coli
atgatgactgagttcaaacgcacccaacgtgattatcctctatcctttaaaatagctgttgttgagcaggttgaaaaaggcgagatgacctataaacaggcccagcagcggtatggcattcaggggcgctccaccgttcttgtctggttacgtaaatatggccggcttgactggagtcctggacttcctgacctggtgaagaggaaactgcctgtgactcagacaactatcccgctcacacccgagcaaagaatcagggaacttgaagcgcagcttgagctggcgaaccagaaagctgagttttttgagtcagttatcaatgtccttaaaaatgattacggggtgagtatcgtaaaaaagcggcccggcaagtcctcgcgcaaagtccggcccccaaaataa

SEQ ID NO: 20305 - DNA, 612 bp, Escherichia coli
atgatgcaccaggggactcgtcgtttttctcagcctcagcgcctgtctgaacgcttttaccacattttctgtctgcaggttttccccaacatggtagcccataatttttctggagcaggcatcggtgaccagactcagataggccgtaccattgcgcagtggaaggtaagtaatatcggcgacccagacctgttctggttcaagagcggtaacctgttcagggcctggtttaagcaggtttggatgtcggtagaagcgatgatgactgttggtagttttgtgatatgcccgttttactggcaccaggagtcggtattcatcgagcaggttaaacaggcggtctcgcccgatattcagccttttatcggcctgagtgttcagcagatagtgcagcttacgcgcaccgattcggggctgacgacatctgacacgggcaacaaaatcaagaacctgagcatgatgttcctgccgttttctgcgccttgtgttgtcctgataccatgcctgtctgctgtgtcccaggaacagacatgcacgcgtcacagttattttgggggccggactttgcgcgaggacttgccgggccgcttttttacgatactcaccccgtaa

SEQ ID NO: 20306 - DNA, 249 bp, Escherichia coli
ttgcattaccttgcagaccgcgccgacatcagaggccggttcagcgatgcggatgcataccatctggaccaggcctttccgctgctgatgaaacaactggaactcatgctcaccagcggtgaactgaatccccgccatcagcataccgtcacgctgtatgcaaaagggctgacctgcaaagccgataccctcagcagttgtggttacgtttatctggctgtttatccgacgcccgaaatgaaaaattaa

SEQ ID NO: 20307 - DNA, 264 bp, Escherichia coli
atgaaaacattacctgtattacccgggcaggcggccagttctcgcccgtctcctgttgaaatctggcagatactgctgtcccgactgctggaccagcactatggcctcacacagaatgacacaccttttgccgatgaacgtgtgattgagcagcatattgaggcaggcatttcactgtgtgatgcggtgaactttctcgtggaaaaatacgcgctggtgctaccgaccagccgggattcagcgcctgtacccgctctcagttaa

SEQ ID NO: 20308 - DNA, 264 bp, Escherichia coli; identical to SEQ ID NO: 20307

SEQ ID NO: 20309 - DNA, 1317 bp, Escherichia coli
atgggaaacacatcaatacaaacgcagagttaccgtgcggtagataaagatgcagggcaaagcagaagttacattattccattcgcgctgctgtgctcactgttttttctttgggcggtagccaataaccttaacgacattttattgcctcaattccagcaggcttttacgctgacaaatttccaggctggcctgatccaatcggccttttactttggttatttcattatcccaatccctgccgggatattgatgaaaaaactcagttataaagcagggattattaccggattgtttttatatgctttcggcgctgcattattctggcccgccgcagaaataatgaactacaccttgtttttagttggcctatttattattgcagccggattaggttgtctggaaactgccgcaaacccttttgttacggtattagggccggaaagcagtggtcacttccgcttaaatcttgcgcaaacatttaactcatttggcgcaattatcgcggttgtctttgggcaaagtcttattttgtctaacgtgccacatcaatcgcaagacgttctcgataaaatgtctccagagcaattgagtgcgtataaacacagcctggtattatcggtacagacaccttatatgatcatcgtggctatcgtgttactggtcgccctgctgatcatgctgacgaaattcccggcattgcagagtgataatcacagtgacgccaaacaaggatcgttctccgcatcgctttctcgcctggcgcgtattcgccactggcgctgggcagtattagcgcaattctgctacgtcggcgcacaaacagcctgctggagctatttgattcgctacgctgtagaagaaattccaggtatgacagcaggctttgccgctaactatttaaccggaaccatggtgtgcttctttattggtcgtttcaccggtacctggctcatcagtcgcttcgcaccacacaaagtcctggcagcctacgcattaatcgctatggcactgtgcctgatctcagccttcgctggcggtcatgtgggtttaatagccctgactttatgcagtgcctttatgtcgattcagtacccaacaatcttctctctgggcattaagaatctcggccaggacaccaaatacggttcgtccttcatcgttatgaccattattggcggcggtattgtcactccggtcatggggtttgtcagtgacgcagcgggcaacatccccactgccgaactgatcccggcactctgcttcgcagtcatctttatctttgcccgtttccgttctcaaacggcaactaactga

SEQ ID NO: 20310 - DNA, 1290 bp, Escherichia coli
atggaaacgactcaaaccagcacgattgcgtcgaaagactctcgtagtgcctggcgcaagacagacaccatgtggatgctgggcctttacggcacggcaatcggcgcgggcgtgctgttcctgccaatcaacgctggtgttggcggtatgatcccgctgatcatcatggctatccttgcgttcccgatgacgttttttgctcaccgcggcctgactcgcttcgtactgtctggtaaaaacccgggcgaagacatcaccgaggttgtagaagaacactttggtattagcgcaggtaaactgattaccctgctctacttcttcgctatctacccgatcctgctggtttatagcgtggcaatcaccaatacagttgaaagcttcatgtctcaccagctgggtatgacgccaccgccgcgtgcgattctgtcgctgatcctgatcgtgggtatgatgaccatcgttcgcttcggtgagcaaatgatcgttaaggcgatgagtattctggtattcccgtttgttggcgtactgatgctgctggctctgtacttgatcccgcagtggaacggcgcagcactggaaacgctgtctctggacactgcatctgcaaccggaaacggtctgtggatgacactgtggctggcaattccggtaatggtgttctcgttcaaccactctccgatcatctcttctttcgccgttgcgaagcgtgaagagtacggcgatatggcagaacagaaatgctcgaagatcctggcattcgcacacatcatgatggtgctgaccgtaatgttcttcgtcttcagctgcgtactgagcctgactccggcagacctggctgcggctaaagagcagaacatctcgattctgtcttacctggctaaccactttaacgcgccgatcatcgcgtggatggctccgattatcgcgattatcgctatcaccaaatccttcctcggccactacctgggcgcacgtgaaggcttcaacggtatggtgattaaatctctgcgtggtaaaggtaagtctatcgaaatcaacaagctgaaccgtatcactgcgctgttcatgctggtaacgacctggattgttgccaccctgaacccgagcatcctgggtatgattgaaaccctgggcggcccaatcatcgcgatgatcctgttcctgatgccgatgtacgcaattcagaaagtaccggcaatgcgtaaatacagcggtcacatcagcaacgtattcgttgtcgtgatgggtctgattgcaatctccgcaatcttctactctctgttcagctaa

SEQ ID NO: 20311 - DNA, 1500 bp, Escherichia coli
atgacggatgttattcttgatgtttcgcatattgcgaagacatttggtcatgttcaggcattaaaagatattacactctctttacgtaaagggcgggtgcatactttattaggcgagaatggtgccggtaaatcgacattaatgaaaatactggccggtgtttatccgccaacccagggaacgataacactacgtggtgaaaccatcaccattaataatccgcagcattctcgccagttagggattgcgattatttttcaggaactgagcctgagtaataatatgaccgtggcggaaaatatttatgccaataatgaaccgcgacgttttggtataattaacgataaagaaatgctcgcagattgccagaacctcctcgcggaactgggcatcccactagaccctctggaaatggtcggcaatatgtcgatggcacataggcaactggtagaaattgctaaagccttaagctatgcagcggatgtcgtgattatggatgaaccgacatcttcgctaagtgataatgaagcggagatcctgtttaacattattgaaaaattaaagcagcgaggctgtgcggttatttatatctctcatcgcatggatgaaattatgcggatttcagatgatatttcggtgatccgcgacggtgagtatatcgctacgcatgaaaagaaaaacagtgatatccagcacttgattgcccaaatggttggtcgggaaatgaaaaatatttggccagcacgtcttggggaaaaaccggatgaaaatgttcctgcaaaactggaagtaaaaaatctttcccatccttcgctttttaaagaggtcagtttcgctgtgcgtccgggggaagtcctcggattttttggcctggtgggggccgggcgttccgatgtgatgaaggcgctatttggcctcgtttcgtatcacgggactgtgttgattgatggtaaggaagtcaggatcgctaatcccaaacaggctattgatcatggcattgcttttgtgaccgaaaaccgcaaggaagaagggttagtgctgatgcacgacatcaatatgaacacgcaccatgtggcgtttcaatataacgcttcgcggatgggactcatcaatcaccgacaagaagaggcgaagacgctgcaatcaattgccagaatgaacactaaagtgagttctgtgcatcaggcagtgggagcactgagcggcggtaatcaacagaaaatcgtgttatcgaagtggctggagaaaactccgcgtattttattgctcgatgaaccaacgcgcggagtggatgtcggcgcaaaatttgaaatctataacgtgatacgtcaactggctgcggcagggacagcaattattctggtgtcctctgaactgccagaagtcatggcacttagcgatcgtctggtggtaatgcgtaataaaacgattgccgatatttattcatgtgaaaatttaacgcagacacaggtaatgaccgctgcaacaggagtacgttaa

SEQ ID NO: 20312 - DNA, 273 bp, Escherichia coli
gtgaacgccgaactggggtggggaatttacgagaaattcgacatcatgcagctacccaactttatccagtggaaaaatttaggcgcgggtgaatatgttatgggactggaggtcagtaatagttttcttgacggtcgtgataaagaacgagcgcaggggcgtctgccctttattgaaccaggggaaacaaagaaatactgctttgagctgggaattgttgatggcgatgctgaaattagcgcgttgaaagcggaaattgcaggctaccgttag

SEQ ID NO: 20313 - DNA, 1911 bp, Escherichia coli
atgtctcagcgatataaactctatcgtcgaaccagcggcatttatgttgtccgcattagcattccccaacgttttcgtcgatacgcaggacagtgtgagattcatacttcaacaggcactcacgatcttcatgaagcaaagcagaagtccgcgctcctgttggcggtctggtatcagaccttacaagagtatgaacaattggattatcgaactttaagtgactgcgccccgctgcttgctggtgagggtatgatctcgctttctaactttgctcagtcagttgagttgcctgttgcgcaattaatacaggcggtgatgaaccgtaatctgcccgtattctggctggcgacggggcaggctggcttttatgttgcagcgctctctgaggctgagctagacccgcttgatggcagttacgttcttaattatggcgaagagaagggtatcgagggggttgctaaaggctatctgcaactcactgcgcaaccagcacatttacgtaacattattagcgacggttattcagaagcttcggtgttcaaaactgccggaagcgacgctaaaggcggttggtttttcacctccggttggccggtaattaaacccgatacgcttttgatcaataaagtccatgcagaaagcctaaggcttgattggctggctaagaccacgcctccagtcgctagtgttcatcctaccgtgcctcttgccgctcctgcccctactatcgataacgagtatgttaatcgaaagtattacactaagaatctgtcgtggttatgctctgaatatctaaagcatcggcgcaagggcaaggtatcggagtcggctataagtgatatccgtaactatttcagctttatgatcgaagcgatgggtgacattcagttggaagattttgatcgcgatttcctccgggcttatgagagcaaactgcgcacgatcccagcaaaccgtaatttagtcaaagctaaatatggagtgaaaacgctggatcagttaatcgccaaagcggcagaatgcggcgataaattgatgactgaggaatccgttaggaagtatatcaacggcatttatggtgcaatgaagtgggctgttgctgacggtaagctactgaaatcgccatgcgaaaacttttttccatccgatgataaagatgagcgagatcaggatcacactgacatatttgaaccgcatgaaattaaagcgattttttcgttaccgtggtttgaggctggaactgttgaacgcaatgcgcaagggcgattccatcaatattgcccgtttaactattgggcacctttgctgggcttgatgacgggggcgcgagttaatgaaatcgctcagttactgctgagtgatgttctggcagacgacggcgtctattatttgaaccttgaaagcgataatgaaagcggaaagaaactcaaaaatgctaatgctcgccgcaagattccgctccattcaaagctgattagtctcggtttcatcgactacgtgaacgccttaaaagatgcagggtatacccgtctcttcccggagcttaaaccacataaaacaaaaggctatggtaggccagtttccgcatggttcaatgaatcgttgcttgcggggcggttgaaactcgagaggaacagaagcaaatctttccattcttttcgccactcagtttcgactttgctcaaggagaagggcgttagctcagaattacgagcgcagctacttgggcatgtgcgcggcgaaactgaaacggaagtgcgatatagcaaagacctcaaaccaattcatatgattgaagtcgtggagaaaattgatttttcgttacctgatatagcggaattcaacattcctgacgggctggatgctgtcagagatgcgttgcgaagaaagcgtggcaaacaaacaggttga

SEQ ID NO: 20314 - DNA, 333 bp, Escherichia coli
ttgagaaccgtcgagatactgcaatacaccttacgcaaaggcagcggtgccgcttttcacgccattatgcaggaaatcagtgttcccctacaccaacgccacgggatcgatgttgtttcgtttggtaactctctgcatgacccggactgctattacctgattcgcgcctttgtcagccctaaaagcatgactacggttctcgacgctttttacgcaagcgatgactggcgcagcggcccgcgcgaagacatcattggcaacatagaggccagcattaaaacagtgataaatctaccatcagaaagcgtagaagggctgcgggtgcaatcgtag

SEQ ID NO: 20315 - DNA, 330 bp, Escherichia coli
ttgagccgctgcatatcgtttgccaaaagctggggctacggtggcgtatacatggccaacctgttcgcattcgttcacacccagcgacatgaaatgatgaaagcgtctgatcccattggcaaagataacgatagccacttgatacgtcttgttagcggtgccggactggttgtcgccgcatggggaaatgaaggaagacacctcaaacgctcaacgaccgtccgacagctattgccagagagcacaatgtgcttcgtcttaaacgctacaggtgagccgaagcaccctttgtatatgaaaaacgacagtgttctcatacctttaggttaa

SEQ ID NO: 20316 - DNA, 825 bp, Escherichia coli
atgataaagccattttctgtgaggtatggtcatgttaacgttagagagcatgtccagctgaatgatcttaattctgatacacgcatggcattgtggaattgcttatatcttttcctttggactaacaatcgtcaaactgctacagcaacaaaatgtgcgcagtctgtgtggatatattatctaaatcaacctgcggataatattcctcgttatgaaagtggatacaaaagtgataagacgttgctgactgctatccgagattatatatatggggaagcatggtatttggtatatgatttaattgagttcatcattgagagaactaattcatatattaatctatcgaagcatctcaattccatctttaaaaagcatggcgttggttataccataataaatggttgtattactcctatttcaaatgataacgaaattgaaagtgttcagaacgcagttgataatggcactgattcatcgcgtagccatttcgaaagggcgttacaactaatgacggatagagagcagccagactacagaaactcgattaaagagtctatctctgcaattgaatctttatgcaggaaaatcacgggcaatgataaaggaaccttgggggcttgtcttaaagctatagaggaaaaaggatatatacactctgcaatgaaaggcgcttttagtcagctctatggttatacaagtgatcagggtggaatacgtcatgcgctaacagaagaagatgtaaatcctaccttagctgaagctaaatttatgttagtcacttgcagtgcgttcagtaattatctgttgtcaaaaataagtgattaa

SEQ ID NO: 20317 - DNA, 573 bp, Escherichia coli
atggttgacgcatcagctcaaccccatatagttgtaacacttgagccaaacccttgggccgctttttactttgatattaacattgctaatacagggaacgcacctgcctataatgttgaggttgtgtttgatcctccactagtaaatgcggagcatagagaaaaaagtgagattccgtttagtaaggtaagcgtgttaaaaaatgggcaatcacttaccagcaatctctgtaagtatgaacaaatcaaagatcaaatttataatattaatataagctgggcaagcaaacctaaatcaaacgatagagaaacaaatgaatatgtgtatgacatggcgacatttgaaggaataagttatctaggagcgagaagcccattgacgcaaattgcagaacaaattaaaggtataagagaggattggaaacctattgcacaaggagctaaaaaagtaaaagcagacgtatatacttcaagcgatagaaacgaagaacgcacgtatctgcaagagcaacacgatttggcaataaaaaggagagatgagaaaagagaaaaaagattagagtctggtgaataa

SEQ ID NO: 20318 - DNA, 564 bp, Escherichia coli; identical to SEQ ID NO: 10035

SEQ ID NO: 20319 - DNA, 705 bp, Escherichia coli; identical to SEQ ID NO: 10038

SEQ ID NO: 20320 - DNA, 285 bp, Escherichia coli; identical to SEQ ID NO: 8926

SEQ ID NO: 20321 - DNA, 714 bp, Escherichia coli
atgacaattgactatcaggtactgcgtgaggcggcagaaaaggcaacaccagacgaatgggtcgcatttatttcgacggatactggtacttatgcggtgcacacgcccggtgatgaacgatgtgaagacgttatcaaatggaccggctttgatggacagaaaaatgcagagaacaacgctcgttatgttgccgcgttcaacccaaaggttgcactggagctgcttggtgaaattaagcgcctggaggacacaaatattgatgctatgtgtcgaattgcagagcttgagactaatctcgcggcgctggcggcggagaatgaactggctcgtaaggcagttcaggcattctgcgatgttgttggcgacaacaccgaggttatcgctgaggaggttgggcgagatggcgttctggttattttggaggccatgaaggcaacaggaaatattccagccaccgatgcttttctggctgaaattcgtgcggaagcacgcaacgaggggattaactataccgccagccgtcttgctgctgcgttcaatcacggatttatcaataagtctttgcgtgaagttttcgacgttacacgcatgattttgtcagcgaaagaagagttggctaatgaagcgcatccgattgatggcctgtctggtgaatatgcggagaaatcccttgaagaatgggcggaacagattcgtaaaggaggcgacaagtga

SEQ ID NO: 20322 - DNA, 1143 bp, Escherichia coli
atgaaaacgcttccgaccgttaacaccctacagcctatcctgcataaccagctccccgttatcaccacggagctgcttgccaaactatatggctgtagcgtcgaatgtcttcacagaaatcaccaccgtaataagtcccggtttacagaaggaaaacatttcatagttgtaaaaggtacagatctccaaagtttgaaaatctctttaagagattttcaaaccatcgcgaataacgttagaaagctcatcctctggaccgaacgcggggctgcacgtcacgctaaaatgctcgaaaccgatcaggcatgggatgtattcgaacggctggaagactgctacttcaaccagaacgcgcaaacggccgcgaccgtaaccgtctcaccaaacaatgctcgtgaggttgtcgatacgctcaacgctaaaccaatgtattacgttaaggtgtgcaacaacgagccactcacaacctcagccgatgttgcccaagcattcagcaccacaaacaattccatcgttatggccatcgatgcgttacgcattcctcgcacggctgcggcgcgtcacttctttaaagaacaacgaccgctggaaggaagcgaccgcgaaataacaatctatcgcatgacaaaagacggatttaccttgctcatggaaagtatcgacggtccaggcgtgaaggatatcaagctggcctacattgaagcctttaacgctatcagcagcgtgttaaaggcagaatacgagcgaatgctatacaaccgactgtatcaggaaacaaagattatccgaacggcaacagaacatcatcggctattaacggaaccaaactaccgcaagacactaatcaaagagtttgacaaggcgacggagaaaactaaagcggcactaaatctaccaacaatgactaaagatgatgtgatatcagccttacttcttgatctgctcagaaacgccagagcacttatcagttttgacgaaaacctgaatcctcagctcaagctactaccaccgacaggcaaagtaatcgaccaggctgatcacaacagcatactcagcgtactggatgcaaacctgccagccaggacactacaggatctgataaaaacatgtgctgataagctggcacagaaaagcagaccataa

SEQ ID NO: 20323 - DNA, 528 bp, Escherichia coli
atgatgcacttaaagaacataaaagcgggtaacgctaaaacactggaacagtatgaattaacaaagaaacacggagttgtctggctttactctgaggacggtaaaaactggtatgaggaagtaaataactttcaggacgacaccataaagattgtatacgacgaaaataatattattgttgccataaccaaagatgcctcaacgcttaatcccgaaggctttagtgtcgttgagattccagatataacagccaatcgtcgtgccgatgattcaggaaagtggatgtttaaggatggagctgtagttaaacggatttatacggcagacgaacagcaacaacaagccgaatcacaaaaggccgcattgttttccgaagctgaatcagtcatccagccgctggaacgcgctgtcaggctgaatatggcaacagacgaggaacgcacacgactggaagcatgggaacgctacagtgttctggtcagccgtgtggatacggcaaatcctgaatggccacaaaagcctgaataa

SEQ ID NO: 20324 - DNA, 534 bp, Escherichia coli
atgatgcacttaaaaaatattactgctggcaaccctaaaacaaaagaacaataccagctaacgaaacaatttaacatcaaatggctttatacagaggatgggaaaaactggtatgaggaacaaaagaactttcagcctgatacgttgaaaatggtctatgaccacaacaacgttattatttgtattgaaaaggatgtttcagcaattaatccagaaggcgcaagcgtcgttgaggttcctgatattacagcaaatcgccgggctgatatttcgggtaaatggatgttcaaagatggcgtagtgataaagcgaacttataccgaggaggaacagaggcagcaggcagagaatgaaaagcaaagcctgttgcaacttgtcagggataaaacccagctatgggactcacagctacggctgggcatcatttccgacgagaataaacaaaaattaaccgagtggatgctctatgcgcagaaagtcgaatctacagacacctccagcctgccagtaacatttcccgaacaacctgaatga

SEQ ID NO: 20325 - DNA, 1902 bp, Escherichia coli
atggaaatagtatcatttaaagtttctcagtataggtctatttcaggggagatatcctctgataactttaatggattaaccattgttgggcaaaacaacagtggtaaaacaaacctattaaaagctatgagggttttttttgaaggaaaatttaatcctgacttatatgactatgaaaaagataagccacatggtgttaagcaaggacaaactagttttgctgtaagatttactttttctgaaagtgagctagatgatgtctctgaggatttgagccaagacgatgatgatgacgatgatgactcgattattgaacttggtgttttaggggggcaagaagaacctagtaattctatttcatttgatgatggcagctctaaacaacaagaatcaaaaccaactcaatcaagaggcagaaagctaagtttgagagatagatatttgcagctatttaacatgattgatgactccaggttaagttcacctcaaaacgaagtgaccgtacatctgacaatatctaataaaaacaattacttctacactgtctttaaaggttacaagaggaaacctgaagtaacttcctccatgtatacatctgttgaaagaaggttcatagaaaaaatactttctagttttgagtgtgtgtatataccatcgtcaaaaagtattgatgatatatatcataatctattagttccatatgttaggagtgaagtagcttcagccatgaaaacatcggttcaagtgattcatgataaactgttggaagtgtctgaaaagataacaaatgaaatgattctaagcggtatagatgactgtagctttatgattaaagctccgccatctcttgatgagttatttggtcgctttgaggtttcaataaaagatactattgagaatgtgatatcgagtaaaggtatggggctacaatgcttatctttattttcttcatttaaatctatttcagagagaaaacttactctaggtaagaaaacgatttggatggttgaggagcctgagtctttcttgcatccctcattaggccggtcatgtaatcacattttcaaatcactgatggatgttgcttatgttcttattacaactcattccttatcatttgtcagtgatgagccaagtaagatcattgagttatataaagatgacgccggtgttacaaaagataaaaagcatgaaaaaagatttaatgcagttgcaagcataagagaaaatcttggggtcagattttctgatttctttaacatatcaagtagtgcagttttcgttgaaggtatcaccgacaaacaatatatagaatcaatattgaaattgacatctgaacatgatgagtttaagaacagatggccttttctgaggagtgctaaagttgatgagtttggtggagtcagtcaacttggaggattcttgaaagggtgctacgagtttatttctaaagatgtccccgtaatatctgtttttgacggtgatgaagctggggtcaaagaaagaaccagattacaaagctactttggtaaaaaacaaattagatttgagtcaaataaagactatatttctgtaagaagtggttttgctattgaaggcctcttccctgacgatttcatttctgacgcaatggaaacccatccgtcgtggtttatcggaggaaaatctgttgatgccgatgatgtaattgaaccattcaaagtgcaagataataaaaaaactaacttattaaatttcttcctggaaagatgtcgtgttcaacctatatgcggttggatttctcggtgggaaaaggtgtttaacgtcatagactcagccttgcgagataaaagtgaatccatcacaaacaaaaaacgaaccgaagatacttccggtaacacttcagatcatcaagctgcataa

SEQ ID NO: 20326 - DNA, 237 bp, Escherichia coli
gtgtccgacaacaaaaattctgatcacaaaaaaattttggacattttttccgataatgcatttttgtccatgatgaatgaacgacagggcagggaaagtcgcgcaagaggcagcggactgaatcagcccttcacacacaatggcacacggaaagacacgtttgtgtctgtcccgaagagtgtttctgaaatacagggcacgacagcgatgtatgcacgtaataaattccgtgtataa

SEQ ID NO: 20327 - DNA, 207 bp, Escherichia coli
atgtgcctgagcaatagtttcccgccattgttcgatgacggcggccatctctttttgttgttcaacctggacagagaagcgatcaaaccagctcaaagcaaatttcccctgaaacagatcctgtgtgacgcgctggaacgtaatcagacactcggggagttcaccgtcaaaaaggcgctggttatagaaatcaaacgcctgttgtag

SEQ ID NO: 20328 - DNA, 330 bp, Escherichia coli
atgattgatgtcttaggaccggagaaacgcagacggcgtaccacacaggaaaagatcgctattgttcagcagagctttgaaccgggaatgacggtctcccttgttgcccggcaacatggtgtggcagccagccagttatttctctggcgcaagcaataccaggagggaagtcttagtgctgtggccgcaggagaacaggtcgttcctgcctctgaacttgctgctgccatgaagcagattaaagaactccagcgcctgctcggtaaaaaacgatggaaaatgaactccttaaagaagccgttgaatatgggcgtgcaaaaaagtggatag

SEQ ID NO: 20329 - DNA, 234 bp, Escherichia coli
atgacggcgggaacactttgtataacagcgcagcaggttttttgttccgctaccccggcgttaaggggaaatgaggtcaacatggatacgctcaatcttggcaacaacgaatctctggtatgcggtgtgttccctaaccaggacggcaccttcaccgcgatgacgtataccaaaagtaaaacgtttaaaaccgcagctggtgcgcatcgctggttagcaagaaacactgactga

SEQ ID NO: 20330 - DNA, 279 bp, Escherichia coli
atgttacccgtgttatggcttgaaagcgcagataccgacctagatgatataactagttatattgctcgtttcgacatagatgcggctgaacgcttatggcagcgattaaggggttgtgtgctgccgttatccgaacatccgtatttatacccaccaagcgacagagtacctggcttgcgtgagattgtagcccaccctaactatataattctataccgcgtaacaacatcaagcgttgaagtagtaaacgtgatccacgcaagacgccagtttccctaa

SEQ ID NO: 20331 - DNA, 192 bp, Escherichia coli
atgaatagagccctttcaccaatggtttctgaatttgaaaccattgaacaagaaaacagttacaacgaatggctgcgtgcgaaagtagcaacgagccttgcagatccgcgcccagcaattccccatgacgaagttgagcgcagaatggcagaacgctttgctaagatgcgtaaggaacggagcaagcagtaa

SEQ ID NO: 20332 - DNA, 372 bp, Escherichia coli
atgcaaaaaaaagaaattcgccgtttacgtctcaaggagtggtttaaagataaaactctgccacccaaagagaagagctacctatctcaactaatgagtgggagagcctcgtttggagaaaaggctgccagaagaatagagcaaacatacgggatgccggaagggtatctggatgcggaatacgcagaacaaccgggggtttctccaccacatgcagggttaacgtctaatcaactggaattattgcagattttttcagccttccctgaggatgagcaacgccagataatcagcgagttaaagcagaaaaaagaatcaatggaagatctcatagcgagatggattgcggcgcaaaaatgccgccgcgcctga

SEQ ID NO: 20333 - DNA, 303 bp, Escherichia coli
atgacattaaaagagtttattaaatcattaagggttggtgatgctaagaaattcgcggccagacttggtgtatcgccatcttacttatcgcaaatggcgtctggacgaacagctatatctccaacccgcgcccttatgatcgaatctgcgacggaaggccaagtaagtagggcggagctacgaccccatgattgggagcttatttggcctgagtatgcgagcggcattcgtttggggcaaacacatgtagttcatgctgaaggtgattgtagtacatgcttatctgatggagttgattcatga

SEQ ID NO: 20334 - DNA, 213 bp, Escherichia coli
atgtcaaatacacagaaaattattaacactgaaaaatataacgagtgggtgaaaaaattctctgagcagatttttaaaattactggcgacgagaatgtggcaaaaaatgaattagaaccgtggacacctgaaggaaacgcaccaaattattgctggtgggaggttgatccggttgatgctgcaaatgaagccatgagttaccacaacgattaa

SEQ ID NO: 20335 - DNA, 219 bp, Escherichia coli
atgactacattattcagaaaagaatatccgcaaaaaagtagggcaacagaatttttgtttctcattctgtttatcgtattgatgataccgatatcccctctaatttttgtctgggcaatcgggaaaataattgagccagttactgaattgtataccgacgttgtatgggcgtcgttcaacacactgcacaataaaattaatccgtataaggaaaactga

SEQ ID NO: 20336 - DNA, 144 bp, Escherichia coli
atgaccactattaccaaagaacgtattgaattgttcattaaattttcaggaggcggtactgtgagtgaaattagctatcaggcttcaattaccgctggcattcgcatcaaaggagaggagcatggaaataaaaccagaggatga

SEQ ID NO: 20337 - DNA, 177 bp, Escherichia coli; identical to SEQ ID NO: 6043

SEQ ID NO: 20338 - DNA, 555 bp, Escherichia coli
atgatatatccggaaattacaggcaaaagcggcgagcatttacgtctaaaaacgctggaagcagtctggatccaggggaaattacggatgtgggggcggtggtcgtatattggcggcggtaagacgggaaatatgttcaaccaattactgacctctaaaaagctgacaaaaacggcaattaacgaggcgctccggaggatgaaaaaagctggtctggacaaacctgaacttgaggcttttttgcgggatatgatcaacggcaatcaaaaaagctggctggcacattgtaccgattcagaggcgttaataatcgacagggttattggtgaagtcctggcaggctatcccgggctgctcaatgtcctgagtcagcgttatgtggggcgggggatgactaagcgcaaaatggctgaactgctgaatgatgcacacccggaatggagtttaagaacctgtgaaagacgcattgagcattggctaaaggtggcagaatttattttgtacaaaccaatggttatggcttttggtatagagaaaaaagttattgctttttga

SEQ ID NO: 20339 - DNA, 198 bp, Escherichia coli
atgctaaaacagcaggatatgaccgaaaccgccagagtggtgtttaatgagttaagcgtcaccgaaccggcgacagtcggggagattgcacagaatacttacctttcacgcgaacgctgccagttaatactgacccagcttgttatggcgggtctggcagactatcagtttggttgttacagacaccttcagtcctga

SEQ ID NO: 20340 - DNA, 534 bp, Escherichia coli
atgaacaccaaaatcaaatacggcctgtcggctgccgttctggcgctgattgccgctggtgcgcctgcgcctgacattctcgaccagtttctggatgaaaaggaaggcaaccacaccacagcataccgtgatggtgcaggtatctggaccatctgccgtggtgccatcatggtggatggcaaacctgtcgttccgggcatgaagttgtcgaaggaaaaatgcgaccaggttaacgccattgagcgtgataaagcgctggcgtgggtggagaaaaacatcagagtgccgctgaccgaaccccagaaagcggggatcgcgtcattctgtccgtacaacattggtcccggtaagtgtttcccgtcgacgttttacagacgaattaatgcaggtgatcgaaaaggtgcctgcgaagcgattcgctggtggattaaggacggtggcagagactgccgtattcgttcaaacaactgttacggtcaggtatcccgtcgcgaccaggagagtgcgctggcgtgctggggaattgacagataa

SEQ ID NO: 20341 - DNA, 459 bp, Escherichia coli
atgctttccgcgtttatcgttattctgctggtggcctgtggtgcgctgtggatggcaacagaccattaccgtgataacgcgattacctacaaagcgcagcgcgataacaaagccagtgaactgaagctggcgaacgcaaccattactgatatgcaggtgcgccagcgcgatgttgctgcgctcgatgcaaaatactcgagggaattagccgatgcgagagctgaaaatgaaactcttcgcgctgacgttgccgctggtcgtaagcgcctgcggatcaacgccacctgtccaggctccgtgcgtgaagcccccaccacctccggcgtggataatgcaactggcccccaactggcagacaccgttacacgggattatttcaccctcagagagcggctgatgacgatgcacaagcaactggaaggggcacaggactatatccgcactcagtgcctgaaataa

SEQ ID NO: 20342 - DNA, 261 bp, Escherichia coli
ttgcgagcgggtaatggatatcttaccgtcacgcaccgcaggccagataaactgaccttcctcaaggcgtttggtgaacaggcacagaccatcagcatcagcccacaggattttaatcgtgtctccccgtcggccacggaagataaacaggtgaccggagaaggggttatcatccagcacatgctgtatctgctcccccagaccgttgaaggatttacgcatatcagtaacgccggcaacgagccagatacgggtacctga

SEQ ID NO: 20343 - DNA, 534 bp, Escherichia coli; identical to SEQ ID NO: 7078

SEQ ID NO: 20344 - DNA, 303 bp, Escherichia coli; identical to SEQ ID NO: 6057

SEQ ID NO: 20345 - DNA, 1437 bp, Escherichia coli; identical to SEQ ID NO: 8053

SEQ ID NO: 20346 - DNA, 549 bp, Escherichia coli
gtgaaccgccgcagttcgggcagcacggcgccgcaggcaacagtcgcttttcgtcacggggtagtgattcagggaacggcttacgggtgcgggtctgacgcaacggacgctgtactgccgggtcatacaccctaccagtcagcgtatcgctctctttctgaagccggttcagatcggcttccatttgtgcgatacggcgggagactttttcggaacgactgccgaagttcatccggcggagtttatccagctgcgcctgcagatggtctatttcgcgctcccggttgctcagcttttcctgcagggcgtggatcagcgcttcctgttcggccaggcgctgtttcagcaggaaaatgtcgtcagaagagatgtcgttcatacatcgtgtatttttcgccgggcatggacccagcacgcaacttctgtctgtgcaccaccttcacgtttggcactgaacagccgatcgtaaccgctgaatgcatccgcctgcaggataccccggaagggacgaaggtgttgtaccggatgttttccctgcctgtctggtga

SEQ ID NO: 20347 - DNA, 846 bp, Escherichia coli
atgtctgatatcacagcctcccgtccggaagtggtcaacgggcatacggaagttatctgctcaaccagtatccaccacattctggctgtacgaaaaagtacactgctgcaaatcgacacacttatccggcaactggctgaaatctcagttctgacggaaagcattggaggtaaaaccacccgggactgggccatgaaacaggattttcgctgcggctgctggctcatggagaaacctgaaacggcaatgaaagccatcacccgcaaccttgaccgtgaaatctggcgtgacctgatgcaacgttccaggatgctttccttaatggatgcgcaggcccgtgatacatggtaccggtcactggagtacgataattttccggaaatcagcgaagcgaacattctgagcacatttaaacaactgcaccagaacaaggatgaggtgtttgagcggggagtgatcaacgtcttcaggggactgagctggaattataaaaccaactctccctgtaaatttggaagtaaaatcattatcaacaatctggtgagatgggaccggtggagatttcatcttatcaccggacaacagactgaccgactcgccgatctggaaagaatgctacatctgttcagcgacaaaccgattcccgacaaccgggaaaacatcactattcgtctggatggtcacatccagtccgttcagggtaaagagcgctatgaagacgaaatgttcagcatcagatactttaagaagggctccgcacacatcacgttcaggaaaccagaactggttgacaggctaaatgacataattgccaggcactatccaaatgtattagcagacaggtaa

SEQ ID NO: 20348 - DNA, 186 bp, Escherichia coli
atgtttgagtttattggttttttatttttgcttttggtgtgttatgtctttatacaaatggttgctgtcagggtgtttcctgaatatggagtacggaaagcggaggaacgataccgtcgaaatccatcagcagaaaatgaggatctgttatggagagctagaagtcgtataactaaacgcaagtaa

SEQ ID NO: 20349 - DNA, 183 bp, Escherichia coli
atgcttacatttattggtgtagtggtagtcgccgttattgcatttaaattatttatgcttttttttagttcatccgaatctgccgtcgaacgtgctacccgtaaatatatggagaaccctacgagtgctaactataaaataatggtggctacacgcatgagaaatgagaagaaaagagggtga

SEQ ID NO: 20350 - DNA, 519 bp, Escherichia coli; identical to SEQ ID NO: 5755

SEQ ID NO: 20351 - DNA, 1221 bp, Escherichia coli
atggacgaaaaatccctctatgcccatatccttaacctgactgcaccatggcaggttaaatcccttaccctcgatgaaaatgcaggttccgttactgttacagtcggaattgctgaaaatactcagttaacctgtccgacctgcaggaaatcctgttctgttcacgatcaccgacatcgtaaatggcgccaccttgatacctgccagttcatgacattagtagaaaccgatgttccccgcgttatgtgcccggagcatggctgccagactctgcctgtaccgtgggcaggttccggcagtcggtacactctgctgttcgaatcgttcgtgctctcatggcttaaaatcagcaccgttgatgcggtcagaaaacaacttaaacttagctggaatgccgttgacggcatcatgacccgcgcggttaagcgaggcctgtcgcggattaaaaagcctttatcagtgcgtcatatgaatgtagacgaagtcgcctttaaaaaagggcataggtatataaccgtggtatctgatcgcgacgggcgggcactggcattaaccgatgatcgtggcacagagagtcttgccagctatctccgttcgcttactgacagtcagttgttggccatcaaaacactgtcgatggacatgaatgcgggctatataagagcagcgcgtatccatttacccaatgcggtcgagaaaatcgccttcgatcgcttccatgtggcgaagcaactgggcgaagtggttgataaaacccgccagaatgaacatccgcacctccctgttgaaagtcgtcgtcaggccaaaggtacccgcttcctgtggcagtacagcgacaaatggatgactgagtcccggcaggaaaagctgatgtggttgcgggaacagatgcaacagacaagccagtgctggacactgaaagagctggcaaaaaatatctgggatcgcccctggagcacagaacgcaggaatgactggttgcagtggatatcgctggcgtctgaatgtgatgtgccgatgatgaaaaacgcagcgaaaaccattaaaaaacggttatacggaatactgaatgcaatgcgtcatcgcgtctcgaatggaaatgcggaggcgctgaacagcaagatcagactgctgaggataaaggccaggggataccgaaaccgggaacgctttaaactgggagttatgttccactatgggaaactgaatatggcgtactga

SEQ ID NO: 20352 - DNA, 324 bp, Escherichia coli; identical to SEQ ID NO: 9030

SEQ ID NO: 20353 - DNA, 801 bp, Escherichia coli; identical to SEQ ID NO: 9029

SEQ ID NO: 20354 - DNA, 273 bp, Escherichia coli
atgaatctgtccggcatggctgaggtcatccaccaccgactgaaccgtggcgttatcggggatattccaggtggcaccggatgtcagggtgacattcgtggggtcaatggcaccgttcagcactgtgctgccggtcagcttcagggccgtgccgcgatgagcgatgatatccgtggtgacggtactgtcgttcagcgtcagcgtgccttcattcaggttgacggctttctgggtgagtgtggtgttgctgacagtgagtgtgccacttcctga

SEQ ID NO: 20355 - DNA, 273 bp, Escherichia coli; identical to SEQ ID NO: 9952

SEQ ID NO: 20356 - DNA, 348 bp, Escherichia coli; identical to SEQ ID NO: 10992

SEQ ID NO: 20357 - DNA, 141 bp, Escherichia coli
atgctgaaaggcgggatttccggtcgcagtgcaaaaggaaaacgtatccatacccgggccattcacagcatcgataccgacattaagctcaaccgggcgttgtgggtgatggcagaaacgctgctggagagcctgcgctga

SEQ ID NO: 20358 - DNA, 735 bp, Escherichia coli; identical to SEQ ID NO: 11104

SEQ ID NO: 20359 - DNA, 534 bp, Escherichia coli
gtggcgaccgtcatcacttccggtcagcacatcgtgcgttttccccttgttgtcagttacgcggagataatccccggagaaagtcgacacacggctgtaagccacacccaccatcgcatacgcgctgaaccattcattcacgcgtacagacggccccgccatcacgctgaaccagcggttacgcacggaatcttcatgccagcgggtatcgctgtagtgcgttttttgctcatcctcagcattggcataactgaaggacgtaatcagccccagtgtgtccgtaaactcataacggtatttcacgttaatcccgttaagatcatcgctgccgggaacgttcgtcgaggcatgaagatagcccgcgctcagcgtggactgatgttcagatgcccatgcaggcgcaccggatacggacagacagatggctgcggacaaaatggctgcacaaactttacgcataattacctctcgcttttctgcaataaaaaaggcgccatttctggcgcccgtattggggttataaaattcagctaa

SEQ ID NO: 20360 - DNA, 171 bp, Escherichia coli; identical to SEQ ID NO: 12692

SEQ ID NO: 20361 - DNA, 402 bp, Escherichia coli
atgtacgcaaaatcctttatcgctcttgatggcaacggacgtctgacgggcgcccgtactgtacaggccgcaccttatgctcactacacctgccacttgtgtggcagtgcactcagataccatccgcaatacgacactgaacttccctggtttgaacacactgacgacaggctgacagagcacggtcaacagtgcccttatgtcaggccggagcgcagagaaatacagttgattaaacgtctgcagcaattcgtaccggatgccttacccgtggtgcgtaaagccagctggcactgcagacaatgtcaccacgattattatggggagcggtactgcacacactgccagaccggaggattcagtattccccggacaactcaggaggaaatatgcgaattctga

SEQ ID NO: 20362 - DNA, 240 bp, Escherichia coli
atgcggggctatgcggaaggggggtatgtgggtgctgccggaagtccggcgcaaatgcggcgttcagagggtatcaggtttgagcagaacaacaacgtggtgattcagaacgacggtacgaatggtctgccaggtccacagatgatgaaggcggtgtatgacatggcccgcaagggtgcccgtgatgaaatccaggcacagatgcgcgatggtggtctgttctccggaggtggacgatga

SEQ ID NO: 20363 - DNA, 231 bp, Escherichia coli; identical to SEQ ID NO: 15042

SEQ ID NO: 20364 - DNA, 231 bp, Escherichia coli; identical to SEQ ID NO: 15042

SEQ ID NO: 20365 - DNA, 261 bp, Escherichia coli
atggaaagtacttataatacatatcaaggcattagagtttttgatttttccggaaagcttttatctgaaaaaattttccatccaaatgaaatgatgaatgttctcaaaaaaatgggcttaacagtttctagaattgaaaatgagggagtgatagtcaagaataatactatttacagtatgtatatttatagtgatagataccatcataaaacctccagaagtgaagggatcattattctactggatgaatttactcaataa

SEQ ID NO: 20366 - DNA, 180 bp, Escherichia coli
atgaacattgtcgatcaacaaacctttcgcgatgcgatgtcctgtatgggcgcggcggtcaatatcatcactacggacggtccagccgggcgcgccgggttcaccgccagcgccgtctgcagcgtgaccgacacgccgcccacattactggtgtgcctgaatcgtggggcgtccgtctga

SEQ ID NO: 20367 - DNA, 1374 bp, Escherichia coli
gtgcgatccattggcctggtgcaagacggcacactttattgctccagcatttttggttatcgcaatgtgcccgtcgtggacattctggctgaacttcctgcaccgcaaccacttttacgactgacgaccgaccgtgccctgataaaaggcagtccggttttgattcaatggacgcctgcagcgggcagtagcaatgctggggtcatggagatgattaacatcgacttactgacggcaatgctccttgaaccacaactgccgcaaatcagtagcgccagcctgacggtggacagtcggcatttgctctatggtaatgggctggtagattcccttccgcaacctgaaaacaatgaaaactatcaggtttcttcgcaacgctttccttttaccattaacgttaatggcccgggggctacggcgctggcatggcactatcttccaacacaattaccgctggcggtgctgctaagtttactggtgggctacatcgcctggctggcgaccgcttaccgaatgagcttttcccgcgagatcaatctgggcctggcgcaacatgagttcgaattgttctgtcagcctttgcttaatgcgcgcagccagcaatgtattggtgtagagattttgctgcgctggaacaatccgcgtcagggctggatttcaccggatgtgtttattcctatcgcggaagaacatcatttaattgtgccactaacccgctatgtgatggcagaaaccattcgtcagcgccatgttttcccaatgagtagtcagtttcatgttggcattaacgtcgcacccagccattttcgccgtggtgtgctgataaaagatctcaatcagtactggtttagcgctcacccgattcagcaactgatcctcgaaatcaccgaacgcgatgccttactggatgttgattaccggattgcccgcgagctgcatcgtaaaaacgtcaaactggcgattgatgacttcggcaccggcaacagttcattttcctggcttgaaacattacgtcctgacgttctgaaaattgataagtcatttaccgcagctataggttctgatgcggttaactcgacggtgaccgatatcatcatcgcactggggcaaagactgaatattgaactggtggcggagggcgtagaaacgcaagaacaggcgaagtatttgcgcagtcatggcgtgcatattttgcaagggtatttgtacgcacagccgatgccgctacgtgattttcccaaatggctggcgggcagccaaccgccgcccgccctaatggacatatcacacccattatgccgttacgttaacgcttactcatcttcatcgtgcgccggttgctctttaacaatgcgaaccagatcaacacgataa

SEQ ID NO: 20368 - DNA, 309 bp, Escherichia coli
atgactgataaatgggctgattaccttatttctaaagtccgatataacgataaacacactcacattacccatgtgtatgtgcatgtcgataatggcgatactgttggagaagggacatcagaaacacggcagtgggtagtgaataaaatcgatagcggctataccttttacaccattttcaaaggtgatgacggtaagtggaagaaaggtcaaaaagtggttaaggaccgtgtcaacggtactgattacattactactagacctaatggtacatccaaggataacttagaaaaccttcctgagtactaa

SEQ ID NO: 20369 - DNA, 1662 bp, Escherichia coli
ttgaccgtctggaatgagtacgcaaatgcgataaaaacgggcgaaattccggcctgtaagcgcgtaaaacaggccgtggaaaggtacttttcagacctgaatgacccccgatatgagttcgatacggcgaccgtagagcggtttattgcgttctcgcggctctgtcctcacgtcaaaggcccgcttcggggccagccaatcgatctggaaccgtggcagcagttcgcctttgctaacctgctgggctttaaagtcagagagacaggccgccgtaagtacagcagcgcctttattgaggtgccgcgcaagaatgccaaatccaccgtggccgccatgctggctaactggtttctggtaatggagaagggccagcaggatatctatacggcggcggtgagccgggatcaggcccgaatcgtgttcgacgatgcccgccagatgtgcctgttgtcaaaaccgctgaaaaagcgcgtaaatattcaggcgcataaagtcattttcccgaagagcaacagcctgctaaagccgctggcggcgaaagcgtccaccattgaagggactaaccccagcctggcgattgtcgatgagtaccaccttcacccggataacggcgtttattccgcccttgagctgggtatgggcgcacgtcctgaggctattttgttcgccataacgaccgccgggagtaacgttgtctcagcctgtaaacagcattacgactactgttgtcagattctggccggggaagagagcaacgattcgctgtttgtcctgatctacgagctggacgacgaaagcgaggttgagcagcctgaaatgtggatcaaggccaaccctaacctgcatgtgtccgttgacgcggcgaagctggaatccaccatccaaaaagcgcggggtataccgtcgcaatgggtggagatgctgaccaagcgtttcaatatctggtgtcagggttctacaccgtggatgggtgccggggcatgggatgcctgtgcactcgattatgccgaagaagatctggtcgggatggagtgttacgccggatttgacctgtcctcaaccagcgatattaccagcgtgagttacgctttcccgtttgaacgcgagatcaggcttcttactcggcactatctgcccgaagcgcagctacttaacgttgctaacaaaaaccgcgccatctatcgccagtgggtaaaagcgggctggatacgaaccacccccggcgactgtatcgactatgaccgcatccgtgacgatatcctgcgcgatgctgaaacattcaatatccggctggtgggctttgatacgtggaacgccactcacttgcgaacccagttacagggggccggcctcgatgtggagccgttcccgcaaacctatctgaaattcagtccggtagcgaaatcttttgaggtttttgttaaccgcaaggtggtgcgccatcgtggcgatccggttctggcttgggcgattggtaacgtggtgatggagtccgacgccaacgccaatatcaaacccaacaaaaagaaatcctccaacaagatagacccggcggtttctgcactcatggcgttcggcacattccaggcagaacacgaagattttgctttcgatatgagcgacagtcacaaagagcgactggctttatttaatgggatttga

SEQ ID NO: 20370 - DNA, 357 bp, Escherichia coli
atggcaagaccaccaaaaccgccagcttaccttgatgagttagccgcgcagcagtggaaagcgaaagcgaagcaactggccgagcgtggcgatctgacacccgccgactggaacaaccttgagcttttttgcgtcaactattcgatgtaccgcaaagcagtggaagaccttgccagccgtgggttcagcattgttaacagccaggggggcgagagccgaaatcctgcactgagtgcaaaggccgatgctgaaaaaatcatgattaaaatgtcgtcgctgctgggctttgatccggtaagccgccgccgtaacccggtagaaacggaagaggaggacgagcttgaccgtctggaatga

SEQ ID NO: 20371 - DNA, 192 bp, Escherichia coli
atgcttccgcaaccgctgacaggccgcatggacggggtgggggaggttttcaggacaaacctcaaggtgccaggcaccgcccgccccctcaaatttttacgcacggtgatttttttgaaaataaaacgcgatggaaacgagaaatttttatggcaagaccaccaaaaccgccagcttaccttgatgagttag

SEQ ID NO: 20372 - DNA, 153 bp, Escherichia coli
atgaatgagaaagacgtggtgaatctgtaccgatcattgatgcgctgccgtgatggcttcatgcaggggagaagcaggcgcaatgagcgccagcctgtgcagcgtatgagcgagcgtgaacgggagttgcgggaatgcttccgcaaccgctga

SEQ ID NO: 20373 - DNA, 444 bp, Escherichia coli
atgccgtggcaaccaatgcgccggtgcactgagccgggatgcaataagcgggtgaagtctggtaagtgcgatgagcacaagcgggaagcctggcgggcggaagatgccagacgcggccaccgtcgcgcccgtggttactcagcatcatgggagaagtaccgcgctcagtatctgaaacgtcagccgctatgtgtcgagtgccagaagctgggcctctacgttcctgcaaagattgtcgatcacatcatccctatcgacggcggtgatgatgttctgttctggcctgagtggaatcaccagccgttatgccagatgcatcataaccagaagaccacgcagcaagaccccatcaccaaagcgaaccgtaaggcagggctgtaccgagagcaggaagagcgtgcagcccatcgcaatgactggatgtatgaggccagcaatgaatga

SEQ ID NO: 20374 - DNA, 300 bp, Escherichia coli
gtgagtgaactaattgggcttgatgaggcaaaacttcactgccgcatcgataacgatgattcctatgaagatgcaatgattcaggcatacatcgaagcgtcactggaagtctgccagaagcatatcggtaaacggttcggtgctggcctggaattcactcctgccatcaagatcggatgccttatgtacgtttcccaactgtacgaataccgcacgatgattagtgatgtggaggcgaaagagatcccccttgctatctctgcattgtggtctgtgtatcgcgatgtgggggtgtactga

SEQ ID NO: 20375 - DNA, 336 bp, Escherichia coli
atgaggccgggaggattaaggcaacgcgtcacgattcagaattttactaccagccgaaccccttctggtggcgtcattcaggaatggtacgacgttgcgacagtctgggcagaagtgaaggggatcagtggccgtgagctgattgctgcgggtgctgaaatgtccgaggttacatttcgtatgtggatacgttaccgctctgacgtaaccagcgccagccggatcatctggaaacagaaaggacatgatgcaaaagcatttgatattcagtcggcaattcctgatgaaaaggctaccaggctggagttgctttgtaagggagggcttaagccgtga

SEQ ID NO: 20376 - DNA, 1188 bp, Escherichia coli
atgaccattgatgaatttctggcgatggcagggattccaaataccggatcaggcgagtatgtgtctgcgggtactgcggaatctctgccggcggtcatgaacgccgtatcagttatcagtgaggcggtggcaacaatgccctgctacctctaccgcgtgcgtaatgataacgggcgtgaggcgcgagaatggctgagcaatcatccggtggattttctgctgaacgagcagccgaacgactgccagacaccttaccagtttaaacgcacgatgatgcgccattgtctgctgaatggtaacgcctatgcggtgatccagtggggccgcgacggccagccgcaatccctgcatccgtatgcgccgggggcggttgttcctgagcgtatcggccagcataagtacaaatacaccgttactgaaccgtttaccggggcagtgcgcacctacttgcaggaagagattctgcacctgcgttactcgaccgatgatggttttctggggcgctcgccgatcaccatctgccgtgaggcgctggggttaggtctggcccagcagcgccacggtgccagcattatgaaagatggcatgatggcggcgggcgtagtcacgactgctgaatggctcgatagtgtgaagggtaagcaggcgctggacgcgcttgagcgctacaaaggtgccagaaatgccggtaaaacgccgatccttgaaggtggcatggactataagcagcttggcatgagcaatcaggatgctgagtggttggcctcccggcgcttcaccatcgaagatattgcccgcatgtttaacgtttctcccatcttcttgcaggaatacagcaacagcacctacagcaattttagtgaggcgagccgcgcctttcttaccatgacaatgcgcccgtggctggcgaactttgagcagcagattaaatccgcgttgctggtggcatcgcctgtacccggaatccgttatcaggtggagttcgactctgccgatcttcttcgagccactccaaccgaacgctacgcaacttatgagcgcggtatcaagaacgggatcatgaacccgaacgaagcccgcgaacgcgaagggatgccgccgcgtgaaggtggcgacgaatacagccaggcatggaagcaggaagtgaaggtcagtaccgattctgagactaaggaggatgcgttatga

SEQ ID NO: 20377 - DNA, 561 bp, Escherichia coli
atgaaaacaatcgattttgaaatccgtacctccgaagtgagcgccagcaacaaaaagctggtgggctatgccgtacgctggaacagtctctctgaaattatctgggacgagttccgcgagcagtttgcgccgggagcgtttaaagacagcctggcatccggtagcgatgtgcgtgcgctgtacgagcataactatacccagctgctgggccgcactaaatccggcacgctggtgctgtcagaagatgataccgggctgcgcttcgagctgaccccgccgaatacccagcttggcaacgatgtgctggagctggtggagcgtggggatatctccggcatgagctttggtttccgggcgctgaaagaggcgtgggatatcggccagtctccatacctgcgcactgttaccgcagccgaactgcgggagattaccgttacctctatgcctgcttatcctgagtctggagtggaaatcgcgcaccgttcgcttttctcccaacatcctgaactgtaccgcgctggcgataaccgtcgccgctgggctgaattagcggggctctga

SEQ ID NO: 20378 - DNA, 1167 bp, Escherichia coli
atgaagaaactactcgaattacgccagcagaaagccgcactcaaaacacagatgcgttccatgctggacaaagccgacaccgaaaagcgcagcctgaacgaagaagagggccaaaagttcgatgaactccgcgcccaggctgatgcgcttgaagttgaaatcacccgtctagaagccgtcgccgacgatcagcgcaatctgcctggtacttccgttgaaggtgagccagtaagcaacgacgagctgcgccactacatcatgacaggtgatacccgttctctctccacgctggtgcaggctgatggcggctataccgttatccatgagctggacaaagagattatgcgccagttgcaggatgatagcgtgatgcgctccatcgcaacggtgaagaccaccaaaaccaacgaataccagaagctggtatctgtgggcggcactaccgttaatcgtggtaccgaaggtgaggcacgtaccgaaaccagtacgccgaagatggagcgcgttgatatcaaactcaacccgatctacgcctacccgaaaaccactcaggagattctcgacttctccgaggtggatattttgggctggctgtcttctgaaattgccgacaccttcaccgcgaccgaagaaagcgactttgtgaacggcgacggtgataaaaaatccaaaggcttcctgtcttaccctcgcgcggccgctgccgacaaaacccgtccgttcggtacgctggagaagatggaagcggctgacgtttcctctgatggcctgatcgacctgctgtataagctgaaagccaaataccgcaaaaacgccgtatgggtgatgaactccaacactgcagccaaactgcaaaagctgaaaaacggcaacggggattacatctggcgcgatcgtctggttgccggttctcccgatacgctgctgggccgtcctgttcagtatctggaaaccatgccggatgcggaggcaggtaaagcattcctcgcggtaggcgacttcaagcgcggctatttcatcgtggatcacaccactggcgtgcgtacccgccctgacaacatcaccgaaccgggtttctacaaggtgcataccgataaatacctgggcggcggcgtggtggactccaacgccatcaaggtgcttgagctttcaggctccggttcctga

SEQ ID NO: 20379 - DNA, 1035 bp, Escherichia coli
atgctaactgcaaaactgaagttttttgatatcaatagatgcggatattacaagcacggctctaaaaaaccagacttaggcaacaccactgatacattgcttaaactgaaaggttgggcttctgatggaagagagttcatcaatactcttacctaccaagccgaaaaggaagaggacatccgcaatacctatttttgtggtttggcgtcagacaggcagtacggagaccaccttttaactctttgggcagaggttcccaatgatagtggggtgatatatggtatgccaccgctagctaaacccggtaaagtggatatgttaaccactggatttgatgtcgataaggctattccaggatttccttgttacttttggttcattcctgatgaaaatgcttttgcttcaatcaaatttgaacactctctaatgggaaagggtaatcttgataactatctcaatggatatcttgcaaacaaatccccatatcgcgtgctcgataatgatgataaagtaattggcttttccgctgatgctaagaaaaactctgattcagaaaaattaaaccctaaattttatgctgtaggaatgaaatatgatgaggttcaggcagagttaattaataacattcacagaatcacaaagatattaaaaagagaaaaaataacttatttagccccagatgatagaaaaataattgaaagagttttttctggcctgttaaaaaacacaccagcaaacacacaggaaagaacgatctttcacgagatggaattcaaaccaacagaatcacagctaaaattaattattaaaaactataatgagttaggtaatagctcacctataaggaatgttggcttcaaatatagtgacgggaaatctatctggcttagcggtgcaaatgttgcttttgaaaccgagctaaatgttcggcgaaaagataaccacataatagctccagaaagactgttatctgctataataaaacgcagagcagagttgttaaacaaaatgaagacaccaccagcaggggggtga

SEQ ID NO: 20380 - DNA, 522 bp, Escherichia coli
atgataaaatatataatttatgtgcttatagcagccttgatggccattatatttagaggccgaataacaacgcttggctataatgattacaaggacacgctaggtgccctgcttaatatttcatctataatatttgccattataggcgcctggatagcaattatttatccaagggcgatggcgagaatattaaataagagggactcacctcaatcaaataaagccgaggggaaggaatcacataaggatgctaattatttaagcgaattagttgagatcgtcatggtatcagctgttgtattaatggctgttcttcttatacaattcttcgcccctttacttaaaggcctggttgatgttaactatatcccttatgttaaataccttaattttacatttgtagctttcttggctatagcgcaattcgcagcgatatttagggtgatacttgttaattattttttcttgaatgagttaaggaaaaaaaacgtcagcgacaaaattaatgaattacatcgttaa

SEQ ID NO: 20381 - DNA, 261 bp, Escherichia coli
atgccaatcactaacgaggaacgtagggaacacctggaaaagtttggtttaaccagtcttgatacaacgcacactgccgattaccgtaaagcccttgaagaggaagcgttcttttgggatgacccacacggttttgtgatgcacacgctttccggagagcgactcgttacgaatacagaacagctggatgccttgctcgagcatctggaaggataccgtgctttattgcctgaccctccggaatggatgagagaagattaa

SEQ ID NO: 20382 - DNA, 1752 bp, Escherichia coli
atgaaaaacgcgcctaatgtgaaaaccctcccgcgcgacaaaatggaggaggccatcatctttgctggaacgggagcatggaaagccgctcaggattaccagaaagggaagggcgagcatggagacgatgttccgcctgtggttctggatcacactcaactggcggaattgccacacctgcgcattgttgataaaggccgtcgatttgcccgtgtctgtcaggccgggcttatcgagcaaaaccaaatcagcatgattgcaaataagctgtgtgaggctggcgttaccaatgctgagtttatcaacgaaaaaggcgagaaagaggactggacgccattgatgaaacgtctggaagacgagccacttatggtgactacgaggggaagtgctacgcctgcgcttaaccagatgggagccagccagcgcggggaagttctgcttgctcattacgatggcaatctggcgatccatgctgattccgacacggttcatcattacaacggcgtggtgtgggttccgctttcggataaagagctgcagcgagaaatggcgcagatttttattgattccgaagtcgcctattcgcagaacgcgattaaatccgctgtcgatacaatgaagctgggcctcccggtaatgggtaacacagcccgtaacctgattggtttcagcaacggggtttttgatacccggttaggccaatttcgaccgcatgataaaaaggactggcttatcgttgcgagcgaattgccattcagcgaaccagcagaaggtgaaactctggcaacccatgcgcctaacttctggaaatggctccgccgctctgtggcggataatgaccgaaaagcagaccgcgtactgtctgcgctgtttatggtgctggcgaaccggtacgactggcagctgtttcttgaggtaacggggccgggcggaagtggtaaaagtgttatggctgagatctgcacgatgctggcgggcaaggccaacaccgtatcggcgagcatggcggcgctggagaacccaagggaaagggcgctggtagtgggctattcgctgattatcatgccggatatgacccggtacgctggcgacggcgcagggattaaagctatcactggcggggataaggtagccattgaccctaaacacaaagcgccatattcaacccgtatacctgcggtggtgctggccgtcaataacaatgccatgtcgttcagcgacagaagcggggggatttccagacggcgggtgattttcaacttctccgaagtggtaccggaaaacgaacgcgatcctatgctggccgagaagattgaaggtgagctggctgtaatcattcgccacctgctcactcgcttttccaggcaggacgaagccaaacagcttttgcatgagcagcaaaaatcagaagaagcgctggccattaaacgtgaaggggattcactggtggacttttgcggctacctgatggcttcggtggtttgtgatggaatgctgattggtaatgccgagatcgtgccattcagcccgcgccgttatctgtatcacgcttatctggcttacatgcgggccaatggtcttagcaagcctgtatcgttaatgcggttcggtacggatatgccaggcgcaatggctgaatatggcaaggagtaccagaagcgcaaaactaaacatggcataagatcgaacgtcaccctgcatgatgattcagaagactggatgccaatgtgtaccgatacaacaaaagaataa

SEQ ID NO: 20383 - DNA, 192 bp, Escherichia coli
gtgcgaaatcctgaaatcaacgatagctggaaggataagcgcggcgaactggtcacggtgaaagataacgcatttaaccgggtaacgtttgtgcgtgatggttacgattttccgtgcatctttccgctggaaaggttcgttaaagagttcactttcgttagctgggggctgaaagatgaaaaacgcgcctaa

SEQ ID NO: 20384 - DNA, 216 bp, Escherichia coli
gtgagacaggttccttttgaagtcctgatgcacgctgaaaatgccctttcagaaagtgagtgcgcaatgtctgtgctaagcatgtggattgacagcattcccgacggtgaagaacaccgtgaggaagcgtgccgtgtcggagcaattatgtctctgctgcacaaatctatcggcgagctggtgaaggcgcgggaggcttacagtgcgaaatcctga

SEQ ID NO: 20385 - DNA, 195 bp, Escherichia coli
atgcgtgagccaatctgtctggagcaggccgaatataaatcagcgctggcttcaccactttacgaaaccatcctggaaaaagcctctgctgaatgttcagaaacgctgctgaatctgatttctattgcgtgtgattttaatcaggaaattcaccgggcattaatcgccgagctgcacatgggagagacaaagtga

SEQ ID NO: 20386 - DNA, 861 bp, Escherichia coli
atgacaggcaaaacaaaggcggccatgccgggccgcctgagtctcaacgctttactgaaacatcgccagattaccaggcttgccgctggtggtcaaaccttgagccaacgaaatccgtacgcacaaattaaccgcgtacgtttaatgtacggagatcgagacaaaggcgaacagtattcgggttcatggcaaaacaacgttaaacgtggtttagaggctccgacgaaaaacgtagagagctgcgaagataaccaaccctctttaagaggggagcctctgcacaactcattaatagttgcgcaaaacagaccctttttaagaggggcagtccacagcattacggggagtaaccctgttcagccttttggcgcgatgccgcgcttatcaagttcacggcgcaaaaggcgttttatccatcccgacttattatcgtcaccgtcttctttcatcgctaaagcgagccgctctgacagttctttatcgagtctgagctgcacaacatggcgctctttattttcgcttgttgacattgtcaactcctgtggtctagtctgtagtggagttgacaatgtactacattgcatgacttttagtaaagcaaagcccggcagtggtggaacactaaccgggcctctaaccaccaccgttagcgaaagtaacgaggcagctatgaaagatcatatcacacacccgcaagggcggaagtcctacatctggcgttttcttgcactgagcgccatcggtcgcaacgtcattcacatcacagctaacactgagcgcgaagcccgtgagcaatcaccggctggctgcgtgatggtattcgctggccgtctaccagttcaggaggttcgctatgcgtga

SEQ ID NO: 20387 - DNA, 693 bp, Escherichia coli
atgaaaaagattaatgccctccacgggcagggattcgctcaccctgtagccagccagcacgatatttcagcgaaccgtaaacaggttattgccggtgactggtcgcccattaatcgcggtgaatttacgcttgccgatctggggttgcgccacaacggtaacgggctggtgtggctgcgttccggcgtgtccgtgcatgaggcagaccatgatgcagggataagcggcaaggacaagaccaaaggaagggttaacggccttccttttgaatttgtcggccagtggcaggaatacccgactaaacgcagctttgccgtttcagtatctacggaactacggcgccagtattacccggacgatgccgcattcagtaaggcaatgcgtgaggctggttatgttccggtgcgcactcgcaaactgaccggaaaggatgctcgtttttggctgtaccgtgtaacgggcaatgataagggggttgtcgcagcagaatccgcgccacacaaggcttgcgcgccagttgtccagaccatatctaagcctcatccgtggtttaagcgtgtggcactcgatggtaaatggcagtacgtctacgcagatcacatccgctttctgactaaaaagcgtcatcgcgtcgatggtgttcgggttcaggggtataccgctggcgggctgaaagtggaggctattgtatga

SEQ ID NO: 20388 - DNA, 285 bp, Escherichia coli
atgcaaaatataacctttaccccgccaaatcctgaacaacgccgcacccttttagaagagtacggctttaagtttgatcgccgaatccgtgaagatgaatgcagcgagatcaccagtctttcccgttccagccgctggaagatggaacagcaggggcgcttccctccgcgctgtcactttggccgcaatagctgtgcttggcttctttcggatgtgctctggtgggttcgtaatccgccagcagtagagaacgtcaataacccatacagccgtaaatctgcttaa

SEQ ID NO: 20389 - DNA, 651 bp, Escherichia coli
atgactagttttctaaaattgggtattttcgagcgagaagccaaagccccggaactcaatattaaacaacttgcactacttatgtgtggggtagatccgacagttaaaactgctgatatccctgaggcgaaagttgaagcttacaatatatactatcgacaactgagtagatggttatcagcatctaaattatttcgaggtggaaactcaacagcctatcccgcagactatatgtttgctctggcatatcctcttattgatgaagatattacaccacaacccataaaggacagatgccttgcggcggtggctataattgctaatcaaaacaaaggaaaagagcatctttatgctatgggaggggatgagcttttacaggtcggaattgcattgaaaagcagcaaacgcggcttgcatcgtaaagaagatgaaaaggaatataatgataaattaatggggatgctggtcaagcttatagcacataagataggccattcgtttggcacctctaaaaaaccaagcatctcggctattttaaacgaactatataaattagctgatgaggaaggtatatctaaaactggattatccaaatcagcaatatatgataaaattcgcaaggcattaaattcgatttattatacggaatga

SEQ ID NO: 20390 - DNA, 1221 bp, Escherichia coli
atggctggcgaacttaacaaactgagcgacaggaagttaaagggattacatggtatcccggccagtaagattgagttctatgctgatggtgccgggctgagcgccaaggtaactaaagctggtggtattagctgggtgtttacttaccgactcgacgggcagaagctgcatcgtcttactctgggacgatacccggatatgagcctcaaagaggcccgttcttcgcgtgataaatgccgccaatggctggcctcaggtaaagatccaaagcaccagttggcgctgaccactcaggaaacgcttaaaccggtcactgttaaggaagctatagaatactggatacgcgaatatgcagaagagaaccgcgcgaatgttgaacggcacaaagcggagctgcgaaaatacatttatccttatatagggaaaatggcgctcgctgactgtgaaacacgatactggcttgactgctttgacaggatgaaaaagaaaactccagtcgccgcaggttatgtgttccagatgtgcaaacaagccctgaaattctgccgggttcgtcgctatgctgtgagtaccgcgcttgaagatttaacaattccagatgtcggtaaaaaacaggcaaaaaaagaccgggtattaaacgataaagaggctggcgatttatgggctgccatttcctctggcacttgcttcatgccttactacaccaggctactgacaatcttaatggtgtttgggtgccgaacgcaggaggccaggctatcagagtggagtgaatgggatatggatgcctgggtctggacagttcccaaagagcacagcaagggcggcgagaagattgtaagacctgtgccggatgccatgcgcaaattcattgaaatactgcatgatgaaacgaaacgatccggccttttgcttgggtcggttaaaggcagtgaagcggtaagtcagtggggccgcggtgtttataaaaagctggggcattctgaaccatggacactgcacgatctaagacgaactttagcaacgcatatgaataatatgggtatagcaccacacgttgtcgaacagttgttggggcactcaatgccgggagttatggcgatttataaccgtagtctgtacttgcctgagaaattggatgcgttgaataaatggtatgacagacttgatattttatcaggtggattcactaacattgttttgttgaatagggctgaataa

SEQ ID NO: 20391 - DNA, 201 bp, Escherichia coli
gtgggtattaaagattcgattcgcgatgaagccatcaaagcatttgtggtgctgaatgaaggtgaaacattgagcgaagaggaattcttctgcttctgtgaacagaatatggcgaaatttaaagtgccctcttatctggagatcagaaaagatctgccacgtaattgctcggggaaaataattagaaagaatctgaaataa

SEQ ID NO: 20392 - DNA, 3222 bp, Escherichia coli
atgccaaaacgtacagatataaaaagtatcctgattctgggtgcgggcccgattgttatcggtcaggcgtgtgagtttgactactctggcgcgcaagcgtgtaaagccctgcgtgaagagggttaccgcgtcattctggtgaactccaacccagcgaccatcatgaccgacccggaaatggctgatgcaacctacatcgagccgattcactgggaagtggtacgcaaaattattgaaaaagagcgcccggacgcggtgctgccaaccatgggggggcagacggcgctgaactgtgcgctggagcttgagcgtcagggcgtgctggaagagttcggcgtcaccatgattggtgccactgccgatgcgattgataaagccgaagaccgccgccgtttcgacgtagcgatgaagaaaatcggtctggaaactgcgcgttccggtatcgctcattcaatggaagaagcgctggcggttgccgctgaagttggcttcccgtgcattattcgcccatcctttaccatgggtggtagcggcggcggtatcgcttataaccgcgaagagtttgaagaaatttgcgcccgcggtctggatctctctccgactaaagagctgctgattgatgagtcgctgatcggctggaaagagtacgagatggaagtggtgcgtgataaaaacgacaactgcatcatcgtctgctctatcgaaaacttcgatgcgatgggcatccataccggtgactccatcactgtcgcgccagcccaaacgctgaccgataaagaatatcaaatcatgcgtaacgcctcgatggcggtgctgcgtgaaatcggcgttgaaaccggtggttccaacgtccagtttgcagtgaacccgaaaaacggtcgcctgattgttatcgaaatgaacccgcgcgtgtctcgctcctctgcgctggcgtcgaaagccactggtttcccgattgccaaagtggcggcgaaactggcggtgggttacaccctcgacgagctgatgaacgacatcaccggtgggcgtactccggcctccttcgagccgtccatcgactatgtggttactaaaattcctcgcttcaacttcgagaaattcgccggtgctaacgaccgtctgaccactcagatgaaatcggttggcgaagtgatggcgattggtcgtacgcagcaggaatccctgcaaaaagcgctgcgcggcctggaagtgggcgcaactggcttcgatccgaaagtgagtctcgacgacccggaagcgctgactaaaatccgccgcgaactgaaagatgctggcgcagagcgtatctggtatatcgctgatgccttccgcgcgggcctgtctgtagacggcgtgtttaatttgaccaacattgaccgctggttcctggtacagattgaagagctggtgcgtctggaagagaaagtcgcagaagtgggcatcactggcctgaacgctgaattcctgcgccagctgaaacgcaaaggctttgccgatgcgcgtctggctaaactggcgggcgtgcgcgaagcggaaatccgcaagttgcgcgaccagtatgatctgcacccggtttacaagcgcgtggatacctgtgcggcagagttcgccactgacaccgcttacatgtactccacttatgaagaagagtgcgaagcgaatccgtccaccgatcgtgaaaaaatcatggtgctcggcggcggcccgaaccgtatcggtcagggtatcgaattcgactactgctgtgtacacgcctcgctggcgctgcgcgaagatggttatgaaaccattatggttaactgtaacccggaaaccgtctccaccgactacgacacctctgaccgtctctacttcgagccggtaactctggaagacgtgctggaaattgtgcgtattgagaagccgaaaggcgttatcgtccagtacggcggtcagaccccgctgaaactggcgcgcgcgctggaagctgctggcgtaccggttatcggtaccagcccggatgccatcgaccgtgcggaagaccgtgaacgcttccagcatgcggttgagcgtctgaaactgaaacaaccggcgaacgccaccgttaccaccatcgaaatggcggttgagaaagcgaaagagattggctacccgctggtggtgcgtccgtcttacgttctcggcggtcgggcgatggaaatcgtctatgacgaagctgacctgcgtcgctacttccagacagcggtcagcgtatctaacgatgcgccagtgttgctggaccacttccttgatgacgcagtagaagttgacgtggatgccatctgcgacggcgaaatggtgctgattggcggcatcatggagcatattgagcaggcgggcgtgcactccggtgactccgcatgttcactgccagcttacaccttaagtcaggaaattcaggatgtgatgcgccagcaggtgcagaaactggccttcgaactgcaggtgcgcggcctgatgaacgtgcagtttgcggtgaaaaacaacgaagtctacctgattgaagttaacccgcgtgcggcgcgtaccgttccgttcgtctccaaagccaccggcgtaccgctggcaaaagtggcggcgcgtgtgatggctggcaaatcgctggctgagcagggcgtaaccaaagaagttatcccgccgtactactcggtgaaagaagtggtgctgccgttcaataaattcccgggcgttgacccgctgttagggccagaaatgcgctctaccggggaagtaatgggcgtgggccgcaccttcgctgaagcgtttgccaaagcgcagctgggcagcaactccaccatgaagaaacacggtcgtgcgctgctttccgtgcgcgaaggcgataaagaacgcgtggtggacctggcggcaaaactgctgaaacagggcttcgagctggatgcgactcacggcacggcgattgtgctgggcgaagcgggtatcaatccgcgtctggtgaacaaggtgcatgaaggccgtccgcacattcaggaccgtattaagaatggcgaatatacctacatcatcaacaccacctcaggtcgtcgtgcgattgaagactcccgcgtgatccgtcgcagtgcgctgcaatataaagtgcattacgacaccaccctgaacggcggctttgccaccgcgatggcgctgaatgccgatgcgaccgaaaaagtaatttcggtgcaggaaatgcacgcgcagatcaaataa

SEQ ID NO: 20393 - DNA, 840 bp, Escherichia coli
atgaaaatactacgatggctgtgctgcctggtcatgctgatttgcgcagcagaaagtctggcggcgaagaaaattgcaacattgataaccccgatggcatattcggggtatgtaacacaggtacactattatcttgagattctgacccctgagggtgttgcatatggtgtttataaacaacatagcattatgcttaaagctgagaatttggatttagtttcctggaccggaagtaatacagcgcccacattgaaagcggaatctgttcaattgatttcggattcagcttgccctgggcttgatgagtacgatacggcggcaaagacatcttattgggactgtgagaatattacgcttggcgtgtactatgatgggcctgtggacggttgcccatggttgatttcgacatatacagatagcattattctgatggatggcatcggcccctatgtcggacccaaagtgcataactcgtcatgccctgtctccgtcgccacttatgatatttcgtggagtgaagattatgttgcccattcgaaagtgctgtcgctgcaatcgacgggcggaacgattgagaaaacgctgcccacctttttgatggaaagcggcaagctctgtgacagtagcgtgatggacgatcgaggcgcatactgccgctttgtggcgcagatgatcaccttctccacctccggctgtgacagttcgaaagtgacggtcacacccaaccagcatcccatcactgacaagcaactgcacgacatggtagtgcgtgtcgataccagcagcaggcagcccattgattccacctgccgcttccagtacacgctcaacgagctgtag

SEQ ID NO: 20394 - DNA, 354 bp, Escherichia coli
atgagaaaacagatacaggctcttggtcgactcaaaacaggccagatgaacaaaacagaatctgcgtattgccagcaccttgagcagcgtaaacgtgcaggggaaatcgcctggtatcgattcgagggtatcaagctgcggttagctgacaactgcttcctgactgtagattttgccgtgatgttggctgacgggcagttggtgatggtggacgttaagggaagtaagtcagtctttactgacgatgcgagagtcaagatgaaggttgcggcagacagctatccgtttgtctttcaggttgcttatccaaaacctaaaaagctcggtggtggatgggaggttgaggaactatga

SEQ ID NO: 20395 - DNA, 609 bp, Escherichia coli
atgagcgagaagcccaatgctgcgggattgattgtatccggtgataaaaacccgaattggaagggtgggaaaatcgaaaaggtttgttccgtatgtggcaggcaatatcaggttaagcgagccaactcatcttcaaggttctgctcacttcagtgtgtaggaatttcacagcgaggcaagacggtaaatcgggaactaaagcgagtattaaaaatatgctgcgtatgcggatcttcgttctccgttttcttgagtcatgagaagcgtcataaatgctgctcgaaacagtgttccaacataatgcgttcttctctgatgaagggggaaggaaatccaaactggtctggtggattatcgagattgccgtatccgtgggatttccgagaaacgagcaagagggttattgagcgagatggttttacttgtcagaacccaggttgtgatggaacagacaaaaggctaacaactcatcacatcaattacgacaagcaagactgtcgtcaggagaaccttatttgcctttgttcgagctgtaactcgaaggctaatttcggtcggcataagtggcaaaagttttatgaatcactgatgaaaaatagatcggcatga

SEQ ID NO: 20396 - DNA, 507 bp, Escherichia coli
atgaaaccgagttatgaagaacttgaagagcaactgaacagatctcgacgtctctgtgatgctgctctggctaatgagcgggcatgggaaacagccatgatgcaggcatgcggtgaagacggtccgaagtcagtagctgataagtttgcggaacttgaagccagatgcgcggcgctggcggcggagagtgcggtaatgctcgaaactattgaagccgttcgcagtgttgcggataactccagtggaatttccggatggcatttgaatggcgatatcgccacatgggaagagattcttcctgaaattaacgatatcgaacccccagccaccgatgctttcctggctgaagtacgggcgcagggggtagagatgtacgcagataacctcgacaacggagcagacgacgcagaacgaggtggttttgatgatgccgttaagtttctacgcagtgaagcgtctggtgtacgtttgttcgccgaccagcttcgcaaaggaggcaaccagtga

SEQ ID NO: 20397 - DNA, 678 bp, Escherichia coli
ttgaatactgccgccaactatggcggctttattttgcatggtactattaccacaacggtaactattaccacggtggttatgatgcctgctgaacctaaaacctataaacgcaaatcaacgcaatttaagccactaacagcaatgcaggaggcttattgccagtcatacatccaaacgcctgaaaaccagactcaggctgcgattaacgcaggattctccccaaatacagcggcagttaaagccagtgtcatgatgcgcgatgaacgcattcaaaaacggattgccgagttgatggaggagcgcaacaaacgaatgcgcgtcagtgctgattacgttctcatgcgcctggtggagatcgaccagatggacgtgattgacattctcaacgacgatatgagcatcaagccggtctcggaatggcctaaggtctggcggcagtacctgacaggtttcgaactggccgacatgttcgaaggccgtggagacgagaaagagctggttggcatcctcaaaaaaattaaatggcctgacaaggtgaagaacctcgaactgattggtaagcacgtcgacgtcaacgcattcaaagaacgcctggatgttaatgtgaatgtgacaattgctgatcgcatagcggcagccaggaagagactgaaagaacgtcaggatggcaatcagtga

SEQ ID NO: 20398 - DNA, 237 bp, Escherichia coli
atgattaaaaaactattacctttactggttttaagcacaatttccgccacaaccgttgccgctacaccgcctaatacgttggttgtagcccagggactggatgatattgtgagtctggacccggcagaagctaatgaactctcaagtattcagactgtaccaagtctgtatcaacgcgtagtacaaccggaccgtaatgatccgacgaaaatcactccgattctggcggaaagttga

SEQ ID NO: 20399 - DNA, 609 bp, Escherichia coli
gtgaccgccgccgctgacatccagtgtaccgtcctgattcaccaccgcgttattacccgcgatctcggtaccggtcgagccctgaccatcaacggtggttttaccgttattgtttacggtggcttcgtcgccattaacctgcgtgccggtgccaccgttgctgatggcactgtcaccgtcgttattgacaaccgccttgtcgccgtcgatctgaataccgatggaatccggatcggtgacagtcattccacctttgttatccaccgttgcgctgtcgccggtgatatcaataccgtgaccgccgccgctcacatccagctcgccgtcctgattcaccaccgcgttgttacccgcgatttcagttccggtggtgcctttgccgtcgacgatggtttttccagtgttgtttactgtggtattgtcgcccgtaataacgagctcaccgttgtgattatattgccacttcgttgcaccatctgcgctcatcccttcaagggcaaccgtgttattcgtttcatcaatctgccaaagattaatagtcgccttacgcccattgctatcttgcagagaaatagtcccgtcagcattctcggtataagtaaaaactga

SEQ ID NO: 20400 - DNA, 1149 bp, Escherichia coli
atgaggcgcttcgcaggcgcatgtcgtttcgttttcaatcgtgctctggcgcttcagaatgagaatcatgaggccggtaataaatacatcccttacgggaaaatggcttcctggctggttgagtggaaaaatgccactgaaacgcaatggcttaaagatgccccgtcacagccattgcaacagtcactgaaagaccttgagcgggcttacaaaaacttcttccagaagcgggctgcttttccccgattcaagaagcggggacagaatgatgcattccgctacccgcagggcgttaagctcgatcaggaaaacagccgtatttttctgccgaaacttgtctggatgcgctaccggaatagccgtcaggtcacgggtgttgtgaaaaatgtcactgtcagccagtcctgcggtaagtggtacatcagtattcagactgaaaatgaagtatcaactccggttcacccttcagcattaatggtcggactggatgctggcgtggctaaactcgccacgctgtcagatggcacagtctttgggcctgtaaacagttttcagaaaaaccagaagacgctggcgagacttcagcgacagttaagccgcaaggtcaaattcagcaacaactggcagaagcagaaacgcaaaatacagcgactgcattcctgtatcgcaaatatccgcagggactaccttcacaaagtcacaacgaccgtcagcaaaaaccacgcaatgatagtcattgaggatttgaaggtcagcaacatgtcaaagtcagcagcgggtacggtcagccagccggggcgcaatgtccgggcaaaatcaggtttaaaccgttcgatactggatcagggctggtatgaaatgcgccgccagcttgagtacaagcagctctggcgtggcggtcaggtgcttgctgttccgccagcgtacacaagccagcgttgcgcgtgctgtggtcatacagcgaaagaaaatcgcctgtcacaaagtaaattcagatgccaggcatgtggatatacagcgaacgctgatgtaaatggcgctcgtaacattttagcggcggggcacgccgttcttgcctgtggagagatggtgcagtcaggccgcccgttgaagcaggaacccaccgaaatgattcaggcgacagcctga

SEQ ID NO: 20401 - DNA, 1881 bp, Escherichia coli
atgtctgaccctgtacgtattacaaatcccggtgcagaatcgctgggatatgattcagatggccatgaaattatggccgttgatatttatgtaaaccctccacgtgtcgatgtctttcatggtaccccgcctgcatggagttccttcgggaacaaaaccatctggggtggaaacgagtgggtcgatgattccccaacccgaagtgatatcgaaaaaagggacaaggaaatcacagcgtacaaaaacacgctcagcgcgcagcagaaagagaatgagaataagcgtactgaagccggaaaacgcctttctgcggcaattgctgcaagggaaaaagatgaaaacacactgaaaacactccgtgccggaaacgcagatgccgctgatattacacgacaggagttcagactcctgcaggcagagctgagagaatacggattccgtactgaaatcgccggatatgatgccctccggctgcatacagagagccggatgctgtttgctgatgctgattctcttcgtatatctccccgcgaggccaggtcgttaatcgaacaggctgaaaaacggcagaaggatgcgcagaacgcagacaagaaggccgctgatatgcttgctgaatacgagcgcagaaaaggtattctggacacgcggttgtcagagctggaaaaaaatggcggggcagcccttgccgttcttgatgcacaacaggcccgtctgctcgggcagcagacacggaatgacagggccatttcagaggcccggaataaactcagttcggtgacggaatcgcttaagacggcccgtaatgcattaaccagagctgaacaacagctgacgcaacagaaaaacacgcctgacggcaaaacgatagtttcccctgaaaaattcccggggcgttcatcaacaaatcattctattgttgtgagtggtgatccgaggtttgccggtacgataaaaatcacaaccagcgcggtcatcgataaccgtgcaaacctgaattatcttctgacccattccggtctggactataaacgcaatattctgaatgaccggaatccggtggtgacagaggatgtggaaggtgacaagaaaatttataatgctgaagttgctgaatgggataagttacggcaacgattgcttgatgccagaaataaaatcacctctgctgaatctgcgataaattcggcgagaaataacgtcagtgccagaacaaatgaacaaaagcatgcaaatgacgctcttaatgccctgttgaaggaaaaagagaatatccgtagccagcttgctgacatcaatcagaaaatagctgaagagaaaagaaaaagggatgaaataaatatggtaaaggatgccataaaactcacctctgatttctacagaacgatatatgatgagttcggtaaacaagcatccgaacttgctaaggagctggcttctgtatctcaagggaaacagattaagagtgtggatgatgcactgaacgcttttgataaattccgtaataatctgaacaagaaatataacatacaagatcgcatggccatttctaaagccctggaagctattaatcaggtccatatggcggagaattttaagctgttcagtaaggcatttggttttaccggaaaagttattgatcgttatgatgttgctgtggagttacaaaaggctgtaaaaacggacaactggcgtccattttttgtaaaacttgaatcactggcagcaggaagagctgcttcagcagttacagcatgggcgttttccgtcatgctgggaacccctgtaggtattctgggttttgcaattattatggcggctgtgagtgcgcttgttaatgataagtttattgagcaggtcaataaacttattggtatctga

SEQ ID NO: 20402 - DNA, 282 bp, Escherichia coli
atgatggagatattctggaccatgctggccagccaggacaggaagcgcattcgtgagtacattgcggagcagaacctgatggccgccattgaactggacgaacggattggttattcagccagcagcctggccgggcagccgtataaaggccgcaacggtcgtgtggaaggtacccgggaactggttattcacccgcattttgttctggtttatgaggtcgacagccagtggggaaaagtgtatatcctgcgcgtattgcatactgcacagaagtggccatag

SEQ ID NO: 20403 - DNA, 210 bp, Escherichia coli
atggcaaaaacaacacaggaatggttatatcagttacgtcgctgttccagcttaaagacacttgagaaaattattgctaaaaaccagggcactttagcctcggataaaatagaagcattcaactctgcagttgatcatcgccttgcggaattgacaatgaacaaattgtacgacaaagtaccggcttctgtctggaagcatgtaaaataa

SEQ ID NO: 20404 - DNA, 303 bp, Escherichia coli
atgtacccccggaaagtccgtctgcggagaacaggccgcagtgcggcggcagacaggcagagacagctgcgccatcaggcgcagtggccttacacaccgtcaggtgtgcagggagcgccgcatccggcgcgactgaagaaaaacgacggcacaacaatggcatgtggtggtcactggcacaccactcccgcacaggtgaaaacagagaaaaccgcacgacatttacaagcaaaaaaagtgaaatttcttcatttttttacacttatttatcgcgctgatttggcaattgtgatgataaaataa

SEQ ID NO: 20405 - DNA, 2373 bp, Escherichia coli
atgacagtaaaaatttctggcgtgcttaaagatggcacaggaaaaccagtacagaactgcaccattgtgctgaaggccagacgaaccagcagcacggtggtggtgaacacggtggcctctgaaaatccggatgaagccggacgttacagcatggatgttgagcatggtcagtacagcgtcaccctgctggttgaaggttttccgccttcacatgccgggaccattaccgtctatgaaggttccagaccaggtacgctgaatgattttctcggtgccatgacggaggatgatgtccgaccggaggcactgcgccgctttgagcagatggtgaatgaagtggcacgtcatgccggagcgtcatcacagagcgcagcggcggcaaagaaatccgaaactgcagcggcatcatcgaagaacgcggcgaaaacctcagaaacgaatgcagctaacagcgcacaggcggcagcggcctcgcagactgcatcggcaaactccgcaacagcagctaaaaaatcagaaaccaacgcgaaaaatagcgagacagccgcaaagacgagcgaaaccaacgcaaagtccagccagacggcagcgaagaccagcgaaacgaatgctaaagccagtgaaactgcggcaaaaaacagccaggttgcagcagcccaaagcgagagcgcggcagccggttctgcgacttcagcagctggatcagcaactgctgcggctaacagccagaaagctgcgaagacgagtgaaactaacgcaaagtccagccagacggcagcgaagaccagcgaaacgaatgccaaagccagtgaaactgcggcgaaaagcagtcaggatgcagcggcccaaagcgagagtgccgcagccagttctgcaagcgcggcggctgcttctgctactgcatcagctaacagtcaaaaagcagcaaaaaccagtgaaaccaacgcaaaggtgagcgaaacagcggctgcgaactcagcgaaagcatcggcagcaagccagacggcagctaaagcaagcgaagatgcagccagagagtacgcaagccaggctgcggagccgtataaatatgtcttacagccgctgcctgatgtgtggataccatttaacgattcgctggatatgattacgggcttttcgccatcatataaaaaaattgttattggtgacgatgaaataacgatgcctggcgacaagattgttaagtttaaacgtgcatcgaaagcaacctatattaacaaatctggtgtgctgacagaggctgccattgacgagccacgatttgaacgtgatggcctgcttattgaggggcaaagaacaaactacatgctcaattcggaaagccctgccagttgggggcgatcgtcaaatatggatgtgcccgaaacagggacggataattttggttttacctatggaaagtttgtctgcaacgattctctgattgggcaaacctcagccattaatatggcatcaattgctgcaacaaagtcagttgatgtctcaggcgataataaacacgtgacaacctcatgtcgttttaaaacagaactgcaggtaaggttgcgtatccggtttgataaatatgacggtagcgcaacaacttttcttggtgatgcgtatattgatacacaaacgcttgaaattaatatgacaggcggtgctgcctcaagaattacagcgagagtcagaaaggacgaagctaccggatggatttttgcagaggcaacaattcaggcaattgatggggagttaaaaataggctctcagatacagtattctcctaagcagagcggggcaaccgtatctggtgactatatttatctggccaccccacaagtagaagatgggccttgtgtatcatcttttattatatcaggagcgacggcggcgacccgcgcaagcgatatagttacagttccaattaagaataatctttataatcttccttttacggttctttgtgaggtacataagaactggtataaaacgccaaatgcagcaccgcgtgtttttgataccggcggtcatcaaaccggagcggctattattcttggcttcggtcgttcaacagattacgacggatttccttattgtgatataggtttggctaacagacgggtaaacgaaaacgcatcgcttgaaaaaatggttatggggatgcgtgtaaagtcagatcagtctacgtgctcagtaagtaacgggcgtatatccagcgaaaagaaagccacatggtcctatattcagaactccgcaattatccgtattggaggccagactacagccgggttgcgtcatttatttggtcatgtcaggaatttcagaatatggcacaaggcattgactgatgctcagatgggggagtcaatctaa

SEQ ID NO: 20406 - DNA, 414 bp, Escherichia coli
atgagcacttttaccgacaaagaaatgattaaagaaatcaaagagcgcataggcagtctggacgtgcgagacaatattgagcgccgtgcttatgaaattgcgctggcatcgctggaagcagagccagtggcaaagattatagctcactacccattaggaattgacgtaggcaaacaaaagttcgtacaggccattggagagcttcctgattttggcggatatctattcgccgccccgccagtgccggtagtgccggatgatggtcgcgaaaagttcgaagcacttgtcaggtttcatgcgggtgataaaaaccatgaaacattattgcttcgtgccaacgaaggtatgaattaccaggacccgaatgttgatctggcgtggatattctggaagtccagtcgtgagcatatataa

SEQ ID NO: 20407 - DNA, 513 bp, Escherichia coli
atgaccactattaccagagaacaggcacagaaaattattgaagcagccgatgaggttattagtgcgctggccggaactaatgaggatgttcaccccggtagcgataacatgctacgtctgtgggatgacctgaatgaccgttacgcgccgccggaagttgtgcgtgagctggcgcgtatcgtgctggcatcgctggaagcggagcctgtagcgtggcgatatcgctacgtgaaaaaaggcgttacggactctcagggggagccgtgggttggtgactggaaatatgtaccgacaaaagaggattgcaacgacaggccgagctatgagattcaggccttattcactgccccgccagtcccggtgacaccagaaggactggttaaagccgtgcgtttctatgaacaggttaaacgtgaaaatccgccagtcgaaaccggagcatggaaagacgctgttgattgggtactcaaagaggcttgccaggctgtaaacattggtaccaaaggagattga

SEQ ID NO: 20408 - DNA, 210 bp, Escherichia coli
atgtctattgccgcaagttacaccatgcatctctattgtgactgccgccagtgtacggaaggtgtatatccagtgccagacttcggtgaatatatcggtacgtcatgggctggctgtgcaaaagaggcccgtaaagacgggtggcgaataagtaaagacaaaacacgtgcttttgcgcccgggcataaagttttgaggattaacaaatga

SEQ ID NO: 20409 - DNA, 189 bp, Escherichia coli
atgaaaaaccgtaaagcaaagattctgttagttcgtagaaacgctcctggcgtctggcagtgggtgagactcagcaaccgacggatggggttgatgaaatattacgggatgatggattgtggtttttgcaaaaagcccagcgcggcgcaaaaccgctggaaaaaccacttgcgcactaaaggagagtga

SEQ ID NO: 20410 - DNA, 309 bp, Escherichia coli; identical to SEQ ID NO: 13517

SEQ ID NO: 20411 - DNA, 654 bp, Escherichia coli
atgaaatggtatgaactggctagatccagaatgaaagaactcggcataactcaagagaagttagctgaagagcttggtatgacgcagggtggaattggtcactggttgcgcggatctcgtcatccatctcttgacgagattggtgtggtgtttaaataccttggtattgataacgtctcattcaaccacgacggtacattttcacctgttggcgaatactcatctgccccgttaaaaaaacaatatgagtaccctgttttttctcatgttcaggccgggatgttctcgcctgagcttagaacctttaccaaaggcgatgcggagagatgggtcagcacaaccaaaaaagccagtgattgtgcgttttggcttgaagttgaaggtaattccatgaccgcaccaacaggatccaagccaagctttcctgacgggatgttaattctcgttgaccctgagcagactgttgagccaggtgatttctgcatagccagacttggtggtgacgagtttaccttcaagaaactgatcagggatagcggtcaggtgttcctacaaccactaaacccgcaatatccaatgatcccatgcaatgatagctgttccgtagtagggaaagttatcgccagccagtggcctgaagagacatttagttaa

SEQ ID NO: 20412 - DNA, 861 bp, Escherichia coli
atgagttttgatgattctttttctaaacgagttgccatagcgcgcaactccatcggtttgactcaatccgagcttgctaagaaagtaggcgtggtatccagacagatcgctgcttacgagggcggggaagccaagccaagagaaaaggcacttcaaaaccttgcggctgcattgggaactaccactgaatggcttacgcaagggaaaggagatggccctgacgttagcagtgtcaagagaactgttactgtgcgcgagattcctgtgctaacacacgtacaggcaagatttgaatcgctagatgatttactaaagactgctgctataaaggactttattccagcccctcctgaagccaatgaatactgttttgccgttgaaatacaaggagactccatgtcttccggtgatgggattagctttcctcctggaacaatcgtaactttcgattcatcgctagaggctgtttctggtgactttgtgatgtgtgtgctgaatgatgattctgaggctacatttaagcagcttatactggatcagcgccaaatctaccttaagccacttaaccctttataccctatgttccaacctgattttatcgaggttgttggcgtggctattcattctcagttccgaataaagagggaaaaacttatctctccaatgccgcatagcgaagtagagaaactggttgaagaagcacacaaggttagccaagatttttggtcaaatgcaaaatttgacaagaatacaccctttgacgaacgtcttaagcgactagatgaaattgctgagcgccttgagaaatttgctaactacagcctttcacaggcccgttataaacactcaccagacaagtaa

SEQ ID NO: 20413 - DNA, 174 bp, Escherichia coli
atggaacagaagaaaaaagatatcaagcctatctcctaccgcccaagtgctgaagtgcgtgagtttttggaaagtaacgcagctaaaagctaccgctcgactcaggggatgatcgatttctttatggctaaggtcatggatatggagaagaaaggtgaaattatcatccattaa

SEQ ID NO: 20414 - DNA, 732 bp, Escherichia coli
gtgaaattatcatccattaaaaacgttgaagcccaacggtggctagaccgtcaggcttcggtatcgaacaaatcctacgacggaaatatcgatatgaatattgtagcaaaatcagattacaacttccaaggattcacctttaacccagtaacagagggcgggtctatctggtttacctccaccgaactagctaaggctctcggctataaaaaaactgatgccatcagccaaatttatgcccgtaatgctgatgagttttccgactcaatgtcattgaccctcaatatgagtgtcaacgggataaacaatagcttacgtaacaaatcggtcagagtttactcactccgaggcgctcacttggtggcgatgtttgcttctacgcccaaggccaaagagttccgccgttgggtgctggatattttggatcgtgaagccacggattcaccgatcgccaaacagttcacagatgatgagttaatcagcctttgctatctccagctctggatggaaaagagccagcgggttagccagcaactttacccggcaatgaaacaggctaagtcagaatacgcagggatgctatacgacatcgcccacgacattcgttatatgactgtggaaaccaagaagatcctgcttcgtgaagtacaggaactggataacagcaatattgtcgtgaagcatgcgcagccaatgttggcaatgcttcgcggtgaggaatggattcactga

SEQ ID NO: 20415 - DNA, 774 bp, Escherichia coli
atgactttattaaatttagcagttcatgagccaaatgtcgatccccagccgcttccagtgattgaatgggagggtttacgtgttgttacgactgaaacgctggcttcaggttatggtacggatgaggctaacattcggaaaaacctgtcacgcaatgctggacgcttcattgaaggaattcacatcttcactattaaaggccaagagttgaagaatttgcgagtgactaatagtcacgcacaaatttcgaacaaagctcgttcaattgttttgtggacggagaagggcgcagcgcggatgtcgaaaattgtcgatacagacgaagcatggtctttcttcgaacggttggaaaatgcttacttccgtcccttggtaaaaagcatcctaccgcagacatacgagcaggctctggaagatttacttctaaaggtcaaagagaatcggcttcttgagcaacagcgcgacagagcggtaaaagaaaagttgtggattgcagcaaaacgcgaagctacagcaatggctaccgcatcagcagccgtccgcgccaaaaacaaattagctgaacgggtaggggaaggaaagaactacgccgccattatcccggtagaaaagaagctggggcagaaattcaaatggcagcctcttcgcaagtggtgccgggagaatgacgtcaccccacatgatgtcaacgacccacgctttggctcagttaagtcatggcctcgcgatgcttggcttgctgtgtatggcgtagatcttcgaaaacttttttaa

SEQ ID NO: 20416 - DNA, 165 bp, Escherichia coli
atgaactctgagttattacaaatcgttcaggatgctctctcaaagccatcaccgattgcaggctatcgagacgaagctgaacgcttggctgatcagcaagcagagcagttcaaggccgttgtgtttgagacacttaaaaagatttatggcaaggatgataaataa

SEQ ID NO: 20417 - DNA, 330 bp, Escherichia coli
atgtcatcttctgcgtggcttgagataccacctaaaagcaattatacatatcaagttaatttaaatgactactacgtttttttaccaggcaagcatcgctataacgttggtacttttgagcatcttattgtaagaagtaattggttcagaaatgaaaatataaacacggcaatgtttaatattttaaaccaaagtcatcctaagaaaaaaattgatgatttattatataatcttgatctctatggggcaagactaggtgtctttttgagaagcaatgaagtttcgttattaatcgatggggatgaacttgactctctttatagcaagtaa

SEQ ID NO: 20418 - DNA, 921 bp, Escherichia coli
atggaaggcggtgcaacaggcacagcgttacatacggggtggcaaacggtgggtggtggatatggagatatggatctggagaagttcttcgacctagtggatcacagacccctgatgacgcgtctggccagaacgataaaggacaggcgggtgctgagactgatacgccgctacctgaaagcggaaatggttaaagacgggcaaagggagaaacggcaggcgggcatgccgcagggcggcccgctgtcgctgttactgtcgaacatcctgctggatgaactggataaagaactggagcgtcgtggacacagcttctgccgctacgcagacgactgcaacatctacgtaagcagccggaaagcgggcgaccatctgctgaagaacatcagggcgttcgtggagaacaaactgaaactgaaggtgaatgagaagaagagcgcggtggcgcgcccgtgggagcggaagttcctcgggtacagtgtgacatggcacaaacaggcgaagctgaaaatagccctgacgagtgtgaacaggctgaaggagaaagtccgcagtctgaccacgggaaaccggagcaaatcagtgaaagtgacaatcaatgccctgacgccagtgctgcgtggatggataagctacttcaggctgacggaagtcagaggagtgctggaagagctggacggctggatcaaacggaaactgcggtgcctgttgtggcggcagtggaagaggccgggaactcggacgaagaacctgctaagagtggggctgagtaaggacagggcgatgatctcagcgtacaacaaccacgggccatggtggaactcagggtcacgccatatgaatcaggcgataaagaatgcgtggttcagcaggcagggtctgatatcactgctggaacagcagaggcagttccagtgttaa

SEQ ID NO: 20419 - DNA, 1059 bp, Escherichia coli
ttgtggaaggcagaaagtcagttcgcggtactggaggaggcggcacaacgtcgccagctgtccgcacaggagaaatccctgctggcgcataaagacgagacgctggagtacaaacgccagctggctgcacttggcgataaggtcacgtatcaggagcacctgaatgcgctggcgcagcaggcggataaattcgcacagcaacaacgggcaaaacgggcagccattgatgcgaaaaaccgggggctgactgaccggcaggcagcgcgggacgccacggaacagcgtctgaaggaacagtatggcgataatccgctggcgctgaataacgtcatgtcagagcagaaaaagacctgggcagctgaagaccagcttcgcgggagctggatggccgggatgaagtccggctggggagagtgggcggaaagtgcgacggacagtatgtcgcaggttaaaagtgcagccacgcagacctttgatggtattgcacagaatatggcggcgatgctgaccggcagtgaacaaaactggcgcagcttcacccgatccgtgctgtccatgatgacagaaattctgcttaagcaggcaatggtggggattgtcgggagtatcggcagcgccattggcggggctgttggtggcggcgcatccgcgtcaggcggtacagccattcaggcagctgcggcgaaattccattttgcgacagggggatttacgggaaccggcggcaaatatgagccagcggggattgttcaccgtggtgaatttgtcttcacgaaggaggcaaccagccggattggcgtggggaatctctaccggctgatgcgcggctatgccaccggtggttatgtcggtacaccgggcagcctggcggacagccggtcgcaggcgtccgggaagtttgagcagaataaccatgtggtgattaataacgacggcacgaatggtctgccaggtccacagatgctgaaggcagtgtatgacatggcccgcaaggcggcaatggatgttgtgaccgggcagatgcgtgatggtggtctgttctccggaggtggacgatga

SEQ ID NO: 20420 - DNA, 1416 bp, Escherichia coli
atggctgaaccggtaggcgatctggtcgttgatttaagtctggatgcggccagatttgacgagcagatggccagagtcaggcgtcatttttccggtacggaaagtgatgcgaaaaaaacagcggcagtcgttgaacagtcgctgagccgacaggcgctggctgcacagaaagcggggatttccgtcgggcagtataaagccgccatgcgtatgctgcctgcacagttcaccgacgtggccacgcagcttgcaggcgggcaaagcccgtggctgatcctgctgcaacagggtggtcaggttaaggactccttcggcgggatgatccccatgttccgggggcttgccggtgcgatcaccctgccgatggtcggggccacctcgctggcggtggcgaccggtgcgctggcgtatgcctggtatcagggcgacgccacgctttcagaatttaataaaacgctggtcctttccggtaatcaggcgggactgacggcagatcgtatgctggtcctgtccagagccgggcaggctgcagggctgacgtttaaccagaccagcgagtcactcagtgcactggttaaggcgggggtaagcggtgaggctcagattgcgtccatcagccagagtgtggcgcgtttctcctctgcatccggtgtggaggtggacaaggtcgctgaagccttcgggaagctgaccactgacccgacgtcggggctgacggcgatggcgcgccagttccataacgtgacggcggagcagattgcgtatgttgctcagttgcagcgttccggcgatgaagccggggcattgcaggcggcgaacgaggccgcaacgaaagggtttgatgaccagacccgacgcctgaaagagaacatgggcacgctggaaacctgggcagacaggacagcacgggcattcaaatccatgtgggatgcggtgctggatattggtcgtcctgataccgctcaggagatgctgattaaggcagaggctgcgtttaagaaagcggacgacatctggaatctgcgcaaggatgattattttgttaacgatgaagcgcgggcgcgttactgggatgatcgtgaaaaggcccgtcttgcgcttgaagccgcccgaaagaaggctgaacagcagagtcaacaggacaaaaatgcgcagcagcagagcgataccgaagcgtcacggctgaaatataccgaagaggcgcagaaggcttacgaacggctgcagacgccgctggagaaatataccgcccgtcaggaagaactgaacaaggcactgaaagacgggaaaatcctgcaggcagattacaacacgctgatggcggcggcgaaaaaggattatgaagcgacgctgaaaaagccgaaacagtccggcgtgaaggtgtctgcgggcgatcgtcaggaagacagcgaatga

SEQ ID NO: 20421 - DNA, 792 bp, Escherichia coli
atgacaacacgtataacgttcagtatgaccagtgatgagacgctgcgaattgtggatgagtactgtcatacccacaaactttcgcgctctaaggtaatcaacgcattactcagcgccacagcacctgtccttaatgatattaacggttattatcaacttgcaggcgaactgcagtcacgcttattaaatggagtgtatcaacgggatcttcctcgcaaacgcaatgtcgtcagtgcagagaagtattgtctggaaatctgggaaaacaaacttttcaccagaagaatcctggagtttgacagttcaaatggtgttctgtacgcgctgaaacataaaagacactatcgccgggataagatgattggaagggttgaaagtcggtatatcaaagacatttgcgaataccagatgcagctatccggggagaagacgaaatatgcctgttttatttatattgaaagaacaatatacaatcacgataatccatctggtgaaacacctgtaaaatcggctgttggtaatgcagtcatcctgctggcaaaggatgtgatatataacgagtacttttttgatctgcggaagtcatttttcgtgagcattaaagatctgatgacctctggcacaaaagatattccggagacacagaaatatccgggcgtttattgctggatcccgcttttttccataaattccggcgtggtcattaccccggtctataaaattgatcccctgaaacccgtaacggtaaaaaaaccggataagatcactgttgtttgtaattacagagaataa

SEQ ID NO: 20422 - DNA, 2517 bp, Escherichia coli
atgttacagatagtcggcgcgctgattctgctgatcgcaggatttgccattcttcgccttttgttcagagcattaaccagcacggcgtctgcgctggcaggattcgtattgctgtgtctgttcggcccggctttactggctggctatatcactgaacgcataacccggttattccatattcgctggctggcaggcgtatttctgacgattgccggaatgatcatcagcttcatgtggggacttgatggtaaacatatcgcactggaggctcatacttttgactctgtaaaatttattctgaccaccgctctcgccgctggtctgctggctcttcccgtgcagataagaaccattcagcagagcgggctcacacctgaagatatcagcaaggaaattaacgggtattactgctgtttttatactgcttttttccttatggcgtgttctgcatacgcaccattgatcgcattgcagttcgatatttcaccctcactgatgtggtggggcgggttgttgtactggctggctgcattagtgacgctgctatgggcggccagccagatccaggcgctgaaaagactgaccagtgccatcagccagacactggaagaacaaccggtgctcaacagtaaatcatggctgagcagtttgcaaaacgattacagccttcctgaaacgctgacggagcgcatctggctgacactcatttcacaacggatttcccggggagaactgagggaatttgaactggcagacggaaactggctactggacaatgcctggtatgaaagaaacatggcgggtttcaacgaaaagctgagagagagcctgtcatttacccctgatgaactgaaaaccctcttccggaaccgcctgaatttatcaccggaagcgaatgacgattttctcgatcgttgcctggacggcggtgactggtaccccttttcagaaggccgccgttttgtatcattccaccacgtggatgagcttcgtatctgtgcctcctgcgggctgacagaagtacatcatgccccggaaaatcataagccggatccggaatggtactgctcctctctttgtcgcgaaacagaaacactgtgtcaggacatttatgaacgttcttacaccggttttatttccgatgcaacggcgaatggtctgattctcatgaaactgccggaaacctggagtacaaatgagaaaatgtttgcttccggagggcagggacatgggtttgccgctgaacggggaaaccatattgtcgacagagtccgtctgaaaaacgcacggatcctcggtgataataatgccagaaatggagcagacagactggtcagcggaacagaaatccagacgaaatattgttcaactgcagcccgtagcgtcggtgcggcattcgacggacaaaacggacagtatcgttacatgggaaataatggccccatgcaactggaagtcccccgtgatcagtatgccggcgctgttgaaaccatgaggaataagatccgcgaaggtaaagtacccggtgtaaccgatcccgcagaagcgtcccggctgattcgtcggggacatctgacttatactcaggcccgtaatatcacccggttcgggaccatcgaatcggtcacttatgatattgccgagggttcggttgtcagtctggcggccggagggatcagttttgccctgacggcatcggtcttctggctcagcaccggcgatcgcgatgctgccctgcagacagctgctgtccaggcaggaaaaaccttcacccgcacactggctgtctacgtcacaacccagcaactccaccggctcagtgttgttcagggtatgctgaagcacattgatttttcgactgccagcccgactgtccgactggctcttcagaaggggaccggtgcaggaaatatcagtgccctgaacaaagtaatgaagggtacgctggtgacatctctggcactggtagctgtcacaaccggccctgacatgatcaaaatgttgcggggacggatctccggtgcgcagttcatcaggaatcttgccgtggcatcttccggtgtggcaggtggtgctgtcgggtcagtggcgggcgggatattgttcagtccactgggaccatttggtgcactgacaggacgtgtggttggcggtgttctggggggaatgattgcctccgctgtatcaggaaaaattgccggagcgctggttgaagaagatcgcgtcaaaattctggcaatgattcaggagcaggtgacatggcttgccggcagtttcctgctgaccggacatgagattgaaaatctgaacgcgaatctggcccgtgttatcgatcagaatgctctggagatcattttcgccgccggtatacaacaacgggccgcgaccaatatgttaatcaaaccactggtggtcagtatcatcaggcaacgccccgtcatggaatatgatgcatcccatctcggcaatatggttaaccgactggaagaagcattacccccggagttaccggcataa

SEQ ID NO: 20423 - DNA, 471 bp, Escherichia coli
atgcctgatgtattcggcttgttgagcaagttattcagtaacgaacccttagagcgccttatgtatatgcttattatctttgttttgatattgctctttatgcctgattctgtaccggagtatgttcaagacaaaatcagcattccttatatttacccggtattcgtttttgccttttcttttgtgctggctataaatctccaacgtttagctttatttcttcgtaaggtctggcgaagtcaccggaacaatacaagagaacaaaaaacaatcagtcatatcaatgcagttatcgattccttgactgcgggtcagaaaaaaattcttattacggcattatcgaggaactatcctgtgatccatgctgtacgcaatgattctgatataaaaaactggtatctgctaatattttgctccccatggaagggcaactccttcccgacgaaaatccatactgtgttttgcacataa

SEQ ID NO: 20424 - DNA, 639 bp, Escherichia coli
atgaagatgaaaaacatgtctgaagtgttgacccaagaaaagcttatttttgttgcccagagactaaaggccctcgcgcagtcaggcctgacctattcaaaagacgtctttgacaaggaacgctatgaagccttgcgtgaaattgccgctggactgctgagttcgcagtttgatattagccgcaatgatttgtttcatgtatcggaaacgggttacgcgacgcccaaaacagatgtgcgtgcgtttatcctgcgtaataatcgtattctgatggtgaaagaggctgcagatggattatggagtcttcctggcggatgggcagatgttggagatacaccttctgaagctgtgcgtcgagaagtcgaagaagaaaccggattaaaagtcagagtgactaaactattgggagtttgggatcgtaatcttcacggccatccgcctttaccctggcatgtttacaagctgatttttctctgtgaagaagtaggtggcagcctgtcaatcagccatgagtcactcgatgctgatttttttgatgtcaacgacctgcctgaattgtcgctttcaagaattgtgcctgagcagattgctgtcagcctgagagtagcgaaaggtgatgaaaaaacatggtttgattaa

SEQ ID NO: 20425 - DNA, 639 bp, Escherichia coli
atgatattcaacgctaagggttttttattcgatatggacggtacgctggttgattcaacagccgtagtggaaagcgtctggagagatttttgtgcagaatacggtcttgatactcaggctgtgattgcttacgcacacgggcggcaaacgattgatacactgacgcattttattggtgcaggtgagaaaaccaataaaatcgcggcctcactcgaagaggttgaaatcaacatgacagaaggcgttactgaagtaaaaggggccgctgcactcttatcaaaactgccaccggatagctgggcacttgtcacttctgcaggcagaatgcttgcagaaaacaggatgaaagcggctaatctccccttacccatagtaatggtgtgtgcagaagatgtaatgacgggaaaaccaagtcccgagggttacatcaaagcagctttggctttgggccttgagcctggtgaatgcgtggtatttgaggatgcatctgcgggtataaaagcagggctggcaagtggagcttcggtaatagctgttcagcctgacgctctgggatcatctgaagcccatgccgtcagcgaactgtctgacattatggtcaagatttccggagaacgtttcaatatcatctgtggttaa

SEQ ID NO: 20426 - DNA, 933 bp, Escherichia coli
atgactgcacaacagattgatgcattacgcgacattgttaataaggccagagttaccgccatttgtaaaagtccggcctggaaatatactctgcgaatactgaagcgcagcagagtcgtgtacagaggagaacggtccgaatcgtttgatccggagaaacattttaatcgttatacggtgcgttatctgtacctgcttagcataatggcacttgagctaaggtcagatacacggattaaggttgaggtaggtcaatggtatcgcatgacgggtaaacgtttatcacttaatgtcccgccttttatgctgattccgcgtaatatccggagaaaagtggatggattcagacaatcagaaggcgaagcaacaaaacaaacggctcaaccgttcacgggcagtttgtatgaggttttgagcagggataacgattcggctgagctggacgcctggtttgctgaaccaccgctgacacgacaggaagtgcgggaggggaggcgtgtcacagattttaatccatgggcgcagtcttcgtttatttgccgttcagcatccccgacgtttgaacttttttaccaggaatataagcgactgggattaagtgttttttttgatccggaaaatagaaaaccttttgaaagtataaaaaaacatttcggggataaaccacagttactggagagactgggggatgtgttgtttttcacgtcgctttataaccagggatgtttaggggagtttgtcaatgcgcttgtggaaaaggaggacatttatctgaaagcgtcccccggggaagaaaagctgaaagcacaccagaaaatgattaactacattgaagagttctgcaacaaaatgacggaaaagtatctgatatccgcagccaggagacactaccaaaagaagaaaatcgccaggagcagaagtggtgaaagttaa

SEQ ID NO: 20427 - DNA, 810 bp, Escherichia coli
atgaaacaatatgaagatggttataacgtgaatggatatagctgggaaaatgaaacaattgagtatttgttgaatgataaacaactgacagataatcacatacctgaatgggttaaaaaaaatgaaattgcagcattctggttctggttagttataattaacacagatcccaaactccttggggttcgtaatgaattagggttcaatacagccatgatggggctgattcctgcggggagtatacccataacaacaattccttcagatcatgaaatgagactggatgttataagcaaatggattaatgcattaatccttgacaatcaatcagattggttcatctcaacaatgcatcaaaactggctgcagatcgaaaagagaaacgaagccaaatggcttaaaaagaatacagaacaactcgaatgggcatggaaatatatcaatgcacgcatcccgcacacgtatctttcctggttttatcctgtaagtgataacgaaagatacattgctatcgtagttttactaaaaattttattccccgcagatacaccatacttacagcagccaaaagtacttcactatggggttgccgcaaaagaaaaatttttcgacaagatgcacaatgcattccgaaaacagtttaccgacggaaaaaaagataagcgggtacaaatcaacgttaaaatatcatcagatgcaaaacgtactctggacagactgaccagagaactgaaaacaacacaacaggctgtcctggaacatctgattcagaaccacaggctggtgattcagaaccacagactggattaa

SEQ ID NO: 20428 - DNA, 531 bp, Escherichia coli; identical to SEQ ID NO: 19900

SEQ ID NO: 20429 - DNA, 624 bp, Escherichia coli
atggcccgcaccgtcagggtgtattccccgagcggcaggccgctgaaacggtgctccgtgtctgcggtgatggcggtgctcaccagacggctgtcttctccgcttccgctggtcagacgcagactgaagcgcacacccttcaccacccgcggcgtgtcccatttcgcctgcgccagatactggccatcagctgcgctcacctccaccgtcaggtgctgcactgccggtgggataacgctgttcagggtgcctgactgcggctcaaagcgggcaccgttatccacgatggcttctttttccggtacgtgctgcaccgccgtgatggcaaaggtgccgtccgtgttttcccggatggagacacagcggaacaggcgacgacgcagtgacggcagggagagtccccacaccccgtatgtctccacaccatcaggcagggtactgacctgtatccggtccggcgcggggtgtgcggtaatggccacgctcgccggcttaccgctgccgttaatcaggttcaccgctgatgtacctgtctccggcagggtaacctcacggtccagcgtcagggtgcgggtggcagcatcaatggacaggacacgtccgccggtcatggtcccggcatag

SEQ ID NO: 20430 - DNA, 297 bp, Escherichia coli
atggcattcagaatgagtgaacaagcacggaccataaaaatttataatctgctggccggaactaatgaatttattggtgaaggtgacgcatatattccgcctcatacaggtctgccagcaaacagtaccgatattgcaccaccagatattcctgctggctttgtggctgttttcaacagtgatgaggcatcgtggcatctcgttgaagaccatcgggggaaaacggtttatgacgtagcgtcaggggacgagttatttatttctgaactcggtccgttaccggaaaatgttacctag

SEQ ID NO: 20431 - DNA, 234 bp, Escherichia coli
atgacggcagggttcaactttaataactatgcagcaggtttttgttccgctaccccggcgttaaggggaaatgaggtcagcatggatactatcgatcttggcaacagcgaatctctggtatgtggtgtgttcccaaaccaggacggtacgttcaccgcgatgacgtataccaaaagcaaaacgtttaaaaccgcagctggcgcgcgtcgctggttagccagaaacactgactga

SEQ ID NO: 20432 - DNA, 174 bp, Escherichia coli
atgcaagttgatattattagccctgtaactgatccatatgcttgcgcacatcaggctcttctggcactaatcaacgctggaaaaattgaaaattccgctatgtgctttgaagagttgaaacaacttgtgcgcttgtatgaatatattaaaaaacaatcacaagatacggcgtaa

SEQ ID NO: 20433 - DNA, 612 bp, Escherichia coli
atgcctgtcaccatcatggatcccgatccggattcagcggtgatttctcgttttttcgaatccctgaaagccaaaattcaggcttaccagcggaaaaaacgacgtaccaacaagcgtgtgcgtgcaaccaccctgcattatttctggtgtcgggagtttggcaaggaaaaaggcaggaaacattatcacgtgatattactgctcaacaaagatacctggtgctcgccaggggatttcaccgttccttcttcgctggcgacgctgatccaactggcatggtgtagcgctctgcatcttgagccctggcagggtaatggactggttcatttttccaggcggacgcctttccgtaaaccggcatcatctgatgctcgcccttcttccgacgatacgcctttgtcgggtggatgttctgaaaccaggaaggcttcagacaaaaagccgggtgaagccgctgttctctggatcaagcgtggtgatgtggaagcgatgcagaaagccatggagagagcccgttatctcgtgaagtatgagacgaagcagcatgacggttctggtcaacgtaattatggttgcagccgtggagcggggcgtctactggatggcaggtga

SEQ ID NO: 20434 - DNA, 1605 bp, Escherichia coli
atgaattccgcttatatgcaatccttgcagacatcccaccacttcccagctgatttaacctacagattatttcctagtgagcttgcatatctcattgacgacttatatgaaagtacccaacttccgctggagctcatttttaatactgtactggcaacgctctcactctcctgtcagtcactggttgacgttgttcatcctcacaccaacatgccggaaccctgctcactttatctgttggcaatcgcagagccaggcgcgggaaaaacaacgataaacagactggtgatgaacccctgttacgaatttgccgatcgactcattcaacaatacgaagagagaaacaaagattataagactgaactacagatctggaatacccggcagaaagcgcttgctgccaatttaagaaaggctgttaaccgggggtatccgggggaacaggaagaagaggcgctgcgtaatcacgaaagaaataaaccgacacgtccggttcgaccgaattttatctatgaagatgtttcgcttaaagcgcttgtggaagggctcaatgaacatcctgaggcaggggttatttctgacgaggcggtcacttttttcagaagctatctgaaaaattatccgggcctgttgaataaagcatggagtggacaaccgtttgattttggacgggctgacgagaaataccatatcacgccacgtctgacattttcgttaatgtcccagccggatgtctttacgaattatataaataaaaatgacgtactggcgtggggaagcggatttctttcccggtttctgttcagtcagaccggaagtccttcccgggtacgggattatacgagaggcgagttcagaacaaaaccaaccctggagaagtttcataaaaagattaacggatttctgttaagccataacattaattcccccggtatgagcaccgaaaggaaaacattaaaacttgcaaagaaagcgttgggggagtggcaggaaaaccagattaagattgaaagaaaagcgcttgcaggaggggagtgggaacacatcagagatattgttctgaaagcaggttctaatatactgaggatagctggaatattcacctgctattgctataaagatgctgaggaaattgaatcaattgcgctttttaaagctatgcatctcatggactggtatctggaggaggcgagcacaatattttatcccatgtctgcacgatgccagtttgaacaggatgcctgtgaactgtatgcatggattatgacccgaataaggcagaataattggcgtgctatcaggaaaacagacattgaaagatatggtcccaatcgtctgagaagagcagaaaaacttacacctgtactcaatcagttaatcgctcagaattatttccgtatcatcaagatgcgatcgcatcaggcactttatgtttctgctcttgataataatggttacatccttcctttcggcgcaatgtcttacgaaccgtttgatattgttccaccccagtataaccataatgcgaaaacatattccgttgttattccaccggcattaattcagtcatttacacctgattcctcagcttacaccttattttaa

SEQ ID NO: 20435 - DNA, 300 bp, Escherichia coli
gtgctcttcctgtttgaggttatcggtaatgatacgcagacgacggtaggccgggtcgttcagctgagccggatcttcaccgggaaggcgctcaaccgcctgctggtaattaaattcgtgtttcggcttgacgtagcccggacgcaacacgcgggtttcaccaccacgatggcgcagcacttttccttcaacgatcggggagacataggccgccaccggcgtttttccggtaattttgtccagcatcacttcttcggtatggaaattcaccgtccggcggaaaaacagctccagaaatag

SEQ ID NO: 20436 - DNA, 348 bp, Escherichia coli
atggtgacgaaaaccatcactgaacagcgtgcggaagtacgtatttttgctggtaatgatccggctcataccgccacaggcagcagcgggatttcctcggcaacaccggcactgacacccctgatgctggatggggccaccgggaaactggttgtctgggatggacagaaagccggtagtgcggttggcatactggtactgccgcttgaaggcacagagacggtgctgacctattacaagtcggggacctttgcgacggaggcaatccgctggcctgacagtgtggatgaacacaaaaaggcaaatgcctttgccggcacagccctgagtcacgcggctctgccataa

SEQ ID NO: 20437 - DNA, 1308 bp, Escherichia coli
atgcgggagactgcggcaaaaagttttgtcgatgaggtggaggcggcctggtcggaatacgccgaagggatgtttggcgagatcgacgtggaaggaaaacgcacgttcacggaatttatccgtgaaggtgtgggcgttcatgcgtttaacggcgaaatctttgtgcagccggtctgggatacggagagcacgcaactgtttcgtacgcgttttaaagccgtgagtccgaaacgggtggacacgcctggacacggtatggggaaccgttttctgcgggccggtgtggaggtcgatcgatatggccgtgccgtcgcgtaccatatctgtgaggatgattttcctcgctccgggagtggacgatgggaacggatcccgcgtgaacttcccaccgggcgtccggccatgctgcatattttcgagccggtggaggacgggcagacccgtggggccaatcagttttacagcgtaatggaacggctgaagatgctcgattccctgcaggcaacacagcttcagtcggccatagtgaaggcgatgtatgcagcgacgattgaaagtgaacttgataccgaaaaggcctttgaatatatcgccggtgcgccgcaggggcagaaggataatccgcttattaatattctggagaagttctccacctggtatgacacgaatagcgtgacgctgggcggtgtcaaaattccgcaccttttccccggtgatgatctgaaacttcagaccgcgcaggattcagacaatggattttcggcgcttgaacaggcgctgctgcggtatatcgccgccggtcttggcgtttcctacgaacagttgtcccgtgattactcgaaggtcagttattcaagtgcccgcgcatccgcaaatgagtcgtggcgctattttatggggcggcgaaaatttattgcgtcccggctggccacgcagatgttttcctgctggctggaagaggcacttcttcgggggattattcgtccgccacgggcgcgttttgatttttatcaggcgcgatcagcctggtcacgggctgagtggattggagccggaagaatggccattgacgggctcaaggaggttcaggaatcagtgatgcgcattgaggccggactgagcacgtatgagaaagagctggcgctgatgggcgaggattatcaggacattttccgccagcaggtcagggaatctgcagagcgggaaaaagccggactctcacgtccggtgtggatagcgcaggcgtatcagcagcagatagcggagagtcgcaggccggaagaggagacaacaccacgtgagacgtaa

SEQ ID NO: 20438 - DNA, 387 bp, Escherichia coli
atggcgcgtaatattcagcaggttatggaacggtggggggcttgggctgcaaacactcatgaagatgtatcctgggcgtcgatcgctgctggttttaaagggttaattccgtcgaaagtgaaatcacgtcctcagtgttctgatgatgatgcaatgataatttgtggctgtatggcccggttaaacaagaaaaatcaggatttgcacgatttgctggtggattattacgtatatggaatgacttttatgagtctggcacggaaacttggatgttcggatacctgtgttggtaagcgcctgcagaaggcggaaggggttatcgatggcatgttgatgatgcttgatatccggctggagatggacagatatgtagaacgaattatgtag

SEQ ID NO: 20439 - DNA, 588 bp, Escherichia coli
atgcattatggcaaagttaaaattgtcgatataagccattctatagtaagtcaatatctggaaagccagcataagctgacgagaggtcctctgactgacattccgctttacttgttgctggaacccaacaatcctgcgttgactgtggctttaattaccagtcagagactttccggagagaccacggatatgtttcttatgatggcctgcctgtcgctgtttgaatcagatgaacggatgtcattatttttaagtggatgtgtatccagtataagtgccaaagtcagagcgataattcaaacagatatatcagcaagctggacgcttggtgcgattgctctacagttgcatatgagtgagagcttgttaaagaaaaaactcaaggatgaaggtctcaggttcagtaatttgttacttgaggaacggatgcgggttgctgtaaatatgttatgttcccggcatggatatggacaggctgtagcagcaaaatgcggttattcaagtagatcctactttatctctgtatttcaccgctattatggcttcccgccagacagatatgtatctatgcaagggcttgatttttga

SEQ ID NO: 20440 - DNA, 843 bp, Escherichia coli
atgctgcacggcagtgatggcatacgtgccgtcatcgttctcacggatactcacacagcggaacaggcgctggcgcagcgtcggcagcttcagcccccatacgctgtattcggcaacaccgtcaggaacacggctcacttttaccttcacgccgtcggtgacggactgaacctccacgctgaccggattgccacttccgtcaaccaggcttatcagcgtggtaccggaggatggcagcgtgatttcacggtcgagcgtcagtgtccgcgtctggctgttcaccgccagcacgcgcccgccgatgctgatacccgcatagtcatcatcacagatttcaatgacatcgcccggtacatggcgaagcccttctgcacccacgctgaagtccacggtctgcgtttccagcagctccgttttaatcagccacagcccggcgcggtgtgcctgcccccggctggtacagccaaaggcatccatcttcgtgacgttacgaccgtaacggagaatggcctgcgtatcttcaacaagctctgtcgccgtctcccagccgttattcgggtcaatccagttcacctcaacggcattatggcggtccttcagggcgctgaagctgtagcggaacggcgcgccatcatccggcatcaccacattactgcggttataggtccacaccttatccgacggtcggtcctgcacgaacgtcagcgtctgcccgttccataccggcatacagcgcatcgccgagcagaaatcactgagaacatcccacgccttacgctgtgtggtcaggtaggcattacaggtgatgcgcggctccgtgccaccaaagccatccggcactga

SEQ ID NO: 20441 - DNA, 468 bp, Escherichia coli; identical to SEQ ID NO: 7045

SEQ ID NO: 20442 - DNA, 252 bp, Escherichia coli
atgggtaactatcatatcggggatggtgaatgtagatttagagtcgtgtgttcttcaccagatgtatgtgaagtaggaggttacaaggttccttttgacagttaccagactttagatagtgaaagacagtacagttcaacggtatgggcgcgtggatgcagagctttaaatgttggttcagtgattgctggaactcaaagtaatgccggtaaagtgatcttacccaccaatagtggacacagaactaagtga

SEQ ID NO: 20443 - DNA, 1029 bp, Escherichia coli
gtggtacagagcattctgtcaggagaccagccgcaggcgcttcatggcagccaggggagaggaaccacgctgggcaatcagttagaggtgataccggcggaccggacgtggcgtccacggctgcaaagcaaaccgaaggtggacgggccacagagcgccattgtcaccggtcccgcaggagaggaaatcttctgtgatgaacatggccgggtacgggtgaagtttcactgggacaggtataacccggcaacggaggcgagttcgtgctgggtgagggtgtcacaggcgtgggcggggccggggtttggtaacctggcgataccgcgcgtgggccaggaggtgattgttgacttcctgaacggggacccggaccagccgataatcatggggcggacgtaccatgaggacaaccgttcgccggggagcctgccggggacgaagacgcagatgacgatacggtcgaagacctataaaggaagcggctttaatgaactgcggtttgaagacgccacggataaggaacaggtctatatccacgcgcagaagaacatggatacggaggtgctgaataatcggacgacggatgtgaaggctgaccacacggagaccattggtaacgaccagaagataacggtggggttgggccagacggtgaatgtggggagcaaaaaggaaggtggtcatgaccagaaagtgacggtagcgaacgatcagcatctcacgataaaaaatgaccggcacaaggttgtaaataacaaccagacaagcaaggtgacgggaactgataccgaagaagtcgtcaaaaaacagagtattaaaataggtgataattacgaactgaaagttgagcatggtacaaatatcatatctggggacagtattgagctaatttgtgggcagggagagagcgggacttgttccataaaactggagaaaacaggaaagataataatacgggggacggagtttctatttgaggctaccggtcctgtagatattaaaggaaaagatattcatctgaacggatag

SEQ ID NO: 20444 - DNA, 426 bp, Escherichia coli; identical to SEQ ID NO: 6184

SEQ ID NO: 20445 - DNA, 351 bp, Escherichia coli; identical to SEQ ID NO: 6245

SEQ ID NO: 20446 - DNA, 405 bp, Escherichia coli; identical to SEQ ID NO: 12456

SEQ ID NO: 20447 - DNA, 243 bp, Escherichia coli
atgcctccaactattgtaggccctacagtatcacaatcttttccggcctctccgactctggttccagtggaacttatcgacaccccgcgctgtgctacagatgctcctgctccggaggcattatcagttgcttgtgcagcttcctgccatgtggaattccattacggtaaaatgatgctggaaaatccttcaccagagctgctcacggtgttgatccgtgagctgaccgggaggggacgatga

SEQ ID NO: 20448 - DNA, 237 bp, Escherichia coli
atgttgacctcaataacaggccacgacagcgtattgctgcgtgctgacgatcccctgatcgacatgaactacatcaccagtttcaccggtatgaccgataaatggttttacaagctgatcagtgaaggccatttcccgaaacccatcaagctgggccgcagcagccgctggtacaaaagcgaagtggagcagtggatgcaacagcgaatcgaggaatcccggggggcagcagcatga

SEQ ID NO: 20449 - DNA, 567 bp, Escherichia coli
atgcctaaatcttacacaccaaactggttttttaccgctttacttgacaatcacatcaatcaaatgatggcacgctattcctgcctgcgggccttacggatggatttcttctacaggaaagatacgcccgatttcttacaacctgatcatcgctggcttgaattgcagttgcgtatgctgctggagcaggtggaacaatttgaaaatatcgttggtttcttctgggtgattgaatggacggctgatcatggttttcatgcgcatgcggttttgtggatcgatcgtcagagggttaaaaaaatatatccctttgcggagcggattacggaatgctggcggtctattacacataacagcggttcggcacaccgctgtacatatcagccgcattatacatacaacatcaacattcctgtgcgccacaacgatcctgaaagcatcgataatattcgcggtgccctgcattatctggcaaaagaagagcaaaaagacgggctgtgtgcctacggctgcaatgaagttcctgaacgtcctgctgcagggcgtcctcgtaaccctcacttctga

SEQ ID NO: 20450 - DNA, 603 bp, Escherichia coli; identical to SEQ ID NO: 8919

SEQ ID NO: 20451 - DNA, 576 bp, Escherichia coli
atggcgataaaagggcttgatcaggcgattgataatctgagccgggttcgtaaaaacgccattccggcggcttcagcaatgacgattaaccgcgtggccacaacggcgattaatcagtcttcatcacaggttgcccgggagacaaaggtacgccggaaactggttaaggaacggtccagactgaaacgggccacggtcagaaatccgaatgcaaaaattatcgttaaccgcggtgatctccctgtgattaagctggggatcagaatgctggggcgtcgtccggacagcatactcaaagccggtcagcatcgttatcagcgggcatttatccagcgattaaataatgggcgctggcatgttatgcaacgtcttcctcaggccagatatgaggagggcaatgacgacaagggaaggaaaaagcgtaatcgccttcccattcaggtggtgaaaatcccgatggcggccccactgaaacaggcatttgatgagaatgttgaccgtatccggcgtgaacgcctgcctaaagaactggcatacgcgctgaaacaacaactgaggattgcgataaaacgatga

SEQ ID NO: 20452 - DNA, 396 bp, Escherichia coli
atgaaacacactgacattcgtgccgcagtgctggatgcactcgagcagcatgaacacggggcgacgctgtttgatggtcgccccgttgtttttgacgaagaggattttcctgcgatcgcggtttatctgacggatgcagagtataccggtgaagagctggatgcagatacctggcgggccacgctgcatattgaggtgtttttaccggcacaggtaccggattcagagctcgatcagtggatggaaagccggatttacccggcgatgaccgcgatcccggcactggcaggactgattaccacgatggttacgcagggctatgagtatcgtcgtgatgacgatatggcgttatggagttctgcagatctgacttattccattacatacgagatgtga

SEQ ID NO: 20453 - DNA, 327 bp, Escherichia coli; identical to SEQ ID NO: 5975

SEQ ID NO: 20454 - DNA, 261 bp, Escherichia coli; identical to SEQ ID NO: 17248

SEQ ID NO: 20455 - DNA, 426 bp, Escherichia coli
atgcaatatgcgaaacctgtcactctgaatgttgaagagtgcgaccgtctgttttttctgccttacctgtttggccaggattttctgtatgtcgaagcgtctgtgtacgcgctggcgaaaaaaatgatgccggaatatgaaggcggattctggcacttcatccgcctgccggacggtggcggctacatgatgccggatggcgaccgtttccacatagtgaacggtgcaaactggtttgaccgtaccgtgagtgctgatgcctgcggcatcattctgacttcccttgtgattaaccgccagttgtggctgtaccacgacagcggtgatgcaggactgacccagctttaccggatgcgcgatgcgcagttgtggcgtcacatcgaatttcaccctgaatgcaacgcgatttacgcggctctggactga

SEQ ID NO: 20456 - DNA, 645 bp, Escherichia coli
gtgcggctggatgcgccccggctggcgacgttacttatcaagcgtcacggcggcgtactgccgccgctcctggcctctgccattcagaaactgaccggaaccggagcggaacttgttctgtccggcagtcagtggcagtcgctgccggtacttccggcagacggaacgcaggtgtctttcccgtatgccggtgagtggctggcagaggacgaaatcagggccgttcttggtgcggtacgcgatgcagtatgcagtatcagttaccaggtggcagaagatgcgcggcgtatccgtgcggcgctgaccaccaccggtcagacgttgctgacccgccagacgcgccgctttcgcctggtggtgaaggaaagcgatcacccctgctggctcgatgaagacgacgaaaacctgcccgtggtgctcgatgccatcctgaaccggggcgctcgtttttcgtcggtggaaatgtatctggtcagtgagtgtgtggagcatatcctgtccagtgggctggcctgcgatatgctgcgtataccggatgaaccgccccgccgctggtttgaccgtggtgttctgcgggaggtggtccgggaagcccggaacgaaatccgcagcatggcggatgccctggcaaaaatccggaaatga

SEQ ID NO: 20457 - DNA, 369 bp, Escherichia coli
atggcaacaaaagaagaaaatcagaaacgtcttcgtgaactggctggtctgctggggcgcgaggcggatatgtcggggagtgctgcggatatcgcacagcgtgtggcagagtgggaagaggaggtttgcgcctcggaaaatgaaatcgcagatgttgatgataccgttcatgagcaggcatgcaggcacaccggtgaggatgacgttggtattctggaacgtatcaggcttctgaagtgtttttacctgtgcggtgttgacgatgaaacaggtgggcctgttgagcatgttgatgctggcagagtaattctgatgcccccctcagtggcaaaagacatggtcaggagcggagtggccgtttatgcgtga

SEQ ID NO: 20458 - DNA, 405 bp, Escherichia coli
atgagcagaaatctcgcagagtgtttcagtattcataatgataatttcagtgagctggaatgggagtgtaaccggccatcctttgttgtatccggtgatgctgggaaaataaccatctcagaaaatgggaaagtaacacctccatcgcaccagcacagtgaggagctcattgaatttgccattgattacctgaagaacaataaaaagcaggggctgatgaagcgcgttggccgttgcatgggatatcttcaggtagccgctgagattgaagcgctggccagtggtgctgataaggatgcaattgtgcgggaggctcttcttcgtgattttaatactccaccctttaaaaaagtgccggcttactggcttcatccggggctgacttatcttaaagtgcgtatttag

SEQ ID NO: 20459 - DNA, 216 bp, Escherichia coli
gtgttgataatctacaaaggaaagctaccgggaagaattactgatgctctgaagatgccgccgtcaacactgcggtcagaaaaagatgatgttgaatcacgtattgaaaaactggagcgctatatcgctgaattgaaaaaaagcgccccaacaaaaaatgaggtgcttgcagcagatgaaatgaaagaagctattcttgatcgcgcgggcatctaa

SEQ ID NO: 20460 - DNA, 429 bp, Escherichia coli
atggataaacctacagactggcgctccggaacccgccggatattttctaatgaatttaaacttcaaatggttaaactggcttcacaactaggagcctctgttgcccgtattgccagggaacacgatatcaatgataacctcctgttcaaatggctcaggctctggcagaacgaagggcgtatatcgcggcgtcttccggtaacaacctcttctggcgctggcgttgaattattacctgttgagataacgcctgatgagcagaaagagcctatggcggctcttactccgcttttatccactccttcacaaagcacagtcagtgccagttcctgtaaagttgagttccgccacggtaacatgacgctggaaaatccttcaccagagctgctcacggtgttgatccgtgaactgaccgggagggggcgatga

SEQ ID NO: 20461 - DNA, 351 bp, Escherichia coli
atgatctcgctcccatcagacactcgaatctcgctggttgccggcgttactgatatgcgtaaatccttcaacggtctgggtgaacaggtacaacatgtgctggatgagaaccccttctccggtcacctgttcatcttccgtggccgacggagtgacatgattaaaatcctctgggctgatgctgatggtctgtgcctgttcaccaaacgcctggaggaaggccagtttatctggcctgcggtacgtgacggcaaggtatccattacccgctcgcaactggcaatgctcctcgataagctggactggcgtcagccaaaaacatcccgtcttaacgcactgacaatgttgtaa

SEQ ID NO: 20462 - DNA, 189 bp, Escherichia coli; identical to SEQ ID NO: 9113

SEQ ID NO: 20463 - DNA, 414 bp, Escherichia coli; identical to SEQ ID NO: 5302

SEQ ID NO: 20464 - DNA, 147 bp, Escherichia coli; identical to SEQ ID NO: 6018

SEQ ID NO: 20465 - DNA, 564 bp, Escherichia coli
atgattaagtcggttattgccggtgcggtagctatggcagtggtgtcttttggtgcaaatgcagctgtatctatccctcaaggacaaggtgaagtaagttttaaaggaactgttgttgacgctccatgtggtattgaaacgcagtctgcaagacaggaaattgattttggtcagatctctaaatccttcctgcaagaggggggagagactcaaccgaaagatttgaatattaagcttgtgaattgtgacattactaatttcaaacagcctcaaggcggggcagctaaaaaaggtacagtgtcattgacattttcaggtgtgcctgcaggaaacgcagatgacatgctgaaaacagttggagatactaatactgcgattgttgttactgattcgagtggaaaacgggtgaagtttgatggagccactgagaccggggcttcaaatctgattgatggcgataatacaattcattttactgcatttgttaagaaagaggacggaaaagaccccgtaaaagaaggtgccttctcagcagttgcgaatttcaacctgacttatcagtaa

SEQ ID NO: 20466 - DNA, 333 bp, Escherichia coli
gtggtcagcattgccgttgatcctgagtctccggaatctttcatgaaacgacctaaacgtcgccgctgggttaacgagaaatacacacgctgggtgaagacacagccgtgtgcgtgttgtggtaagccagccgacgatccccatcacctgattggtcatggtcagggcggaatggggacaaaatctcacgatattttcacgctaccgctgtgtcgggagcatcacaacgagcttcatgcggatcctctggcgttcgaacaaaagcatggttctcaggttgatttaatttttcgttttcttgatcacgcctttgcaactggcgtgcttgggtaa

SEQ ID NO: 20467 - DNA, 222 bp, Escherichia coli; identical to SEQ ID NO: 8585

SEQ ID NO: 20468 - DNA, 318 bp, Escherichia coli
gtgggtaaaccttctgtagcggaagaacgcagcaaaattacgccggtcagtgcgattaaggtgacgccgacatccggtacggtggcaaaagggaaaacaaccaccctgacggtttcttttgagccgaaaagtgcaaccgacaagacgttcagagcggtttccgccgatccgtcgaaagccaccattagtgtgaaagatatgacaattacggtaaacggcgtggcgacaggtaaggtgcagatccctgtggtgagcggaaatggtcagttcgccgcagtggctgaagtcaccgttactgaagcgggcgctgcagggtaa

SEQ ID NO: 20469 - DNA, 315 bp, Escherichia coli
atgtcggggagtgctgcggatattgctcaacgtgtgtctgagtgggaagaggagcttgctgtttccccggagggcattatgcactctgatgagagcggggctgatcaaaatcacacagacgatggtgagcagttgaacaacacggatgctccggatgatgttaaagccgtccgggtacggaagtgcctgcaagtaatggggtattgcccggagacaggtcgtcccgttgagctggcgttacggggtatgcgtgttctggtgccatcatcactggcaacggccatgatacagcacggaacggctgagcatgcgtga

SEQ ID NO: 20470 - DNA, 180 bp, Escherichia coli
atggtatgcatccgcgtcgctgaactgccctctgataccggcgtggtcggcaaggtaatgcaactgattgccctcctgcaccagacgtgccccgaaacagggcgtcacggtgcagggcagtccccaccaggggcggccgcgattgtcgtcgggatgagttgtcccggagaatgtgtctga

SEQ ID NO: 20471 - DNA, 540 bp, Escherichia coli
atgtcacctcaaacaagtaaggatttaaaggcattgataatacaatggaaatggaatttgttaattctatttctaattgctgtggcctcctattggctgaaagcttatgttaactatagtgatataaaagatatactgggtgttttgcaaaacatatctgctgcaatttttaccatagttggattatggattggttttttatatccgaatgcaattgcaagcattgtcaatgatgatgttgattacataaagaatacgaaagatgcacctcgaattgaaaagctaatttacgttgtaattacttcagcagtagtaatgctttcgattttgtttgtttatctgtttaaatcaataggctctgtgctatcgagttcagtggtgtattctgatcttattagaatgattggaatcacctttgtttattttatgtgctggttacaaataaagtgtgtgtttagtgttattttaagcaacttatcatttgcaaacaatcttcactcaagaatagtaaatgctaggttctctcatcatgatgattga

SEQ ID NO: 20472 - DNA, 1128 bp, Escherichia coli
atggaaactggaatcgttacgttctttgatatcaaggcttgtggtttttacagactgaagaaaaacgcagaagaattagagcataaattcggaacacttgatgagatctttgacgcgttgcaggcttggcttgatgacaaaagcgttgaggagtcaattccgtgggatacgggaactcatccgctaagagccagaacttactcacgaggagtggctgtcgatcccgatacaaaagatcgggtgatggtaatgtatcgcgcattaggttccgcgaagggacgtttgcacgctgttaaaaaaaacgcacctgttggtgctacagaaaatgatacagtaaagacagaaacgaatggaaaagactatatttgggttgagccatgttattattgggtaattcctgaatataacaagattgcatccattatatttcctcattcaggtgcagatacaccgaggttaagcaattatatttttaattttgtagtaaatcacggtgattttggtagggaaaaggatactacctcatttactagagctcgttcttcatgttcggaagatgacattcttatttctaaaacaattttcaagcatgtagatgaaaatggacgcaagtgtaattgcgtttttaaatttaaggctgaagtgacgaaggttaataaaccagggacgaatattcttgatgtacgagataaaattgttcagacaattattcgtgatactacggtcgcaaaagttgaggatacccggcaaccgttattacgtctggtgagtaatgtactatcggatttcttgggaacagaacaaaccaagtttacaaaacctaaaaaaattgaggttcgagtagatggtgctccttcggaagaggagataaaacaactattggatagaaatgtagatgatgttgactgggttgatgttggctttgttcttaaagattcatctcgcccattatggttaaaaaaatatatggcgagaactgcattaattgtcagcgattctaccggggatgagcatttctctccagaaaaactccttcatgaaataaaggctgtccgtgatgatttactccaaacaatcctttataatgaagaggtggaagaaaaatctttaaaaacggcggaggcataa

SEQ ID NO: 20473 - DNA, 759 bp, Escherichia coli; identical to SEQ ID NO: 13449

SEQ ID NO: 20474 - DNA, 330 bp, Escherichia coli; identical to SEQ ID NO: 13367

SEQ ID NO: 20475 - DNA, 1128 bp, Escherichia coli
atgggaaaaatgaaatattggttaatagcgggatttattatccttcttgcgatcgtttatgctgctatcagtgacagggattctacgctttctaggttgaaatcagcaggtgaaaacggagatgtagaagctcagtatgcgttgggtctcatgtatttatatggagaaatactggatgtcgattatcagcaggcaaagatttggtatgaaaaagccgctgcccaaaatgatccgcgtgcgcaggttaaactcggtttgatgtatgcaaatggtctcggggtaaatcaggattatcaacaggccaaatcttggtatgaaaaagcatcggttcaaaatgatgttgatgcgcaatttttgcttggagagatgtatgacgatggtctcggggtaggccaagactaccaacaggcaaagatgtggtatgaaaaagctgctgctcaaaatgatgagcgtgctcaggtcaatctcgctgttctatacgcaaagggtaacggggtagaacaagattatcgtcaggccaaaagctggtatgaaaaggctgcagctcaaaatagctctgatgcgcagttcgcccttggaattctgtatgccaatgctaatggtgtagagcaggactatcagcaggcaaaaggctggtatgagaaagcagcagaacaaaatttcgccaatgctcagtttaatcttggtatgctctattacaaaggtgagggagttagtcaaaactttcagcaagccagagaatggtttgaaaaagccgcgtctcaaaatcagctgaatgctcaatataatttaggtcagatctattactatggtcagggcgtaactcagagctatcgaaaggcgaaggaatggttcgaaaaagcagctggggaaggtcatgtcgatgctcagtataaccttggcgtaatatacgaaaatggtgaaggggttgggcaggactttcatcaggcgagggcttggtatgaaaaggctgctgctcgaaacgatgcgcaggcacagttcgatcttggcgttatgaatgagcttggtcaagggggaagtataaatctgaaacaagcaagaacttggtttgggctggcatgcaagaatgggaataaggaaggttgcgaacgttatgaaaataactga

SEQ ID NO: 20476 - DNA, 390 bp, Escherichia coli; identical to SEQ ID NO: 3590

SEQ ID NO: 20477 - DNA, 1170 bp, Escherichia coli
atgcccctaaatgatatgcagattcgtcgtgctaaacctgaagctaaagcctatacacttggggatgggcaagggctgtctttacttgtagagccaaatggaagtaaaagctggcgatttcgttatcgctatgcaggtaaacctaaaatgatctcgcttggtgtctatccaacgatcacacttgctgaagctcgttcccgtcgtgatgaggcccgaaaaatagtggctgagggaaaaaaccctagtgaggtacgaaaagaacaaaaactagcattaagaattcaatctgagaatgcattcgaaaagattgctagagagtggcatcggatgaagtcgttaaaatggtctgctgggtacgcctcggatattatggaagcgttccagaatgatatttttccgtatgtgggaacgaggcctataggagaaattaaaccgctagagctgttaaatgtactgcgtaaaattgagaagcgtggcgcattggagaaaatgcgaaaagtacggcaacgttgctcagaagtttttcgatatgccattgctaccggaagagcagagtttaatcctgccgcagatctatccagtgctctcgaagtacataaatcaaatcattttccattcttaaaatcagatgagatacctgattttctgcgtgctttagatcgctatacagggagtcaacttgtcgttattgctacgaagttattgatgatcacgggagtaagaaccatcgaattacgtaccgcattatggtcagaatttgatttggataacgctatttgggaaattcctgctgaaagaatgaaaatgcgcaggtcacatcttgttccattgtcgactcaagcgttagatttacttaatgaactcaagataatgacagggaactatcgttatgtttttccggggcggaacgacccgaacaagcctatgagtgaggcgagtataaatcaggttatcaaaaggattggttatggcggaaaacttactggacacggatttaggcatatgatgtctacattgttgcatgaacaagggtttgattcattttggattgagattcaattagcccatgtagataaaaatagtattcgtggaacttataatcatgcgctgtatttagaaaagcgaagagatatgcttcagtggtactcttcttttataatggagcactaa

SEQ ID NO: 20478 - DNA, 1704 bp, Escherichia coli
atgtatattgataatgtgtatttaaaaggatttaggaactattctgatagttttgtaaaatttaattattcaactcttataattggtggtaatgatgttggtaagaccaacttattgtattcattaaggattttgttggataaaagcttttcggatttagatttagaacctaaaaatagcgattttcatattgatgcgaaaggaaatcagtgtgaagagttagaaataataattaattttcgtgaagtaaaagaggatgctgttctctctaagttagcggggtatgttagtgatgatgcacaaacatacatcaaatataaagcatacagagctactcttgattacaagttatatataggccacaaagaatctgaaatggatgagattagtggcagattttatcttaaatatttaaatttacgctatgtgaattcacagcgagaccttgctaaatatatatctacagagaaaaaacatttacttcggcttgctcaagaaatgagaaacgaggagcaagtgcggaaggatgaaaatactttgaatgaattaactaatttattaaatgatgtcaatgataaggtaaaagaaataagctacgtctcgaccgctacggaagaattgaatgatgagttaaagaaattatcatataacaatgaaaagatttctgtaatgctcgattctggagcaattggtgttgatcagtttattgaaaaattagagttaagttcaaatacaaatggaaaaaaggtaatgcttggaggggacggatttaataaccaagtattacttgcattatggaaagccaagagtgtacgcgagcacgatactgaaaatgaagtggttatatattgtgttgaagaacctgaatcacatctttatccgcaccaacagagaaaattatctgagtatttaattagtaaattgccggggcagtctctagtaactacgcattctccgcaaattgccattaattactcaccagattcaataattaaaatttgctcttataacggtgagtcttacgcagcaagtgaagggtgttcagattgcataagtaatgcctggagtggaatgggatacaggatgagtatacttcctgcagaggcattcttcgctaatgtcgtattcttggtcgaagggccttctgaaatgttattttatcaggcccttgcaaaagagtgccaaattgatctggatttctttaatataagtatattatcagttgatggcgttcaatttgaagtttatagaaaaattcttgatgcacttgagattaaatgggttgctcgtacagataatgattcgtctaaagttccaaggaaaaaagagtggcaatattcaggtttaaatcgagctttggctctatgtggaatggagccactaaagaatgaattaacggaaatatctcaagctcaaagaatagagaaacacaaaatttataaagataagcttaaacatcataatatatttgtttcaattaatgatctcgagggtgatattggcgttgagttaagtacacagctgaaagaatatgtaggtgttgataatgaggaaattgctgctgattatttaagaggaaagaaagcaataaggatgcaagagttcttaggtgaatactcttatgcactgaaaaatatttcagacggtgaattaattcaaccccttttaactgctgtaaaattggctacggaagagttgagatga

SEQ ID NO: 20479 - DNA, 1623 bp, Escherichia coli
atgatagattttacccatgagcaaaaagcagcaatagattacccatctagtatggtattgacggcttgtcctggaagtgggaaaacagcagtaatcgtagagaagattgtccgtgacttggtagaatgcaaggaatatcagggtgttattgccatatcgtatactaacaaagcaagcgatgaactgaaaaagagatgtttaaaggctactccaaattcaaaatcaagcttttttgggacaatagataaattttatttgactgaagttattttaccattcattaagcaattatggggaagagttgatgacttacatgtagttaagcttaatgagttagcttcttctgaaaaagataggctttctgctttttttaatgtcgaattcatttgtgaaaaaattaatgagtatgattttaaggatataaaggaactatacgccaatggtattctaatactggagtttataccattgcttgcattttatatattgcgtaactcgttagcatgtcgccgatatatcgctaaaaaatacacatctatatatattgatgagtatcaagatgctggatgtgttcagcatcttctttttctttatcttttcgaacttggagtaaaagcggttgcagttggtgatgctgaccaatccatatattcatatgcgggtaaaagttcgaaatacttaatgtctttactggatgaaaaaagtggctttgccccttttaaaataactataaatcatcgttctcattcatctatagttaattatgcttctcgattgttgaatgaaaactgtgacttgttaataacagatgaaattcgtgtctacagaaaaactgttaatggtactcaatgtgaaatagctaagtggattgatgctaatattaacaatattaaacgaaagttcaatatttcaaaagaaaaagagatagcgatacttactgcaacgaatagttctgtcgctttagtatccggccttataaactccaaagcaagagcatatcttgatgatgagctgtctgtactcggtggagatgtgtctctcttattaaagaaccttttgaattatcgatttaataaaacgattacagcacaggctatcattgaaagtttaaattacaaggtgctagagaggaatgcaataagaaagatgaggggggttattagagatgtgagagattctaatgacaaccaacttattcctgatttacgtaaggcagtaaaattattaatcaacgctgatatttctgctaaccatattgatgccattaactcaatcttacacaataaaatgatgctaaataattatttaccagttagtgatgatgagttacaaataatgactttacataaagcaaaaggactagagttcgactttgtttttcatttggatctttatgattggatattaccgcgaagggaatatataaaacattgttttgatgaggttttttcacattatgagcaatgtctgaatcttcattatgttggagttactagggccaaaaaagctgtggtattaataaattctactgagcgtttaaattatcagagtgaattaaaaaaagcgaaaccatctcagttcttgtcactaaaaggacttgaaagtctgtataaaaaaatttaa

SEQ ID NO: 20480 - DNA, 267 bp, Escherichia coli
atgcaagctgttttttcttccccgtctcccgcccctgtgacgccactgatgccgctgccggacatcacacaggagcgttttttacgtcttccggaagtgatgcacctgtgcggcctgtcacgctcgaccatctatgaactcatccgtaagggggaatttccgccgcaggtgagtcttggcggtaaaaatgtggcctggctgcactctgaagtcaccgcatggatggccgggcgcattgccggacgcaaacgggggtacgatgcatga

SEQ ID NO: 20481 - DNA, 2379 bp, Escherichia coli
atgaaaatgaacgtaaccgccaccgtcagtcatgcgctcggccactggccgcgtattctcccggcgctggggattcaggtgctgaagaaccgtcatcagccctgtccggtctgtggcgggagtgaccgtttccgttttgatgacagggaggggcgcggcacctggtactgcaatcagtgtggtgccggtgacggcctgaaactggttgaaaaggtgtttggtgtttccccgtccgatgcggccgcaaaggtggctgccgtgaccggcagcctgcccccggctgacccggcagtgacggctgccgtgaccggcagcctgcccccggctgacccggcagtgacggctgccgccggtgctgaaacagacgctgcccggaagaacgccgccgcactggcacaaaccctgatggcgaaaacccgtcccggaaccggtaacgcctacctgacccgcaagggctttcccggccgggaatgccggatgctgaccggcacacacagagccggtggcgtgagctggcgtgccggtgaccttgtggtgccactgtatgacgacagcggcgaactggttaaccttcagttaatcagtgctgacggccgtaagcgcaccctgaaaggcggacaggtcaggggcacctgtcacacccttgaaggacagaatcaggccggaaaacgtctgtggatagcggagggatacgcgaccgcacttaccgtacatcacctgaccggtgaaacggtgatggtggcgctttcttccgtgaacctcctttctctggccagccttgcccggcagaagcatccggcctgtcagattgtccttgctgctgaccgtgacctcagcggtgacggccagaaaaaagccgccgcagccgcagatgcgtgtgagggtgttgttgccctgccgccggtcttcggtgactggaatgatgccttcacgcagtacggcggggaagccacccgtaaggccatttatgatgccatccggccaccggctgaaagcccgttcgacaccatgagcgaagcggagttttccgccatgagtaccagcgaaaaggccatgcgtatctatgagcattacggcgaggcgctcgcggtcgatgccaacggccagcttctgtcccgttatgaaaatggtgtctggaaggtgctgccgccacaggactttgcccgggatgtggccgggctgtttcagcggctgcgcgcgccgttctcctccgggaaggtggcctccgtggtggacaccctgaagctgattattccgcagcaggaagccccctcccgccgcctgattggctttcgtaacggtgtgctcgacacacagaacggcacgttccacccgcacagtccgtcacactggatgcgcaccctgtgtgatgtggatttcaccccgccggtggaaggggaaacgctggaaacccacgcccccgcgttctggcgctggcttgaccgtgccgccggtggccgtgcggaaaaacgcgacgtgattctggccgcactgtttatggtgctggcaaaccgctacgactggcagctctttctggaggtgaccggtcccggcggcagcggcaaaagtatcatggccgaaatagccaccctgctggccggggaggataacgccacgtcggccaccatcgagacgctggaatccccgcgtgaacgtgccgcgttaactggcttctcactgatacgcctgccggaccaggaaaaatggagcggcgacggagccggactcaaggccatcaccggcggcgatgcagtgtccgttgacccgaaataccgggatgcgtactccacgcacatcccggcggtgattctggccgtgaacaataacccgatgcgcttcaccgaccgcagcggcggcgtgtcacgccggcgggtgattattcacttcccggaacagatagccccgcaggagcgcgacccgcagcttaaggacaaaatcacccgcgagctggcggtcatcgtgcgtcacctgatgcagaagttcagcgacccgatgctcgcccggtcactgcttcagtcccagcagaactcagacgaggcactgaacatcaaacgggatgccgacccgacgtttgattttatcggctatctggaaaccctgccgcagaccagcggcatgtatatggggaacgccagtatcatcccgcgtaattaccgtaaatacctctatcacgcctatctggcctacatggaggcaaacggctaccggaatgtactcagtctgaaaatgttcggactggggctgccggtgatgctgaaggaatacggactgaattacgagaagcgccataccaaacaggggatacagaccaacctgacgctgaaagaggaaagctacggcgactggctgccaaaatgtgacgaccctgcgacaacctga

SEQ ID NO: 20482 - DNA, 1314 bp, Escherichia coli
atgagaatatcaaaaacattagaatcattatttacatttctaaaggaaaaagagcagaaaggtcaactattcaataaagaggctatactcacagccaccggttggaaagcggctacatttagaacttattgggttaaagggcagttatctgactttattagcgcaattgatgaagatacatttgaggcatcaaactgtcaaaacatctcagttatagagttttcgaaactattatctcaaagtaagcatagaagagggttaggtcataattgccagtcgaaactagcaaaagcattattaacaaaatctagagataatatgatgcttgctcttgaattatataatagaccttcaattgagaatagaatggatgcatttgtaatgtgtttttgcacttcatgggaacaattattaaaagctattttgattgaaaaaaatggtgaagagtcaattttcaaaaaagaaaacaagcgaggattcagagaaactatttcactaagagactgcttagaaaaaacattcccatcgaattcaaaggtaagaaataatatagaacaaataacagttttcagagatcaggctgtacaccttttaatgccagaaatacaagggatagcctcaaggatatttcagtctggcgttcttaattattcatcatattttgaaaaattcacagaggtttcttttctcaataacaatagcacaggaatgatatccttggtaggtgagtttagaacaccgccaatatccgtactgaaatccatttatggagaagtagcgactgatatattagacttagcaacaactcttcagcaagaagttgatgataaaaatgacatagaatatgcaattcccttaaatgtaaaacttgtttttgcgacatcagatgatgatgggaataccataaccttagctaaagctgatgagggaatcgaggggcttaagaaggctctaattatagaaaaaccagtagatagatcaagaacacatccgtatttgcagaaggatgccattgagcatataaatgaaaaaatctacgaactttatagtatagaaaagatagaaaagcatttagtattcaaagataacaaaacaggaaagaaagcgataaataaaaattgctttgatgctgttatttgtaagaacggatggaaaaactcaaataataaatatcatcacaaaaacaacaatccagaataccactattattcaccagcattagtagatgaatttgtcaagaaagctatgacaaacgaagattatctaatgaatacaaaaaaatggtataatgccagaagaagtaagcaaaagtga

SEQ ID NO: 20483 - DNA, 1566 bp, Escherichia coli
atggatagccgtttgctttttgttaaaaatttactcagtgaaaatggtgtatttttttgtcatattgatgaaaatgaatatgagcgactttatttaattaataaacagttaggtcttatcgatgcagggacaattatttgggataaacgcaatcccatgaatggtggtagtggcattgcgattcaacatgaatatactacttgttttacaaagaacatgatttctattaataagaaaaatgagaatgtattagaaatactcgaatatgcaaaattaattaagaataaatatcctgtaattaacagtgaagcaaagaaaaaattttatgattgggtaacaaagaataaaaaacttactggaggtgaacaagcttacaaatatatcgatgagaaaggtcgagtgtaccagagtgtcagcctccgtgccccagagccaaggactgacaagaaattctatataccattaattcatccagttaccgggaaaccatgcgctatgccaccaaatggtttttctcgtaccccagaaacattaaaagatatgatggataagggggatatactatttggtgttgatgaaacaacgcaacctagacagaaagcatatttatatgctgacgctaaaaagcaaataacatcaataattcaggatgctaaaaaaggaaaaactcaaacaactcatcttggaattgattttccttattgtcactcaacttctttatataattatttaattgggagtgcatctcataataaaaatgagataatattagatttttttgctggttcaggaacaagtggccactcagtcatagagttgaatcgtaaggatgcgggttcaaggaaatatatacttgttgaacagggggagtatgcacaaaatgtaactttaagcaggttgagaaaagttatattcagtagcaattggaaagatggtaaagctatggattcaacgacaggctcatctcatatacttaaagttatgaaaatagaaagttacgaagatgtattaaatagccttcgatttgaacaacaaaaagaaataaaagatctttttgatacagtgaatgaatcagtagcaaatgagtatttaataaaatatatgcttgaaacagaaagcaaaggttcactactcagtactgataatttcaaaaaaccatttaactacgaaatggatattgcgacggattccgccggtgccactgagcgtaaaaacatcgatttagttgaaactttcaactatctcattggtttacatgtgaaatccatcgaatccaatatcgaacgtggctatgtgcgtgttgaaggaatgctaccaacaggcgagcgtacccttattctgtggcgcgattgcgacaagatcggttatgaagaattgaataaatatgccaaccgattcgatttatatgcaaaagaaaacacgttcgacgttatctatatcaatggcgatcataacttacctaccgcctttaccgttgatgaagaagacggcgagattgttcgtagcctgaaaatccgccagatcgaacctgaattcttgaacctgatgtttgcggaggaggtttaa

SEQ ID NO: 20484 - DNA, 471 bp, Escherichia coli
atgtctgggaaaaatcctttttggaattatgattataatgcagcacaacgtaatagagaaatcgtagactcttaccaacagaccaatgaagcaagactggattcccagcaggctcagtttgaagcatctatggctaatgacagggttaacagaatacagatgcagttgaataacacaatcaatagccataagaaggttgtcgctgattatgagcaacgtcttgaagaatataaacaaaatttctttcgtgtagctttacataaaaacattctcttcagaacggttcgcagacttcaggaggaatggccggataaaaaggaattcatccttgatgaaatgcaaagacaaagaattttgtgtaatcaacaggattatagagaaagatggtggaatgccataaaagataataatcttgctgacgattatcttgagtttccatttcctaacagagagataaaaaataaaccataa

SEQ ID NO: 20485 - DNA, 2892 bp, Escherichia coli; identical to SEQ ID NO: 7171

SEQ ID NO: 20486 - DNA, 690 bp, Escherichia coli
atgaaccaaccacaggactttacagctcttcttaacagcttaactcctcaagagcagcaaatgcttttcacgcaacttcgcggaagaattcccatccatcctcttgaacagcaatggaatattacagcagaattcattttagaagccattgcgcgaagccaagatatcacgaaacgaggcgtaagaggaatcattgcagagctatgtttcgatacatatatcataggtgcaatgaaacataagggctggatacaacatcaactttttggagatttaccctatgatgcactgatttctcatcctcatgtcggggaaataaaaatacaaactaaaaaccaacgacttgaacgtggagtcccaaaatacgcaaatggaccaatgataaaattcaatccatatgtcgaaggttggtatgtttgcgaaacacagaaaacgaggacaggaaaaaatgcggaagggttagatacgaggccatatagatttggtgagtttgatatactatcagtttgcctccatccgtcatcgggtgattggacacgattcatgttttgccctgcatatacactaatgccaagagcgacaaatcctgaactaattgctgttttacaaccagtaccacctacacgacaaggaaattggactgataatcttgaggaagcgattgaatggcatttgaaccgtaatcgttaa

SEQ ID NO: 20487 - DNA, 207 bp, Escherichia coli; identical to SEQ ID NO: 9885

SEQ ID NO: 20488 - DNA, 603 bp, Escherichia coli
atgaaacaacagtatcagacccgctacgaatggctccacgaaagctaccagaaatggctgaccggcttcacccggcacgccgtatcctggggcgtgtgtcatccgaatatctactacttccataatctgacgcccggttgggtgtcattcaatggtgaaaaaccggagattgccatcgtaccccagagcctgcaccggctgatttatggccctgacaaacgggccacgccgcccctggatgatgatctgattgtgaatttatgcaccagtgaacatctgctggttcatcatccgatgctggaaggcattctcctgtctgaatgtgaacgtctgaggcagcgttctctggcaaataaactgatcagcctcttccgtcagtttggtggcacggagttgcgcctcaaactggtctggctttgctggcttgatttaatgaccggaaacagccttgaagactggaaagagaacctgaaacggaaatcagaaaaagagctggaggaatggatcatcaaccgtcagaggcagagcgcagcactgacggatctgatggatcagtacgtgctcctggcataccgcacaacggttgacgatagccgcaactga

SEQ ID NO: 20489 - DNA, 753 bp, Escherichia coli
atgtctgtgaccgcagggatatatggtgctgcaggccattcttccgttgatgttaaggatgatgacggctcccgtgccggcacggtccgggatgatgctggcagcctgggcggatatatgaacctgacacatacctcctccggcctgtgggctgacatagtggcacagggaacccgccacagcatgaaagcgtcatcgggcaataacgacttccgcgcacggggccggggctggctgggctcactggaaaccggtctgcccttcagtatcactgacaacctgatgctggagccacggctgcagtacacctggcagggactttcgctggatgacggtaaggacaacgccggttatgtgaagttcgggcatggcagtgcacaacatgtgcgtgccggtttccgtctgggcagccacaacgatatgacctttggtgaaggcacctcatcccgtgcccccctgcgtgacagtgcaaaacacagtgtgcgtgaactgccggtgaactggtgggtacagccttccgttatccgcaccttcagctcccggggtgatatgcgtgtggggacctccaccgcaggcagcgggatgacgttctctccctcacagaatggcacttcactggatctgcaggccggactggaagcccgtgtccgggaaaatatcaccctgggcgttcaggccggttatgcccacagcatcaacggcagcagcgctgaaggttataacagtcaggccacgctgaatgtgaccttctga

SEQ ID NO: 20490 - DNA, 753 bp, Escherichia coli
atgtctctgacgacaggggtgcatggtgccgcaggccattcttccgttgatgttaaggatgatgacggttcccgcgccggcacggtccgggatgatgccggcagcctgggcggatacctgaatctgacacacacgtcctccggcctgtgggctgacattgtggcacagggaacccgccacagcatgaaagcgtcatcggacaataacgacttccgcgcccggggctggggctggctgggctcactggaaaccggtctgcccttcagtatcactgacaacctgatgctggagccacaactgcagtatacctggcagggactttccctggatgacggccaggataacgccggttatgtgaagttcgggcatggcagtgcacaacatgtgcgtgccggtttccgtctgggcagccacaacgatatgagctttggtgaaggcacctcatcccgtgacaccctgcgcgacagtgcaaaacaccgtgtgcgtgaactgccggtgaactggtgggtacagccttctgttatccgcaccttcagttcccggggtgacatgagcatggggacagccgccgccggcagtaacatgacgttctcaccgtcccggaatggcacgtcactggacctgcaggccggactggaagcccgtgtccgggaaaatatcaccctgggcgttcaggccggttatgcccacagtgtcagcggcagcagcgctgaaggttataacggtcaggccacgctgaatgtgactttctga

SEQ ID NO: 20491 - DNA, 246 bp, Escherichia coli
atgagaaaagtaaaaacagacaacagtgatttaatccagtatttagatacaatcaaagaactaaaaaatcatatttcgatagaagaatacagaaatgaatatcgtaggctacgttctgatgatgttcctttgattaaagcccaaaagttcaaatctgcgcataccgaactacgccgtctggacaggaagaaagaatctttgcttgataaatttatcgatgaactggtgatgctgccaacttactga

SEQ ID NO: 20492 - DNA, 201 bp, Escherichia coli; identical to SEQ ID NO: 7224

SEQ ID NO: 20493 - DNA, 909 bp, Escherichia coli
atggaagtattaaagaatagaattttactcggtgttttaaatgacttcaaaaatgattttaatatagatgaggatgaagcaaaatcttttgaatcttttgtgaattatgttgtgttatcaaaatatgatagtgaaacattcgatgatactgatacttttgatatcgtggatgttgatagcaatggtacatacggaatagattcttttgctttatttataaacgataaaatagttcgaaatgccaatgagattgaatggttccgtaaaacgaatagaatggacgttagattcgtttttatacaaaccaaaaggtctacatcagtagatattggagatttccttaaattcacaagtgcagtgagtaattttcttcaagatggcgaagggatcaaaattgaagatgatctaaagaatagtaaaaatatgctagatgagctattcaagccagaaaacatgcgtctttttgctaataataaaccggtttgcgatctttattatgctacatctggagttaaaagtgatgacgaaaaattccttggtgccttaaaccaacagaaaaaagcaatcaatagagataatcctgagatcggtgaggttaatatagtacaaattggtgctgattacttaataacttcttacaacgaaatagaaaataaccacacagtagaaatcgagttccaaaataacattgactgcggaaatgatatcgaagatatcgaacaagcattcataggttatctaccggtagatgaatttataaaattaattactgatggtgataaaagattaaggaaaaaccttttctatgagaacgtgagggattttcaaggaatagataatacagttaatgctgaaatgtctaaaactctatgctgtctcttatacacatctccgagcccacgagactaa

SEQ ID NO: 20494 - DNA, 222 bp, Escherichia coli; identical to SEQ ID NO: 12867

SEQ ID NO: 20495 - DNA, 177 bp, Escherichia coli
atgcagcagaaaaaatattcctttaattatctgatttttaatgatgatttcataaaaagaagaatactcgttaatccagcgacacatcctgtcggcgtgagtgtgtcagaacagacgatcccacagtgtttccagcaggcggataatgcggtcccgggctttacgcagaagctgtaa

SEQ ID NO: 20496 - DNA, 405 bp, Escherichia coli; identical to SEQ ID NO: 12456

SEQ ID NO: 20497 - DNA, 426 bp, Escherichia coli; identical to SEQ ID NO: 6184

SEQ ID NO: 20498 - DNA, 351 bp, Escherichia coli
atgatctcactcccatcaggtacccgtatctggctcgttgccggcgttaccgatatgcgtaaatccttcaacggactgggagaacaggtacaacatgtgctgaatgataatcccttctccggtcacctgtttatcttccgtggccgacggggtgacaccgtcaaaattctttgggctgatgctgatggtctgtgcctgttcaccaaacgcctggaggaaggcctgtttatctggcctgcggtgcgtgacggtaaggtatccattacccgctcgcaactggcaatgctcctcgataagctggactggcgtcagccaaaaacatccagccgtaactcactgacaatgttgtaa

SEQ ID NO: 20499 - DNA, 1191 bp, Escherichia coli
atgagcgactatcatcatggcgtgcaggtgctggagattaacgacggcacccgcgtcatttccaccgtatccaccgccattgtcggcatggtctgcacggccagcgatgcggatgcggaaaccttccccctcaataaaccggtgctgattaccaatgtgcagagcgcgattgcaaaggccggtaaaaaaggcacgctggcggcatcgttgcaggctatcgccgaccagtcaaaaccggtcaccgttgtcgtgcgtgtggaagacggcaccggcgacgacgaggaaacgaaactcgcgcagaccgtttccaatatcatcggcaccaccgacgaaaacggtcagtacaccggactgaaagccctgctggcggcggagtcggtaactggtgttaaaccgcgtattctcggcgtgccgggactggacaccaaagaggtggctgttgcactggcatcagtctgtcagaagctgcgtgctttcgggtatatcagcgcatggggatgtaagaccatttccgaggtgaaagcctaccgccagaatttcagccagcgtgagctgatggtcatctggccggatttcctcgcatgggatacggtcaccagtaccaccgccaccgcgtatgccaccgcccgtgcgctgggtctgcgcgctaaaatcgaccaggagcagggctggcataaaacgctgtccaacgttggggtgaacggtgttaccggcatcagcgcctctgtattctgggatttgcaggagtccggcaccgatgctgacctgcttaacgagtcaggcgtcacaacgctgattcgccgcgacggtttccgcttctggggtaaccgtacctgctccgatgacccgctgttcctctttgaaaactacacccgcaccgcgcaggtgctggccgacacgatggctgaggcgcacatgtgggcggtggataagcccatcaccgcaacgctgattcgcgacatcgttgacggcattaatgccaaattccgtgagctgaaaacaaacggctatatcgtggatgcgacctgctggttcagcgaagaatccaacgatgcggaaaccctcaaggccggaaaactgtatatcgactacgactataccccggtgcctcctcttgaaaacctgaccctgcgccagcgtattaccgataaatacctggcaaatctggtcacctcggttaacagcaattaa

SEQ ID NO: 20500 - DNA, 1080 bp, Escherichia coli
atgaaagttgtgaaagtggtaaaggagcaggttctaagtaccgttatttcgggaataataggcatagcggctacagtagggcttttccatttcacttcacagccaatacgatctgctgatgttcgcgaaaaattagttgaaatggctcgggagtgcatccagcagcagcttgccacacatttggactcagtggcgtttgactcagtggctagcgagtctctcgatctaagcacctcaaactccgttgtagtctacggaagaactgtgagcacaaatggtgcccttagccgtttcctgatggtcttcgagccctctggacagagtttgatagataaggtggttggcagacctggattctacgatattgggtattgggcaatcatcccagacgcaggggacgacgaggttgtggcttcttcagtaaacattgaagacctcgacaaagatggtaacaaggacatactagtccgcttaaagtcaacttacgcggatggtgtatccaaagggcttcttatacttaaaaaggatatccatgatgtatggcatttgatggggcttccatcaatgacagagatcatgcattccattgctgcaggtcagcctccccagccggaaggtcttcaccttccacttccggcaatacaatggtttagtaatgacgaaaaactcaaaccaaagtctgatatcaaacaatatcttaattgggaaattgacgaagataacttgcaggtcgctgattccactggaaatcattctttttggatgttcagaaacggcaccaagataaaaatgttcgagaatggacaagccggctacaagcactttggtgtactggtcaacatcaatgatgaagaggcgatacagggaaggcatcatctcatggtcagctttttcaagatagagaataatagtttggttcctgatccgaattggaactgggcctatcccatgttctctatcggattagaggatagccaagaagttgaattaagtgacatgcaggaagcgggcttacaagctcatgtttctggtagctccgttttcggcctgacagagtttgggaaaatggactcagattaa

SEQ ID NO: 20501 - DNA, 612 bp, Escherichia coli
atgaaaatacgcaatgatgtattcacggaacacatacgcctgcgttttactggccgacagaaaaatctggttatgaccggttttcagggcgcgcagcagcgcctcgcgggaaaaataaaatgtcgcgccaatctggcgggatttcaggatatcgcggatgcggtgctcaagcccggcgcgataccagtgcaactgatagtcgaaagactgctcaaagaaaatctgctccagcttttcgatagcctcgtcactgaaaaaattctttttcggtttgcgccgcccgcctttgttgcggttagcgacgttcggattaaggtctgcctcgttgccggtctggctgtagcggtttacccgtgccagtcgttcaatctggcgtccgagcaggtcaatttccttgaagtcaccgccggttttctgcggtttgataatgagctgggtcagccgcgcttccagactcatttcgacacggctgatgggggcaacgctgtcccagccgtcgcgctgtttccagctctgcaccgtcgggcgtttcatctgcaacatggcggcaatctgcggcacggaaaacccctgccagtacagcagcgccgcctgacgacgcgggtcgtgtaa

SEQ ID NO: 20502 - DNA, 1008 bp, Escherichia coli
atgattactgatgcacgttgccatactgaaaataccatcaatgttatttttgtttcaggtggaaaggacagccttgctcagtggcttgtcgctattgaagaaaatgcacccatattgccggtttttgctgatacgggacatgaacatccacagacaatgaaatatctggattatctggaaaaacggcttggcccaattaaaagagtcagagctgatttttcctgccggattgaatcaaagcgcaagtttatccagaccaaatggcctgatttgttggttaacgattgtggaatgtcggaagaagaagcgcaccagcgcatcagttgtgcgctggaaattctcaaaccaacgggtatcccgtttcttgatttgtgtctgtggaaggggcgtttcccatcaaccaaagccagattttgcacatttgaactgaaacatgaacccgtgcgttctcaggtaatcctgcctttactcaatgaatttgaggaagtgattagctggcagggagtgcgtgctcaggaatcgccatcacgcgcagctttacctgtctgggaagaggatgcagacaacacccccggattgcatgtatatcgcccgattttgcactggaagcatgaagatgtatttgcaatagccagaagacatgacattaagccaaatccgttatatcagcaggggtgtggccgtgttggttgtatgccatgtattcatgtccgtaaatctgaactggcagaaatttttcgccggtggccggaggaaataaagcgggttgctgaatgggaacgacaggttgcgtcgtgctcccgtcggggaaattccacttttttcccatccacacatgatccgttacgcgcagaacgtcgtattgaggttgtaacagtcgaggcatacggaattgaaacctaccatgactggacaatgacaacgcgtgggggtactcagtttgatttactggcttcggcgaatgataaagccgtttgcagtagtgtctatgccggtgtatgtgaatga

SEQ ID NO: 20503 - DNA, 1275 bp, Escherichia coli
atgtatttaaaggcagttatattttcaatcgcagatgttgtattaccattaacatctaacactcaacctcaggaactaaaatctagaatcgactctgaattacgtaagttgtttgcgtttttgtcatcaaaagggattaaagttatcttcttgacaaataaaaatagaaacgtgagaacacatgacgggatcgtaacactagacgaatacctaaaaaggaaattcccagaatcaattcacttttgccgtgaactcgacaacaacataccagcaaaacaaacagggaaggccatagatttcatcatggctgcgttagaattaaaacgaaacgaaatgatctatgtagggcgttctcaggaagacttacaagcagctaccaacgggaataccctatttattaatgcgacctggtatgaaccggttactgagtacggttttcaattttcagaacccaaagaaatcgctagatttattgatgtcttttgcttaagagagcagttgtggggatggcaagggcattttaatgaagatgttcactactacgccttagcaccatttagcacatatgtccctgaatttacaatgtattcagccaatgcaagagacctcgcaaagctatcggttggaagccccgatttttggataagatatcttggtgctagcatttatttctctggcttaagtgaaggagcaagttttataaccacctacgttggacataacgctgaagatccttataaactagcaaacattatggagcatgacctaaaaggtttagcagtctcattcaaaggaaagtatctaaaagatctattcttacgacatacaacagctattaaatcacagcaagctcggatagctaagcaagaagtaaacatcacatctcaaataaacaccgttaatttaaatcctgcccctattaaaaacctcatcaccggcgaaagatataccaaccctcctaaattgaaaggtaagaaaatattagttattgatgatttttgcactgaaggaaatgctcatgaaacagccagaatgtatctaaaagctgcaggcgcaaatgtaataaatatatcgtggttaaaaaccatcaatcgtgacgtttctatctgtgaaccaactcgcaagatacggccatgggaggccaatacacttgatgttgatgacattaactatgtcggtacgattggttatgctgaaaatgtaactcacggtagtgcacctcaagtgttatcagaaaaaattcaacaatatgataactgggactggccacaataa

SEQ ID NO: 20504 - DNA, 984 bp, Escherichia coli
atgacggatattgaaacagctcgatggaacacagaaagtgccgctttgttggcactatcagaaatacatggcgttagttattggactctatataaagttgctcaaaagggaatcagatttagagacattgttaccagccaaacattagccaactttgagtatctacttggagtaaaacttcatcgccaaccttattatttgaatgaaggcaattggtctgtttttcgggacagcatgatttctacggctaaaatattactcacacattatcataatagtggttacaaaatcatccaccatggttctccgagctatccagacaagttgaatgacctgtctgagccgcctttctggttgtttgctcaaggcaatgtatccttgctagataaaaagtgtgttggagttgtcggcaccagaaacccaaccgcacttggaatttatttaactcaagcagtaatctcgcaatttatagattcggattattcaactgtaagcggtttagcatatggtatagatcaatctgcacatgaagcatccctgttatttaaaataccgacaattgctgtgttaggtactggcgtaaactcaaattatcccaaaaatagtggcgagatgagaggccatattgtaaataatggcggactgattcttactgagtatttaccaaaccaaaaaccatcacaggaaaactttgttcgtagaaatagaattcaagcagctttaagtgatgtattgatcccagttgaatggggcctaaaaagtgggacatctcatactgtgagatatgctgctcaattaaaaagagcgatactttgtcctttacttaggggaactacacctcaagaagagattaaacatgccttgtcagagtactcagctacgataatgaatattccactatccgattttaaagacgtgcaaagcttaattaaatcagcatccggtgtaaaaacacagcaactttctcttctgggagatgaataa

SEQ ID NO: 20505 - DNA, 1035 bp, Escherichia coli
atgagcaagaaaaaagggaaaacaccgcaacctgcggtgaaaacaatgaccgccagcgccccgaaaatggaggcattcacctttggtgagccggtgccggtactcgaccgccgtgacattctggattacgtcgagtgcatcagtaacggcagatggtatgagccaccggtcagctttaccggtctggcaaaaagcctgcgtgctgccgtacatcacagctcaccgatttacgtcaaacgtaatattctggcttcaacgtttattccgcacccgtggctttcccagcaggatttcagccgctttgtgctggattttctggtgttcggtaatgcgtttctggaaaagcgttacagcaccaccggtaaggttatcaggctggaaacctcaccggcaaaatatacccgccgtggcgtggaggaggatgtttactggtgggtgccgtccttcaacgagccgacagccttcgcgtccggctccgtgtttcacctgctggagccggatattaatcaggagctgtacggcctgccggaatatctcagcgcccttaactctgcctggctgaatgagtcggccacgctgttccgccgcaagtattacgaaaatggcgcacatgctggatacatcatgtacgtcaccgatgccgtgcaggatcgcaacgatatcgaaatgcttcgcgaaaacatggtgaagtcgaaaggccgcaataactttaaaaatctgtttctctatgccccacaggggaaagccgacggcattaaaattatccccctcagtgaagtggcgacgaaggacgatttttttaatatcaaaaaagccagcgccgctgacctgctggacgcgcaccgcatcccctttcagttgatgggtggcaagccggagaacgtcgggtcgctgggtgatattgagaaagtggcaaaggtctttgtccgcaatgagcttatcccgttacaggacaggatccgcgagataaacgactggctcggtcaggaggtcatccgctttaaaaactactcacttgacactgacaacggctga

SEQ ID NO: 20506 - DNA, 963 bp, Escherichia coli
atggcctcacagagtcacctgcgctcgacctatttctccaccccgtccacactggcgcacgacgcctacccgttctggtcgggtgaactgttcaaccggggacgcgccagcgccgccgaacgtgtggaaatcgacgtcagtcataacgcccttgccggtgggcttctctgtgcggacggccagtggcggcagattgtcaccattgaggacgccctgaaaggtggctgcacactgttcgacattgagcagctcaaacgcgaaaacagcgccgacgattttaaaaacctgttcatgtgtgaatttgttgacgacaaggcatcggtgttcccgttcgaggagctgcaacgctgcatggtcgacacgctggaagaatgggaagactatgcaccgtttgccgccaatccgttcggctcccgcccggtatggattggttacgacccgtcacaccgtggcgacagcgccggatgcgtggtgctggcaccgccggtggtggccggtggcaaattcaggatacttgagcgtcaccagtggaaaggcatggactttgccacccaggctgaatccatccgcaaactcaccgaaaaatataacgtcgaatacatcggtattgatgccaccggcctcggtgtcggcgtgttccagctcgtgcgctcgttctatcccgccgcgcgcgatatccgctacacaccggaaatgaaaaccgcaatggtgctcaaggcaaaagacgttatccgccgtggctgtctggaatatgacgtcagcgccaccgacatcaccagctcgtttatggctatccgcaagaccatgaccagcagcggacgcagcgccacctatgaggccagtcgcagcgaggaagccagccacgccgacctcgcctgggcgaccatgcacgccctgttaaatgagccactcaccgccggtatcagcaccccgctgacatccaccattctggagttttactga

SEQ ID NO: 20507 - DNA, 135 bp, Escherichia coli
atggctctgtgcggtgttggagttggtgccgagaaaaatcagttttgcgccgttattgcccaggacaatcgggtcaccggtcaggtcaacgtcaaccagacgggcaaaggcgatgatgtatgcgtattaccgtga

SEQ ID NO: 20508 - DNA, 660 bp, Escherichia coli
atgaaattttccaaattttctgagttggtgaatcgtattttgtccaacaaccacagccatcgtcgcgatatggatgtaacaatcgttattcattcgcctggcagcattggttcaacaccctcagttgaggttcagtcaattcacgctggttttgattgggattccgggaaagtgctgattttcccagcacagccactgaccacgctaacaccagaacagattactgatattactgatagtgtgcgcaaaggtcagtcctggcacgcatatcaggaatacaagaagcataaagagcagttggaaaaattgtcgattgaactggatgctgcaaaacagcgcgtagcagaactggaagccaaacctgtaagccaaacttacaagttaacttttgagcaatggctggaacagcagcatgacaaaattgatgttgattgtggatgtgtaagtactgaaatgtttatgcactggataagggtcgcgtatgaggctggcaactctccggtaactccggatggtcatgttcagttttctgtttcacttcctgcagcgtttggtggagataaatattttattgatggtgtatttcaacctttgagatatgagcgtgattgtgaaagggcggttgtggccgctggcggtgtagttagttgggttaagtaa

SEQ ID NO: 20509 - DNA, 291 bp, Escherichia coli
gtgaatatcgacaccacgataacgatcgatacggccctaaatatcggtctggcacttctcggttggttttacatcatgttcagtgcggggaagtgggcggcctctgtttttctaaagcagtggggaaagcaccgcaaacaggaaagacgccagaaagtgttagaggcgttctatgacgcatttgaacttagccgcattgagccaggcacaacagccaagatagcgacaaaaggcgacctgatgatagtgatgttccgacaggagagagcagataaaggggaatcagcatga

SEQ ID NO: 20510 - DNA, 420 bp, Escherichia coli
atggcaaaggcttttacaccagaacagagggaagaactgaataaacaaattgtggaactcgtgcgcctgaatggacgaggaacggttaggcaacttgcggatgaaactggtattagccggtgtgctgttagtcgtttatcaagagagcttgctgccagtggtgatttgtatatctctggctccgggatatttctgtctgcacaagcacgcaaggactggcaaaacgcccgtaaaaaactatcaagagtaaagccgaagacatcggtagtggttgatccagaccttatctggtcattacctgacggagaaatacgtcgttacgacaggcgcttgaacatgatttgtcacgattgccggaaaagtgaagttatgcagcgtgtgctggctttttatcagggaaatttacaggaggtggcgtag

SEQ ID NO: 20511 - DNA, 600 bp, Escherichia coli
gtgactaatcagattatttacgacaggaaacggtctgatgtaatgattgaccttgaaacaatgggtactaacacatgtgctccaattgtttctatcggggcagtgtttttttctccagaaggtgaggaattaggtcctactttttatgtgccagtgaatctcagaagctcgatgttgaatggtggtgtcgccgatggtgataccattttatggtggttgaaacagagcaaggaagccagagccgcaatttgtactaatgatgcccttaatattaaggatgcactttttgaattatcacactttattacttgccatgcatgtaatttaaaaaaattgaaagtatggggaaatggagcaacattcgacaatgtaattttacgcggtgcttatgagcgcgttggcttagcctgtccgtgggaatattttaatgatcaggatgttcgaacaatcgttaatcttggtcagtttattggtttcaatcctaaaaaagatatgccatttgatggtgaacgacacaatgccctggctgatgctattcatcaggctaagtatgtatccgcaattttctcccgtcttgtaaaagggcaaggagaatcgtaa

SEQ ID NO: 20512 - DNA, 711 bp, Escherichia coli
gtggagcttgagtatatacgcagctgcgtctccacggcattggctgatattcattatcgccagcgtggcatcctagaggtccagcttgagcagatgcgtctaggcagatcaggacgctttaacaataaaccagtccggtcaatcagtgtaggtgatgataactcatacgaagtgtctgttcctgctgagccggttagattccaccagggcaaaacatttaaacaatcatcaatgttgctcactgatattgattttcagagcgccagctggcgcagggctattggtcagttgaataacgaggaatcagcctggctttattattgctacggatgcaagcctaactacaacaatgatgtgattgtttgtcagtggttatggcttgattttctggttgcgcattcgggtggcgggtttaaaaaaatgaaggcctccacgaaaaaagccatgagaaaattgatttattacgcggcacagcaggttaagtcagaacttacgtgtgctgaggcagttgatgatagagaacaggacaggcagctgagttttctactgaatatatctattgatagctggagacaagattataaagaacgctggcttttaattaagtcgcgatgtctgagcttaaatcgaactgcattattaaatgcggcggagaagcgcagtgaaatcatcaaacgccatcgggcaggaagtgccattctgcctttgtaa

SEQ ID NO: 20513 - DNA, 249 bp, Escherichia coli
atgcgatttattgcttataataaccgcatgaaaccagaagaacttattcgccactttggcagtgtagaaaaagcagcggctggggtaggtgtaacacccggtgctgtttaccaatggttaaccgctggagagattccttcattgcggcaaagtgatattgaagttcgtactgcttacaagctgaagagtgactttacaactcggcgggtaaagcagtcgattaaggagagccgtaagcgtggagcttga

SEQ ID NO: 20514 - DNA, 597 bp, Escherichia coli
atgaaaacacgaggcgaacgactgaaagcacgccgtttagagatgaagctgacgttgcgagaagttgctgaggctgtcgatatctctattgcaggcgtccaaaacttagaacgtggcgacgtaatgccgtcactggagataggtattgccctggctaaatgcttacgcaagccagtgcattgggtgctgtatgggacagaatatgaccctgatcgcattcctgttattggcacaactgaaagtggacctgatgaagagtggaagccaggacaggttccaaatactgagcgattcctgccattcatcagccagcgcaatactgtttatgcgttaactatcagcaatctggcgcagggaaactatcagccaggcgattttctcctggtcgattctgcgctggaactggttcccggcgaggatgttctggttcgtgatactgcaggaaatatcaccatccagcgcctggcccgttttgatgatgaaaattactatctggacggaacaaattcacaacgcgccatcttcaggaaaagcgatcttgaatttgttcaccaaatagtcggaacgatcaaatcattcatggttgagggtagatga

SEQ ID NO: 20515 - DNA, 3996 bp, Escherichia coli
atgacattaaacgatttctatgcggatcgctttggcagcgatccgttctcgctaattgaagcagcacgggatgaactaaccgagctggcacagatggctggtatcaactggtctgcctgttccgacaacatccaactcaaccctcgcgggggtgttgagcgttactcttcatacaataaaacatctccagaagctctcgaaaagagcctcaaaggacgcgtagaaatttactcccggctggaacacagcaaagggattgattacccgttcattaacttcgtccataaaggcagcgatgctggctcatggagcggtttctccttcctgttttctgaatatcgccgtgagcaacaacggaataatgcgaccgtggtcgcacaaccggaagaagaacgggcaagaatagaacgtcaggccgaagcacgtcgtcgccgtgaagaacaaaaacgaattaatgacctgaaaaacaaccaaatggaccatgaacgtttgctgggatggctggcattccacagcgcgtgggaacatgctcctgcagaagacggctcatggccatatgcgattaaaaaaggtattcgtgacgtttttaattcgtgtgatgtgcgtcgcgtgaccagtcacgacagcgcaaaatggagcagggggccaaccacgtatatggctatccctctggctcacctggacggtcgttacgatggtcgtattgtgggttggcagcgaatcgacaaacaaggtggaaaataccagaccagcgccgtaaccagcggcgatttcgtcggtgcctgctttgttatcggtgagctaaaaggggcgcaaaacatcgctgttacagaaggttttgctactggtgcatccatctggcttgccacgaaaaaagataaacgctttgacgctgtggttgtcgctgtatccgctaataacatggttcatgttgtggaacaactggtaaacatgtacccggcggcaaaaatcacctgcgcactggataatgaccggaaatcagccacagaaggaaaagggaataccggcctgcggactggctatgaaatcttatcgaaattcaacgatgtccgctgcgtctatccaacttttgaagacgatccgcaaatggagtgcagtgacttcaacgacctgcacaaactgcgtggacttcgtgaaacagcacgtcaactgtttgcaactgcaaaccgcctgaaaaccggcactgatttgctatctctgacgctcaaccgcctgaagacaattaagcgggataaccgtcgtacttttgccaaagagctgctgagagcggtggatattggcatgctaacctgtccggttcctaacagtccgtcagacttatttaacatgttctgcatcgttctgcgtgaaatggggctggaaaatatctatcgcgctacggtaaaagaccacattgcccgtcgcctgaataaaaagtgccgtattgcccaggctccgcgctcattcagcgaacgcataactgatcccaataaacgtcctcaacatatcacctataagcgttttgaaacttcggtaatgaccgatgacgtcctgaagtatgtgcaatcactacaggggatagtcatcgttcgtgctggtatgggttccggcaaatctactggattgttacgacctttaatgcatagctcagaacgtggtatctctgttgctcaccgtgtttcccttattggtggcctgtgggaaatgatgacagaaggaaaaggtgtaaaagccgatatcctgcactatcaggaccctggctatcaggaaatggctccatacgccagtaaactgaccatctgcataaactcgattgttaaaaactgctggcaaccgttgatgcgccagcacgactattttggctttgacgaggccacgcaagggctacgtgccgttctttccggtcgggctatggaaaacccggtggctgtattcaatacgttaatcgacgcgctggccagaacggaacaacacccaataatggtggatgctgatgcgaacgatctgctggttgacctggctgaactggctatgaaacgccgtgaagaactaggtttaccggcatggctgcagatccacgtaattgaattacctgttgatgttcgcaaccgcgaaacaggtgagccaatccgggttttttatacagaaaaagatcgcattatgaccgaggtggtgaaagctgtatcggatggcgaaaaaatcatgttggccaccgacagctccacctttgcagaagatgtgacagccaccctgagaatgcattttcctggtaagaaatttctgtgtgtaaaccagaaaaacaaaccagagccagaagttgaagcatttaccaatcaaccgaaaaagatggtcaaaaaatacgacggcctgatttatagcccgtctatttcatccggtgtgtcgattgagcaaaaacattttgaccgtcatttcggcatgttctgtggtgaagttgtacccagcgacgcagtgcaaatgctacgccgcgaccgtacagcaaaagaatttattatcggctttgataaagctcgcgcaaaacgtgaaactgacccgcaaaaaatagaacgagcattcgcccaggcattgcttgctaccgcaggcatgaacggtgaactgacggatgtcgttttcgatggcgaccgtatatcaatgggggtggccaataccgactttaccaggatgaaaattaaagcagccgcaattgaagcgtctgcgcgtaacgactacgccagcaacatgatctgcatcatgcacagcgacggttataaggtatcgccgctggccaccgattatgctgcgaatgatatcggtaaagatctgcgtaaagaagcgcgggatattgtgtgggaacagacactggatctgcatctcaatacagaaactccacaagaatcagagcgtgaagaactgctaaaaaaacgcgcgctgacgcttgaagaacaagcaaaacttgtccgctgggatattgagaacgaactgaaactaccggttgaagaaggcacgctgaaattctatttcgatggtgctcgagacaaagttcgccgctatgaaacaatgcttttagatgaggtaacagctcgtcgttacgaccgggaagaagcagccatcaattttacctacgcataccgtcaggcgggacagtggcaatattttgtagtgaccgcgatgactcgcgagcaggctgatgatgtctttaaaactaaattccctggaataatcgactacaaggtaaaagctactcctactgttgaagtcggggcgcgcggtttctatgcgcttaaatcagcaactctccggcagtactttatcgactgcggtatcaaccctgagactatgaccggcgaggcgactcaggagcgtctcaaattcgctcgagataacctcatgacagccgaacgccgtgacctgttgaataacgttctgcacattggtggttttatgacgccaaaagggaagcctaaagtgccggaagcgttgtttaaaaacatttgcgactctcttggccttaaaacaggtaaacgtcgcggcagagacggcgataagcgtccaaccttgcgttttgttgagcctgaatcagcggcatttatgctggatattcttgttcagcgtcagaaagatggcctaaccctaaaaacgcgtaaagccgagaagacagccatcgaaatggatcgcgatttggatctcaatatatatatggatgataaaacgcgatccacaaacgagcaggttcaaaacgcccctcattcagtaatttctgaggctttggccgtattgccggtggctgttcctgagtcctgggcgatgagtgcgctttccggtgaggagctggccactatgtcatcatggtcatcagccagcatagctatgacgtttgcatctctgtatctcacagagttcatggatcacttgtccagcaatgaattgcggcggttacgagaatacattaccgggaatagctcatgcagctacgaagagcagggcgctttctatgggtaa

SEQ ID NO: 20516 - DNA, 192 bp, Escherichia coli
atgggtaatcagtggatattatctttgtgtctcttgctttgtgtgttccagcaatggttttggttcatagatcgaaagtctcacaaggaaaacatgaaggccaggaaggcgatgtttcgtggtgaacaactcgcgcagacttatcgtatgtggaaacgcttctatcgtgatttttcggtgaacggggagtaa

SEQ ID NO: 20517 - DNA, 327 bp, Escherichia coli
atgtctactactgcatttttggacaaacttgattaccgtcagctgcagttctgccgggatgaatgcgatcgacgcattaaggctatccaggaggaagaaaaaaaggtcgcctgggctgtaacagatcgtggccttatctttggctggttccgtacggaggattacctgaaagcagtggaattattggcgcgtaaggctgctgagcgttgggaacgagccgacaaggaaaacccggagacgaagtatgaactgaatctctacatcgagggcaaccgtctaccattgtcagagtataacgctttgtttgctgatggtgagtggggttaa

SEQ ID NO: 20518 - DNA, 396 bp, Escherichia coli
atggcttttcaatcatacaaatacgaatcccctttggataagggatacattcgtatcaagttaagtcgttctcagcataaggctatttttaaggtaaggaaaattcgcatattggatgcgtatgcgtattactacaacggtgaaaatgttgttgttgaacactttcttgcacgatggtttgtagctctgatttttgtccctctcctgttaattggtacttttgtggatggttttcctagtacatggcgggagataaagaaaggcctattcccgcgtaagtacggcagattttcgcaagatagctggcgagttatacctggtaaacattctgtggatgagcagccgattgttgattactggttgaagcgtatggctgatgctaaaaaagttgattga

SEQ ID NO: 20519 - DNA, 288 bp, Escherichia coli
gtgaagagttttattttggttttatgttttgccttttctgctgcggtttatgcccaggaagatagcatttctgttattaactcatcagcggagcttgcatgtaaaaataatcccgatgctgcatcaaaagaatcatgcaaagaactgctcctttcgacggctgcttttgcttctgaaaatgcgaaattttattcagccttctgtcgcggctatgttaaggaagaagataaagaaaaatgtgatgatgccggtaagttagttaggtatttccactctcttaatccgtaa

SEQ ID NO: 20520 - DNA, 165 bp, Escherichia coli
atgttcaaattcaaatttgcggcagtcgttcgcacagacaaaaagtcccacattcatcatctttccactatcgcgtcatctgaacgggaagctcgtcgccagttcgccagccggtttgtcctggtattgtctgcccgtattccggtgcgcgaggtggctgcatga

SEQ ID NO: 20521 - DNA, 234 bp, Escherichia coli
atgaatcaggtaaaaatgaacactgttggcctgctggaatcgttggatgaacgtctggctcaggtctatgcgctcgtatcatcagcccatcggacagtctccagttgtgaggcgtcgatttacctctcagaggctggaaaacttctgcagattgcgtgtgagttaacgcatgaagcacagggatattctgcgtctctctcgtcgcacttgctgcgcgataaggaggctgaatga

SEQ ID NO: 20522 - DNA, 165 bp, Escherichia coli; identical to SEQ ID NO: 20520

SEQ ID NO: 20523 - DNA, 327 bp, Escherichia coli; identical to SEQ ID NO: 20517

SEQ ID NO: 20524 - DNA, 192 bp, Escherichia coli; identical to SEQ ID NO: 20516

SEQ ID NO: 20525 - DNA, 3996 bp, Escherichia coli; identical to SEQ ID NO: 20515

SEQ ID NO: 20526 - DNA, 597 bp, Escherichia coli; identical to SEQ ID NO: 20514

SEQ ID NO: 20527 - DNA, 249 bp, Escherichia coli; identical to SEQ ID NO: 20513

SEQ ID NO: 20528 - DNA, 711 bp, Escherichia coli; identical to SEQ ID NO: 20512

SEQ ID NO: 20529 - DNA, 600 bp, Escherichia coli; identical to SEQ ID NO: 20511

SEQ ID NO: 20530 - DNA, 420 bp, Escherichia coli; identical to SEQ ID NO: 20510

SEQ ID NO: 20531 - DNA, 291 bp, Escherichia coli; identical to SEQ ID NO: 20509

SEQ ID NO: 20532 - DNA, 660 bp, Escherichia coli; identical to SEQ ID NO: 20508

SEQ ID NO: 20533 - DNA, 327 bp, Escherichia coli
atggcgctgacaccggcagaacggcaaaggatacgcagggaacggttgaagaaggaaggcacatcaagacgggactggattctagaacctgacgagttacgtatgttgggggaaatttgtgtattgcgtagaccagggcgagttccatattcggagaacgaagtcattggtttgctgatcaggaaaaactataaggagctgcagaagcagctatctactacttgcccgcgatgtggtcaaaaaatgcctgtttcagaatgcatttttgatggcgaagggtcatgccaccttacaaccacgaggctgaaacttgcgctcaaagtgtga

SEQ ID NO: 20534 - DNA, 243 bp, Escherichia coli
atggataaaaaggcattgctttttgaaatgatacgaaaacggagcgaaaagagcttttctgatggtggtgatgggtttgttttcgcttcgatgcttgcttttgatgttgggttaaatagcagaattgttaaaaggatgcttgattctgctgtccgtactggacttcttgagaaagttgatcgtggcatagggagagagcataagtatcgggtcacacagcagtttacgcagttaattcattga

SEQ ID NO: 20535 - DNA, 810 bp, Escherichia coli; identical to SEQ ID NO: 6004

SEQ ID NO: 20536 - DNA, 990 bp, Escherichia coli
atgaaacaacgctctcttctaaaaaatgctccggatattaatcgcattatgagtaataatcatcatgcacctgaacatcagccggtatcacctatggttggtgatttaaaacgtcaactgagttcattaaccggtaatagcataactttgccagtatgcggacgtaatgttaactttaagttagagacgatccccgcagataaagtagaaatggcaacaatggtatggctaggtaatgagcgtgatcaagatttattaaatgaatcttctctagctgatttaattccatcttttctaacttctgggcaacaaaatccggctttcgcaagaaaagtgtcaggtattgttgaagtagctgatggttctcgaagacgtaaagcagccattataactggatgcgattatcgtgttcttattggcgatttagatgatgaacaaatgcaatggttatcgcagataggcaacgactatagacctatcagcgcctatgaaagggggaaaagatacctgcgaaggctccatgaatttgacggtaacgtaaaatctttagctgaagccgaaggcgtggatagaaatattatcagccgatgtattaatacagccggtttacctaaagatatattggaaatatttaaccatcctggtgagttatcagccagagcaggagacgctctttttaaagcatatcagggacaggaagcagccatgaaaaatgctgcatctcagttgctgatgatgaaaaaatcaggtgaaagtttagatgcgcaaagaataatacaggctcttcatgatttcattattgttgagaaaaacaattcacatggagagaaaagggaaaagaaatatggagacggtgttgtggcgaaatatgggaaaaatttcacaacattaaaattagataacagaaaaataccatcgcacctaatgagtaaaattgaatctattcttgaggaggcgtttggaaattcttccgatgtaaaaaataactaa

SEQ ID NO: 20537 - DNA, 1170 bp, Escherichia coli
atgtctttgaaaaagttattacaagattgtgttacgcgcggtcaagaaatgacccaagcaattgctatagctcaattcggtgatgatagtcctgaagctcggcgtatcacgcgtagatgggggataactgaagtagcagatttaattggtgtaactcctcaagcaataagagatgctgagaagaacgggcgtttacctgcacctgactttgaaatgagaggaagagttgaacgtcgtgccggttataccatagatcaaatcaatagtatgcgagctgtttttggcaacccaaaccaacggccacaagataaaaacccagttgtgcttgctgttatgtcacacaaaggcggcgtttataaaacatcgtctgcagtacatcaggcacaatggctagcattacaaggtcatcgtgttcttttagttgaaggtaacgatcctcagggaacagcctccatgtatcacggttatgtacctgatttacatatacatgccgaggatactttactgccattttacttgggcgaacgcgataacgctgaatatgctataaaaccaacatgctggcctggactggacattattcctagctgcctagctttacaccgtatagaaacagatctcatgcaatatcatgctcagggtaaattgcctcaccctcctcacctgatgctacgcgcagctatagaatcagtttgggataactacgatgttatcgttatagatagtgctccaaacctcggtacaggaaccattaacgttgtttgcgcagctgacgttatcgttgttgctacccctgcagaattatttgattacgcctctgttctacagtttttcacaatgcttctcgatctcctagaaagcgttgacctaggcggatttgagccgaccgttcgcttgcttctgactaaatatagtctcactacaggaaatcaatcacgatggatggaagagcaaataagaaatacatggggatcaatggtattacgtcaggttgtacgcgttaccgatgaagtaggtaaaggtcagataaaaatgcgaacagtatttgaacaagcggcaaaccagcgttcaacacttaatgcatggagaaatgccgtctctatatgggaccctgtttgtcgagaaatttttgatgatctaataaaacctcgctgggagaacgaagaatga

SEQ ID NO: 20538 - DNA, 990 bp, Escherichia coli; identical to SEQ ID NO: 20536

SEQ ID NO: 20539 - DNA, 288 bp, Escherichia coli
atggatataacacctttccttcatgctctttgtgctgtggctgcgcagctactgattggtctttttaccgggaactgggcttacggagcgatagccggttgtacgttcttcattgcgcgtgaacacacccaggcagaatatcgctggattgaaatgttcgggcatggcaagcgtatgaatatgccgtggtggggcggttttgatcctcgcgcgtgggatgtagcaagcctgatggattttgctgtgccggtggtggcgtgtttacttgtatttatattttttgaataa

SEQ ID NO: 20540 - DNA, 1041 bp, Escherichia coli
atggctacatcgacagtaattcctgatgacatcaaaacgctaaaatccgatgttagtaaactaaaaaacgatcaaggaagctacgcaacaaaatcatatgtagacagcaaagatgaaaccgttggtgactggtctgcttcatggtatcagcaggtattgccaactagcggagctatatttgggagaaaactccgctcaactcacaggacggcaggtgttgaggatgcgtattgcgaactatacctcaaaaaatggatagacagtccaggtaacgcaatggcgcgccttaacctgaacgataacgggacaaacatttgctgggactttaccaacctttatggcggtacgatgatttttcccggtgacagcggatacctcaaaatgggtaactgccttatgtcatacagcaagcgtggaagtaacgcgcttattaaatttgattacaccgacacattacagatcaaatatgctaatcatgggtcaaccatgacattaaacacacagggaaccgctcacgctggcgtaacaactagactatggggtaattctagccgtccggttgtttatgaagttggcgtagatgaggctctgtatatgttctacgcacagaaaactaccagcaatacctacgaattaacggttaacggcgcgtgcaatgcaagtgcatttaatcaaggctctgaccgggatctgaaagacaatattcaggtgatcgataatgcaatcgaccgcattcgtaaaatgaacggctatacatacacgcttaaagaaaacggtatgccttacgctggtgttattgcacaagaaaccctggaagccatccctgaagccgtagggtctatgatgaaatatccagacggcgggagtggattagatggagaagaaggtgaacggtattacactgtagattattctggtgttactggcttgcttgttcaggtagccagagagtcagacgacaggataacagcactggaagaagaaaacgcagaattaagacaaagattatctgcaattgaggcggcgcttgcgtctaaataa

SEQ ID NO: 20541 - DNA, 282 bp, Escherichia coli
atgaaagatttaacactcaaatttgcagacagggccgacttttcggcctttatggatagcactggctattatgacgacgagacgatgcaggatgatattcttattgacgtgataggtaacgtgtacaaagaaaccggagaactgactgaagatggcgaaccggtatgtgttaaggaagacggatattttgtaaacgtgcgcatcattaatgatgtgaaaacaccgtcaatattcgatgaatacgtggttgctgttgagcatcaacttcgtggctggatgtga

SEQ ID NO: 20542 - DNA, 2589 bp, Escherichia coli
atggcagcagtaaaaatctcaggtgtgctgaaagatggtgcgggaaaaccaatacagaactgcactattcaactgaaggcaaagcgtaacagcaccacggtactggtgaacacggtggcttctgaaaatccggatgaagccggacgttacagcatggatgttgagtatggccagtacagcgtcaccctgctggttgaaggttttccgccttcacatgccgggaccattaccgtctatgaaggttccagaccaggtacgctgaatgattttctcggtgccatgacggaagatgatgtcatgccggaggcattgcgccgttttgaggaaatggtggaagaagcggcacgcaacgccgaagccgcctctcagagcgcagcggcggcaaagaaatccgaaactgcagcggcatcatcgaagaacgcggcgaaaacctcagaaacgaatgcagctaacagcgcacaggcggcagcgacctcacagactgcatcggcaaactccgcgacagcagccaaaaaatcagaaaccaacgcgaaaaacagcgagacagccgcaaagacgagcgaaaccaacgcaaagtccagccagacggcagcgaagaccagcgaaacgaatgccaaagccagtgaaactgcggcaaaaaacagccaggttgcagcagcccaaagcgagagcgcggcagccgtttctgcgacttcagcagctggatcagcaacagctgcggctaacagccagaaagccgcgaagacgagcgaaacaaacgcaaagtccagccagacggcagcgaagaccagcgaaacgaatgccaaagccagtgaaactgcggcaaaaaacagccaggttgcagcagcccaaagcgagagcgcggcagccgtttctgcgacttcagcagctggatcagcaacagctgcggctaacagccagaaagccgcgaagacgagcgaaacaaacgcaaagtccagccagacggcagcgaagaccagcgaaacgaatgccaaagccagcgaaactgcggcgaaaaacagtcaggatgcagcggcccaaagcgagagtgccgcagctggttctgcaagtgcggcggcttcttctgccactgcatcagccaacagtcaaaaagcggcaaaaaccagtgaaaccaacgcaaaggcgagcgagactgcggctgcgaactcagcggaagcatcggcagcaagccagacggcagctaaagcaagcgaagatgcagccagagagtacgcaagccaggctgcggagccgtataaatatgtcttacagccgctgcctgatgtgtggataccgtttaacgattcgctggatatgattacgggcttttcgccgtcatataaaaaaattgttattggtgatgatgaaataacgatgcctggcgacaaggttgttaagtttaaacgcgcatcaactgccacatatatcaataaatcaggcgtatttagtgttgctaaaattgatgagccacgatttgaaaaagaaggtttattgattgaaggacagcgcactaactattttgttaaatccaatactcccgctgaatggacgagtaccagcaatatcgataaaactaataatggtgttgatgaatttggtttttcatatgccaaaatgcgaacaaaagataatatgacaggacaatcatctgcacttagtctgcatacatgcagtgcatcccgggggattgatgttagtggcgataataagtattgcactgtttcatgcagggttaaagctcctgatggtcttcgttgtcgtttgcgttttgaaaaatacgatgggtcggtttatacatttttaggagatgcttatttaactttcggaactctgacaatagaaaaaaatggcggagcagccaatagaatagcagctactgcaactaaagatccggttacagggtggattttctatgaggcaactatagaagctgttgaaggtgaaaccttaattggcgcaatgattcagtatgcgccgaaaaaaggtggtataactgaagcgggagattatatttaccttgcaacaccacaatttgaaaacggcggatgtgcttcatcttttgttattacgacaactgcacccgcaacccgcgccagtgatatggtgacgatcccaactgaaaataatatctataatagaccgcttacgtgtcttgtcgaggttaatagaaattggggcgatattcctcctaatgtagcaccgcgtatttttgatttttctggtgtgccacctattgagtcaattacatacgcttttaacacaactgagaaatattacggtcagctttatatgcaaacttataaagcgtcgacaagtacttacgtttctagtgtgtttgctggtcgaactgatgttcgaaaattcattggtggttttaatatttattctgatggtactaaacgagtagtttctaacggtgaggctactaaaactatgaaaacggagtggacgggcgtaaaaacacggacctttattcgaattggaggtcaagccacatcgggaactcgtcatctattcggccatttgagaaatcttcgtctctggcataaagaattaactgatgcgcaaatgggggagagtattaaatga

SEQ ID NO: 20543 - DNA, 600 bp, Escherichia coli
atgcgtaaattatgtgctgttattctgtccacagtagtctggctggtcgccgctggtacgccagcgagcgcagcagagcatcagtccacactaagcgccgggtatcttcagacccatactgatatgcccggcaacgatgacctgaagggcattaacgtgaaataccgttatgaattaacggacacgctggggctggtgacgtcattcagttatgccaatgccaaagatgagcaaaaaacgcattacagcgatacccgctggcatgaagattcagtgcgtaaccgctggttcagcatgatggcggggccgtctgtacgcgtgaatgaatggttcagtgcttatgcgatggcaggtgtggcttacagccgtgtttcgactttttccggggattatctccgcgtaactgacagcaaggggaaaacgcacgatgtgctgaccggaagtgatgacggtcgccacagcaacacgtctctggcgtggggggctggcgtgcagtttaacccgaccgaatccgtggccattgatattgcttatgaaggctccggcagtggtgactggcgcactgacggtttcatcgtgggtgtcggttataaattctga

SEQ ID NO: 20544 - DNA, 813 bp, Escherichia coli
atgtgggctgtgaagctgcagcagatgcaggacggacgcctttatatcgcgggtattggtgccggtattgagaacacccctgacggcatgcagagtcaggtgctgctggcggcagacaggattgcgatgattaatcctgcgaatggcaacacaaagccgatgtttgttggtcagggcgatcagatattcatgaacgaagtgttcctgaaatacctgacggctcccaccattaccagcggcggtaatcctccggcattttccctgacaccggacgggcggctgacggcgaaaaatgccgatatcagcggtaacgtgaatgcgaactccgggacgctcaacaatgtcacgattaatcagaactgccggattctgggaaaactgtcagccaaccagattgaaggcgatattgttaaaacggtgggcaaagctttcccccgtgactcccgtgcaccggaacggtggccatcagggaccattaccgtcagggtttatgacgatcagccgtttgaccggcagattgttattccggcggtggcattcagcggcgctaaacatgagagagagcatactgatatttactcctcatgccgtctgatagtgcggaaaaacggtgctgaaatttataaccgtaccgcgctggataatacgctgatttacagtggcgttgttgatatgcctgccggtcacggtcacatgacgctggagttttcggtgtcagcatggctggtaaatggctggtatcccacagcaagtatcagcgatttgctggttgttgtgatgaagaaagccactgcaggcatcacgattagctga

SEQ ID NO: 20545 - DNA, 327 bp, Escherichia coli
atgactaaaaatactcgtttttcccccgaagtccgtcaacgggcagtccgtatggttctggaaagtcagggcgaatatgactcacaatgggcgacaatttgttccattgccccaaagattggctgtacaccggagactctgcgtgtctgggtacgccagcatgagcggaataccggaggcggtgatggcgggctcaccaccgctgaacgtcagcgtctgaaagagctggaacgtgaaaatcgtgaactgcgccgcagtaacgatatccttcgccaggcttccgcttattttgcgaaggcggagttcgaccgcctctggaaaaagtga

SEQ ID NO: 20546 - DNA, 405 bp, Escherichia coli; identical to SEQ ID NO: 6159

SEQ ID NO: 20547 - DNA, 468 bp, Escherichia coli
atgagcagagtaaccgcaattatctccgcactggttatctgcatcatcgtctgcctgtcgtgggctgttaatcattaccgtgataacgccatcgcctacaaagaacagcgtgataaaaaagtcagtgagctgaagcaggcgaccgccaccatcgctgacatgcagcagcgtcagcgtgatgttgctgcgctcgatgcaaaatacacgaaggagttggctgatgcgaaagctgaaaatgatgctcttcggcgcaagcttgataatggtggtcgggtgctcgtcaaaggaaaatgctctgtgccatcctcagccgaaacctccagcgcctccggcatgggcaatgatgccaccgtcgaactctctccagttgctggacgaaacgttctcggtatccgggacggaatcatcagagaccagacagcactgagaacgcttcaggaatacatcaagacgcaatgcccgaattaa

SEQ ID NO: 20548 - DNA, 177 bp, Escherichia coli
atgagggacaaaaccgcgcaccataaacgcggtaaaaacccggtgtgcatcgtttttgattatttccgcacactcgcgcagaaggaattccccgtcgggctacggtcatggttaatgcggaaatacggcgacgatgcagcgcatgatgtgtcaggcttgaatacctttatccgttaa

SEQ ID NO: 20549 - DNA, 540 bp, Escherichia coli
atgccggttatccagctcaggaaaacgtcgctgcaccgacagaggaataccgtcgagaatactggatatttcccttgctatacgcgacagcacgaaagtacagaatgcggtttccaccacttcagccgattctttggcatttttcagttcctgcgccgtcgcctgagcacgagtcaggcgatggcgctcaaattcaagtgttccggggtgaagatctgcctcgctggccagccgcagttcttcaacctcccggcgcagcttttcgttctcaatttcagcatccctttcggcataccattttatgacggcggcagagtcataaagcacctcattacccttgccaccgcctcgcagaacgggcattccctgttcctgccagttctgaatggtacggatactcgcaccgaaaatatcagccagctgctttttgttgacttccattgttcattccacggacaaaaacagagaaaggaaacgacaaaggccaaaaagcccgttttcagcatctgtcgtttcctttcttttcagggggtgttttaa

SEQ ID NO: 20550 - DNA, 573 bp, Escherichia coli; identical to SEQ ID NO: 7694

SEQ ID NO: 20551 - DNA, 879 bp, Escherichia coli
atgaaaacgcgtaaaggtattattttggcgggtggttctggtactcgtctttatcctgtgacgatggccgtcagtaaacagctgttaccgatttatgataaaccgatgatctattacccgctctctacactgatgttagcgggtattcgcgatattctgattatcagtacaccacaggatactcctcgttttcaacaactgctgggtgacgggagccagtggggcctgaatcttcagtacaaagtgcaaccgagtccggatggtcttgcgcaggcgtttattatcggtgaagagtttattggtggtgatgattgtgctttggtacttggtgataatatcttctacggccacgacctgccgaagttaatggacgtagctgttaacaaagaaagtggtgcaacggtatttgcctatcacgttaatgatcctgaacgttatggtgtcgtggagtttgataataacggtactgcaattagcctggaagaaaaaccgctggaaccaaaaagtaactatgcggttactgggctttatttctatgacaatgacgttgtggaaatggcgaaaaaccttaagccttctgcccgaggtgaactggaaattaccgatattaaccgtatttatatggaacaaggacgtttgtctgtcgctatgatggggcgtggctatgcatggctggatacagggacgcatcaaagtcttattgaagcaagcaacttcattgccaccattgaagagcgccagggactaaaggtttcctgtccggaagaaattgcttatcgtaaagggtttattgatgctgagcaggtaaaagtattagccgaaccgttgaagaaaaatgcttatggtcagtatctgctcaaaatgattaaaggttattaa

SEQ ID NO: 20552 - DNA, 426 bp, Escherichia coli; identical to SEQ ID NO: 6184

SEQ ID NO: 20553 - DNA, 351 bp, Escherichia coli; identical to SEQ ID NO: 6245

SEQ ID NO: 20554 - DNA, 405 bp, Escherichia coli; identical to SEQ ID NO: 12456

SEQ ID NO: 20555 - DNA, 207 bp, Escherichia coli
atgacgcgacaggaagaacttgccgctgcccgtgcggcactgcatgacctgatgacaggtaaacgggtggcaacagtacagaaagatggacgaagggtggagtttacggccacttccgtgtctgacctgaaaaaatatattgcagagctggaagtgcagaccggcatgacacagcgacgcaggggacctgcaggattttatgtatga

SEQ ID NO: 20556 - DNA, 312 bp, Escherichia coli
atgagagttgagcagaataatttcagggacatgttctccgtttatctctccgttacggcgcagacgcagcatgtgtttggtgtattcccggcggtccgggtcacgtacgcgggtctggcaggcgaagaatggatgaaagccttcccgctgcaggctttccagtacggtgatggtggggatgtacgtatagcgttcactgcaggaggtatgccggtcttcaccgaaaatacccggtacatggtgcatcagttcttcgtgtgtcagcggacggtcacggcgtatctggtttacataaccaaaacgactggttaa

SEQ ID NO: 20557 - DNA, 819 bp, Escherichia coli
atgcgactagccagtcgttttggttatacgaaccagatacgccgtgaccgtccgctgacacacgaagaactgatgcactatgttcccagtattttcggtgaagaccggcatacttcccgcagtaaacgatatgcgtacattcccaccatcaccgtactggaaagcctgcagcgggaaggctttcagccattcttcgcctgccagacccgtgtgcgcgacccgggccgccgggaatacaccaaacacatgctgcgtctgcgccgtaacggagagataaacggagaacatgtccctgaaattattctgctcaactctcatgacggtacctccagctaccagatgctgccgggttacttcaggttcgtctgccagaacggatgcgtctgtggtcagtctctgggggaagtgcgtgttccgcaccggggaaatgtggtggacagagtcattgaaggggcttacgaggtggtgggcgtgtttgaccggatagaggagaagcgtgatgccatgcagtcgctgattctgccgccaccggcacgccaggcgctggcacaggcggcactgacttaccgttatggtgacgaacatcggcccgtcaccaccgccgacattctgacgccacgacgccgggaggattacggtaaggacctgtggagtacttatcagaccatccaggagaatatgctgaaaggcgggatttccggtcgcagtgcaaaaggaaaacgtatccacacccgtgccattcacagcatcgacaccgatattaagctcaaccgcgcattgtgggtaatggcagaaacgctgctggagagcctgcgctga

SEQ ID NO: 20558 - DNA, 369 bp, Escherichia coli
atgtcggacacactccccggaacaacgcttcccgatgacaacgaagaccatccctggtggggactaccctgcacagtgacgccctgtttcggcgcctgtctggtgcaggagggtaaccggttgcattaccttgccgaccgcgccggtatcagaggccggttcagagatgcggatgcgtaccctccggaccaggcctttccgctgctgatgaaacaaccgaaattaatgctcaccagtggtgaactgaatccccgccatcagcataccgtgacactgtatgcgaaaggactgacctgcgaagccgataccctgggctcctgtgattacgtttatctggctgtttatccgacacctgaaacgaaaaagtaa

SEQ ID NO: 20559 - DNA, 351 bp, Escherichia coli; identical to SEQ ID NO: 6245

SEQ ID NO: 20560 - DNA, 405 bp, Escherichia coli; identical to SEQ ID NO: 12456

SEQ ID NO: 20561 - DNA, 333 bp, Escherichia coli
atgacgagcaaagaaacctttacccattaccagccgctgggcaacagtgacccggctcataccgcaaccgcgcccggcggattgagtgcgaaagcgcctgcaatgaccccgctgatgccggacacctccacccgtaagctggttgcgtgggatggcaccaccgacggtgctgccgttggcattcttgcggttgctgctgaccagaccagcaccacgctgacgttctacaagtccggcacgttccgttatgaggatgtgctctggccggaggctgccagcgatgagacgaaaaaacggaccgcgtttgccggaacggcaatcagcatcgtttaa

SEQ ID NO: 20562 - DNA, 471 bp, Escherichia coli
atggccgaggttgagctggctcttgccgccgtactcggtactgaccttgatatgctctttgccgcgctcatcgtcgaggcggattttgttgttcgccggggtgcgcagtacgttgcgcttgtagttctgaatggtcacatggtcggtgtgtgccgagtcgtgttttaccccggcgatataaggtcggtccgggttgccttcctcaaaggcgatgctgacttccgttcccgccagcagcggcagatgcaggccatacgtgtcacctgcatacgggcgcgactggcgcacccacaggctttcataacccggtttccacgtatcgcggtcaaagtcgaggttgacccggtagcgcccgtccttgtcgatatgggcatagatatcgtttttcaccgtgctggtgacccgcgccgggagtgtgccggccattaccgggcgggggataagcgccgggcggtagccgtagcgctctga

SEQ ID NO: 20563 - DNA, 432 bp, Escherichia coli; identical to SEQ ID NO: 7321

SEQ ID NO: 20564 - DNA, 294 bp, Escherichia coli; identical to SEQ ID NO: 8158

SEQ ID NO: 20565 - DNA, 336 bp, Escherichia coli
gtgaccctggagccccgtatcttcggctggatggaccgtctgtgtgaagactactgcgggggtatctggaatctgtacaccctgaacaacggtggcgcatttatagcacctgaaccggatgaagatgatggagaaacctggatactgttcaatgccatgaacggtaaccgcgctgaaatgagcccggaagccgccggcattgctgcctgtctgatgacgtacagccatcatgcctgtcgtacggagtgttatgccatgacggtccattattaccggctgcgggattacgccctgcagcatccggaatgcaacgccattatgcgcatcattgactga

SEQ ID NO: 20566 - DNA, 336 bp, Escherichia coli
gtgaccctggagccccgtgtcttcggctggatggaccgtctgtgtgaagactactgcggtggtatctggaatctgtacaccctgaacaacggcggggcatttatggcccccgaaccggatgacgatgatgacgaaacatgggtactgttcaatgccatgaacggtaaccgcgctgaaatgagcccggaagccgccggcattgcagcctgtctgatgacgtacagtcatcatgcctgtcgtacggagtgttatgccatgacggtccattattaccggctgcgggattacgccctgcagcatccggaatgcagcgccattatgcgcatcatcgactga

SEQ ID NO: 20567 - DNA, 1107 bp, Escherichia coli
atggagccagagctttcagagcaggctatttatagcgaatttgaagatactctgcagattgtcgatgcggagtcagtaagccagtggtgtcgctgggtgacatttaccgccagacataatcacttaccagcaccgggagcggatgcctggccggtacttatccgcgaagcagcacgctacactggtgaacaagaaacacttccgcttagcccgcagtggatcctccgccagtgtcaagaggtcgcctccctgtgtgatggcgacaccttctccggcgagcagctaaacttaatgctacagcagcgtgaatggcgcgaaggtttcctcgctgaacgcatgcaggatgagatccttcaggagcaaatcctgattgaaaccgaaggcgaacgcatcgggcaaattaacgccctttcggtcattgaatttccgggtcatccacgcgcttttggcgaaccttctcgcattagctgcgttgtgcatattggcgatggtgaattcaccgacatcgaacgcaaagcggagcttggcggcaatatccatgcgaaagggatgatgatcatgcaagcgttcctgatgtcggaactacagcttgagcaacagatccccttctcagcatcgctgacatttgagcagtcatacagtgaagtggatggcgatagtgcctcgatggctgaactctgcgctctgatcagcgccctcgccgatgtgccggtgaatcagagtatcgctatcacaggttcagtcgatcagttcggtcgcgcccagccagtcggtggtttaaatgagaaaatcgaaggcttctttgctatttgccagcaacgtgagttaacggggaaacaaggtgtcattatccccactgctaacgttcgccatttaagtcttcacagtgaactggtgaaagcggtagaagaaggcaaattcaccatctgggcagtagacgatgtgactgacgcactgccgttattattaaatctggtgtgggatggcgaaggccagacgacgctgatgcaaaccatccaggaacgtatcgcacaagcatcgcaacaggaaggacgtcaccgttttccatggccattacgttggctgaactggtttattccgaactga

SEQ ID NO: 20568 - DNA, 630 bp, Escherichia coli
atgaaaagcctctcctataagcggatctataaatcacaagaatacctggcaacgttgggcacaattgaataccgatcattgtttggtagttacagcctgaccgttgacgacacggtgtttgcgatggtttctgatggtgagttgtatcttcgggcttgtgagcaaagtgcacagtactgtgtaaaacatccgcctgtctggctgacatataaaaagtgtggccgatccgttaccctcaattactatcgagttgatgaaagtctatggcgaaatcaactgaagctggtgcgtctgtcgaaatattctctcgatgcagcgctgaaagagaaaagcacgcgcaatacccgggaaagactgaaagatttgcccaatatgtcttttcatctggaagcgattctcggggaggtggggattaaggatgtacgggcgttacgtatacttggggcaaaaatgtgttggttgcgactgcggcagcaaaactgtctggtgacagaaaagattctgtttatgcttgaaggggccattatcggcattcatgaagctgcgctcccagtggcacgccgccaggagcttgcagaatgggctgactctcttacgccgaaacaggagtttcctgcggaacttgagtaa

SEQ ID NO: 20569 - DNA, 327 bp, Escherichia coli
atgaaaaaactgattctcatcgccatgatggcatcggggctggtggcttgtgcgcaatcaaccgcgccacaggaagacagtcgtctgaaagaggcttacagcgcctgtatcaacaccgcgcaaggttcgccggaaaaaattgaagcctgccagagcgtgttaaacgtgctgaagaaagagaaacaacatcagcagtttgccgagcaggaaagtgtccgcgtactggattatcagcagtgcattcaggcaacgcaaaccggaaatgatcaggcggtgaaagccgattgtgataaggtctggcaggaaattcgcagtaataacaaataa

SEQ ID NO: 20570 - DNA, 546 bp, Escherichia coli
atgaaaacgattgaagttgatgatgaactctacagctatattgccagccacactaagcatatcggcgagagcgcatccgacattttacggcgtatgttgaaatttaccgccgcatcacagcctgctgctccggtgacgaaagaggttcgcgttgcgtcacctgctatcgtcgaagagaagccggtcaaaacgattaaagacaaggttcgcgcaatgcgtgaacttctgctttcggacgaatacgcagagcaaaagcgagcggtcaatcgctttatgctgctgttgtctacactatattctcttgacgcccaggcgtttgccgaagcaacggaatcgttgcacggtcgtacacgcgtttactttgcggcagatgaacaaacgctgctgaaaaatggtaatcagaccaagccgaaacatgtgcctggtacgccgtattgggtgatcaccaacaccaacaccggccgtaaatgcagcatgatcgaacacatcatgcagtcgatgcaattcccggcggaattgattgagaaggtttgcggaactatctaa

SEQ ID NO: 20571 - DNA, 2199 bp, Escherichia coli
atgtcagaattaaaaattgccgttagccgttcttgcccggattgtttttccactcatcgtgaatgcgtgaatattgacaaaagtaattatattgacgttgccgccattattttatcagtcaatgatgttgaacatggaaaactcgatgaaatagacgctactggctatggcattcctgtttttattgcaacggaaaatgaagaacgtgtaccagcagaatatctgccacgtatttctggtgtcttcgagcattgcgaatcacggaaagagttttatggacgtcagttagaaaccgctgccagccattatgaaacgcaactgcgcccgcccttcttccgcgcactggtcgattatgtcaatcagggcaatagcgcttttgactgcccgggtcatcagggaggtgagtttttccgtcgccatccggcaggcaatcagttcgtggaatattttggcgaaatgctcttccgctccgacttgtgtaatgccgacgttgcaatgggcgatctactgattcatgaaggtgcgccatgcattgcacagcaacatgcggctaaagtgtttaatgccgataaaacgtactttgttttaaacggcacatcctcctccaacaaagtggttttaaacgccctgctgacaccgggtgatctggtgctgtttgaccgtaataaccataagtctaaccaccacggagcgttgctacaggctggtgcaacaccggtttatctggaaacagcacgtaacccgtatggttttatcggtggcattgatgcgcactgcttcgaagaaagttatctgcgtgaactgattacagaagttgcaccgcaacgggcaaaagaggcgcgtccgttccgcctcgctgtgattcagttaggcacctacgacggtactatttataacgcccgccaggtggtggataaaatcggccatctgtgtgactacatcctgtttgactccgcatgggtcggctatgaacagtttattccgatgatggcggactgttcgccgctgctactggagcttaatgagaacgatccgggtattctggttacgcaatctgtgcataaacaacaggctggtttttctcagacttcacaaattcataaaaaagacagccatatcaaagggcaacagcgttatgtaccgcacaaacgcatgaacaacgcctttatgatgcacgcctccaccagcccgttctatccgctgtttgccgcactggatatcaacgccaaaatgcatgaaggtgtcagcggtcgtaatatgtggatggattgtgtggttaacggtattaatgcccgcaaattgatcctcgataactgccagcacattcgcccgttcgttcctgaactggtggatggtaaaccctggcagtcgtatgaaacagcgcaaattgcggttgatctgcgcttctttaaatttgtacccggtgagcactggcattcttttgaaggctacgcagagaaccaatactttgtcgatccgtgcaaactgttgctgacaactccaggtattgatgcacgtaacggcgaatatgaagcgttcggtgtacccgcaacgattcttgctaacttcctgcgcgaaaatggcgtagtgccggaaaaatgcgatcttaactccatcctcttcctgctgactccggcagaagatatggccaaactgcagcaacttgttgccctgctggtacgcttcgaaaaactactggaagctgatgcgcctctggcggaagtactgccttccatctacaaacagcatgaagagcgctacgccggttataccctgcgtcagttgtgccaggaaatgcatgatttgtatgcccgtcacaacgtgaaacaactgcaaaaagagatgttccgtaaggaacacttccctcgcgtcagcatgaatccgcaagaagccaactacgcctacttacgcggtgaagtggagctggttcgtctgccggatgcagaaggccgtatcgctgccgaaggtgcgcttccttatcctccgggtgtgctgtgtgttgttcctggtgaaatctggggtggtgctgttctgcgttacttcagcgctctggaagaaggcatcaacctgctgccaggttttgcaccggagctgcagggtgtctatatcgaagaacatgatggtcgtaagcaagtttggtgctatgtcatcaagcctcgtgatgcgcaaagcgccctgttgaaaggggaaaaattatga

SEQ ID NO: 20572 - DNA, 837 bp, Escherichia coli
gtggacgtaagacagagcatccacagcgcgcacgcaaaaacgctggatacccaggggctgcgcaatgaatttttggttgaaaaggtatttgtcgccgatgagtacaccatggtttacagccacattgaccgtattattgttggcggcattatgccggtaactaaaacggtttccgttggcggggaagttggtaaacaactcggcgtaagctatttccttgaacgtcgcgagttaggtgttatcaatattggcggtgccggtacgattactgtcgatggtcaatgctatgaaatcggtcaccgcgacgccctgtatgttggtaaaggtgcaaaagaagttgtctttgccagtattgataccgccactccggcgaagttttattacaattgcgcacccgcgcatacgacgtatcccaccaaaaaagtcacaccggacgaagtatctccagtcacgttaggcgataacctcaccagtaaccgtcgcacgattaacaaatattttgtcccggatgtgctggaaacctgccaattgagtatggggctgacggagctggctccaggtaacttgtggaacaccatgccgtgtcacacccacgagcgccggatggaagtttatttctatttcaatatggatgatgacgcctgcgttttccacatgatggggcaaccgcaagaaacgcgtcacattgtgatgcataacgagcaggcggtgatctccccgagctggtcgatccattccggcgtcggaaccaaagcttatacctttatctggggcatggtcggtgaaaaccaggtttttgatgatatggaccatgtggccgttaaagatttgcgctag

SEQ ID NO: 20573 - DNA, 351 bp, Escherichia coli; identical to SEQ ID NO: 6245

SEQ ID NO: 20574 - DNA, 216 bp, Escherichia coli
atgcttagacaacatcaggatagcctcttaccgcgctttgcgcaaggagaagaaggccatgaaactaccgggaaacgcccttatctggtgcgtattaatcgtgtgctgcacgttgttgatattcacactcctgacccggaatcgtctgtgcgaagtccggctgaaggacggatacagggaagttacggcaacaatggcttacgaatccggcggtaa

SEQ ID NO: 20575 - DNA, 426 bp, Escherichia coli
atgagaaaaaataatacagcaataatattaggcggcctgtttttttcctgcagcgtgatggccggagtcggtacgctggcccccaccgtggtgccaatggtgaacggtggtcaggccagtattgccatcagcaataccagcccgaatctgtttaccgttcccggtgaccggattatcgccgtgaacagtctggatggtgccctgaccaataatgagcagaccgcctccggcggtgtggtggtggccaccgtcaacaaaaagccctttacgttcattctggaaacagaacgtggtctgaatctttccattcaggccgttccccgtgaaggcgcgggcgtaccattcagctggtcagtgacctgcgcggaaccggagaagaagccggtgcgtgggaaacgtccacgccttacgaatccctgcttgtga

SEQ ID NO: 20576 - DNA, 138 bp, Escherichia coli
atgaacatgcgtaatattaatgttattacagccctctctgtgccgggtaaaaccgtgtcagatgattttattcatgctgttctcagtaactgcgccacaagaatcgtacttcctgcaccggagaaattcggttcttag

SEQ ID NO: 20577 - DNA, 1416 bp, Escherichia coli
gtgaaacaaagcactattgcactggcactcttaccgttactgtttacccctgtgacaaaagcccggacaccagaaatgcctgttctggaaaaccgggcagctcagggcgatattactgcacccggcggtgctcgccgcttaacgggtgatcagaccgctgctctgcgtgattctcttagcgataaacctgcaaaaaatattattttgctgattggcgatgggatgggggactcggaaattactgccgcacgcaattatgccgaaggtgcgggcggcttttttaaaggtatcgatgccttaccgcttaccgggcaatacactcactatgcgctgaataaaaaaaccggcaaaccggactacgtcaccgactcggctgcatcagcaaccgcctggtcaactggtgtcaaaacctataacggcgcgctgggcgtcgatattcacgaaaaagatcacccaacgattctggaaatggcaaaagccgcaggtctggcgaccggtaacgtttctaccgcagagttgcaggatgccacgcccgctgcgctggtggcgcatgtgacctcgcgcaaatgctacggtccaagtgcgaccagtgaaaaatgtccgggtaacgctctggaaaaaggcggaaaaggatcgattaccgaacagctgcttaacgcccgtgccgatgttacgcttggcggcggtgcaaaaacctttgctgaaacggcaaccgccggtgaatggcagggaaaaacgctgcgtgaacaggcacaggcgcgtggttatcagttggtgagcgatgctgcctcactgaattcggtgacggaagcgaatcagcaaaaacccctattaggactgtttgctgacggcaatatgccagtgcgctggcaaggaccgaaagcaacgtaccacggtaatatagataagcccgcagtcacctgtacgcctaatccgcaacgtaatgacagtgtaccgaccctggcgcagatgaccgacaaagccattgaattgttgagtaaaaatgagaaaggctttttcctgcaagttgaaggtgcgtcaatcgataaacaggatcacgctgcgaatccttgtgggcaaattggcgagacggtcgatctcgatgaagccgtacaacgggcgctggaattcgctaaaaaggatggtaacacgttggtcatagtcaccgctgatcacgcccatgccagccagatagttgcgccagataccaaagctccgggcctcacccaggcgctaaataccaaagatggcgcagtgatggtgatgagttacgggaactccgaagaggattcacaagaacataccggcagtcagttgcgtattgcggcgtatggcccgcatgccgccaatgttgttggactgaccgaccagaccgatctcttctacaccatgaaagccgccctggggctgaaataa

SEQ ID NO: 20578 - DNA, 1599 bp, Escherichia coli
atgcaaaaagcacaacggatcattaaaacctatcgccgtaatcgaatgattgtttgtacgatttgcgcactcgttacgctcgcttcgaccctgagcgtgcgatttatttcacagcgtaacttaaatcaacaacgggtagtacaattcgccaatcacgctgtagaggaattagataaagtactgcttcccctacaggcaggtagcgaagtcttgcttccgctgattggtctgccctgctctgtcgcccatttgccattacgtaaacaggcggcaaaactccaaactgtgcgatccattggcctggtgcaagacggcacactttattgctccagcatttttggttatcgcaatgtgcccgtcgtggacattctggctgaacttcctgcaccgcaaccacttttacgactgacgaccgaccgtgccctgataaaaggcagtccggttttgattcaatggacgcctgcagcgggcagtagcaatgctggggtcatggagatgattaacatcgacttactgacggcaatgctccttgaaccacaactgccgcaaatcagtagcgccagcctgacggtggacagtcggcatttgctctatggtaatgggctggtagattcccttccgcaacctgaaaacaatgaaaactatcaggtttcttcgcaacgctttccttttaccattaacgttaatggcccgggggctacggcgctggcatggcactatcttccaacacaattaccgctggcggtgctgctaagtttactggtgggctacatcgcctggctggcgaccgcttaccgaatgagcttttcccgcgagatcaatctgggcctggcgcaacatgagttcgaattgttctgtcagcctttgcttaatgcgcgcagccagcaatgtattggtgtagagattttgctgcgctggaacaatccgcgtcagggctggatttcaccggatgtgtttattcctatcgcggaagaacatcatttaattgtgccactgacccgctatgtgatggcagaaaccattcgtcagcgccatgttttcccaatgagtagtcagtttcatgttggcattaacgtcgcacccagccattttcgccgtggtgtgctgataaaagatctcaatcagtactggtttagcgctcacccgattcagcaactgatcctcgaaatcaccgaacgcgatgccttactggatgttgattaccggattgcccgcgagctgcatcgtaaaaacgtcaaactggcgattgatgacttcggcaccggcaacagttcattttcctggcttgaaacattacgtcctgacgtgctgaaaattgataagtcatttaccgcagctataggttctgacgcggttaactcgacggtgaccgatatcatcatcgcactggggcaaagactgaatattgaactggtggcggagggcgtagaaacgcaagaacaggcgaagtatttgcgcagtcatggcgtgcatattttgcaagggtatttgtacgcacagccgatgccgctacgtgattttcccaaatggctggcgggcagccaaccgccgcccgcccggcataatggacatatcacgcccgttatgccgttacgttaa

SEQ ID NO: 20579 - DNA, 270 bp, Escherichia coli
atgtcagcactgaagaagcagcgcatcgatctgagattaaatgaagacgacaaacacatgatcgaagaagctgcagcaatgactaaccagtccatttcgcagttcatggtcagtaccgcctcagcacgtgctgctgaagttattgatcagcaccgtcgcctgctcctcaatgaggagtcctggaatctggttatggatgcaatcactaatccgccagcaccaaatgaccggctgaaacgcgccactaaccgtctccgggaactggagtaa

SEQ ID NO: 20580 - DNA, 531 bp, Escherichia coli
atggacggtttaaggattgagattttttcagaggaagttgaatatcaattaagcaacttcgattgtggagaagagtatctgaatacttttctcaccgatcatctgcaacgtcagcacagcagtaagattttacggggttatctgctcgtgacgagagaggatagaccacgtgtcatggggtactacaccctgtcaggcagttgctttgagaaaatacttctccccagcaaaacacaacaaaagcgtgtgccctacaaaaatgtgccgagcgtgactttgggccgtctggcaattgataaaagcattcatcaccagggatatggagaaacacttgttacccatgcgatgaaagtcgtgtatcaggcctcgcaggctgtgggtatacacggaatgttcgtggaggcgctgaacgataacgccaaaaaattctaccttcgactgggttttatacagttaaaggaagaaaactgtgattcgctcttctacccgacaaaatctattgaagtattgttcgaagtaaatgacgaataa

SEQ ID NO: 20581 - DNA, 276 bp, Escherichia coli
gtgtttagtcaccgcattgtggtctcggccattacttactctgaaatgcgcttcggtgcctccggtccgaaggcctccccgcgtcacgtgcaactggttgataaattctgcccgtgcctcgatgccatcctgtcttgggaccgcgccgcggtggacggcaccacggatattaaagtggcactgcgccaggccgggacgccgatcggccagaacgatacggcgattgccgggcctgaagctggaagactgggtaaattaacatcgcccacactctga

SEQ ID NO: 20582 - DNA, 231 bp, Escherichia coli
atgagaattgtatccatttttaaaaacggcaataaccgcgccatccatctgccccgcgatttggattttgagcgggtgagagagctggagatcgtccgcgaaggagacagcatcatcctgcgtcccgtccagccgaactggggctcattcgcgcagctcgaaaaagccgatccggattttatggcggagcgcgagaatgttgtcagcgacgaaggtcgatttgacctgtga

SEQ ID NO: 20583 - DNA, 2622 bp, Escherichia coli
atgtatcccgtatttgagaatggctcatgctgggtcaaggtcgattttcaccttcatacccgtgcagacaaagaatttcgctatgccggcgaatccgacagatatattcgcgattacgtcaatgccctcaaagcggcggaagtgagcgtgggcgtgatcaccaatcacaataaattcgatcccggcgagtttaaagtattgcggaaagccgcgcgccgtgaaggtatggacctgcttcccggcgtggagctgtccgttaatgatggccaggccggcgtgcacacgctcgtggtgtttgctgatgagtggtttatcaatccacagcagacgaaccatattgaaagtttccttacggccacgtttgcgggcgttgataattttgagaatgaaaatgcccgttcaacagaaaatatcacacagaccatccagcgccttgaccggtatgaaagggattacttcattgtatttgctcacgtggaggcccaaaacgggttatggggcgggctgagcccaggccggatcggggagctttttgataatgaccttgtccgccggcgcgtgacgggatttcagaaggtgatgacccacgacctgcgggtcaaaattaaggacgtgctcggtgagcgctatcctgccgaagtccagggatgcgatgccaaaacgctggatcacattggtgccagaaaagtcgccagctatctgaagctgggggattacagttttgaagccgtccgctttgcgctgcaggattttccgcatcgcgtcagcggagagaaaccggccctgacccacagccatatccgccagatagcattcgagggcgccggttcgctcggtggaaccgtggtgaaattatctccagaactgaacaccctgatagggatccgcggcagcggcaaatcctccatccttgaagggatccgatatgccctggacattccgtttggcgagaaggcctctgaccgcgactacaaagaaaatctggtcagtaatttactgaaaagcggagggaaaattaccgttgatgccgtgtgccgtcacggacgggcctatcagatagttcgcattttcggtcaggagccgcaggtcatttttgacggccaggtccggcacggggtggcgctacgggaaacggttctgcataagccagtgtattttggccagaaagatctgtccaataccggtgccggatttgaacacgatctgatagaaaaactggtcggtgagcgtctggctcccgtacgagagaaaatccggcagcagaatgcggtcgtgctcgacaggttagtccagcttcgccgtctgaaaacatcgggagaagcgctctccgaatggcaggcgaaagagaaggatgcgcagttccgcctgcgcttctatgcccagcatggcatggaagaaaaactggagcgtcagaccaccttcgggcgggatgagcgctatctcagcagcagcacttccctggcaagccgagcgctggacagtctgcaggacggaatcagggagactctggacgggctgaaacaggagcagaaacatgagtcagcacataaccaggcggatattgatgattatcgtgagggatatgaccgctttacgactcatctcagctccctgaacaccattgtcgacggtgcccgccagatcctagatgagctcaacgttaagcagcaggccttcctgcagaaaaagcaggcgctgacggaggaatttgccgaaatagaacgtggccttgcagaagagctgcggctagccggggtggaaaaagcagatcccgccgacttcctgaagctgaaagccgggctggaagttgcggaacaaaaaatagccgagttgacccgggctgaaagcagccagacgttactggagaagagtctgacagaagcgctaaaccgattgtctgaactgtgggtggaagagtatcaggaaattgaagccgtgctggctgccatcaaccaggcagattcgcccctgaagatcgtgccgtcctttgcgagcgataaaaaagccatgctggccgttctgaaagaagcctgtactggcagccggttgagggaaagtacctaccagaccgtggttgacagcttcagtaactttggcgagctctggctgaacagggataaactccccgggattatcaatagctctgcggagacgttcagcatgtatctggagcagcagatagaatcgcttattgtctggcagatcccgaatacctacatcattgaattccggggcaaaccactggaacaacactcattgggtcaacgcgcatccgcattaatgctgtttgtcctgaatcagcaggacaatgatgtggtgatcatcgatcaacccgaagacgacctggacaatcagacgatttatgacgacgtgattaaaatcatcagggcgatgaaaccccgcacgcaatttatctttgccactcacaatgccaatattccggtgctcggagatgcagaaaatgtctgtgcctgtgaatattcagacggaaagatccagactgtcggcggaggcgtggatgcccctcttgtacaacagcacattatttcggtaatggaaggagggcgggaagccttcgagcgacgcagggaagtttacggctcatggctcagtaaaacctga

SEQ ID NO: 20584 - DNA, 492 bp, Escherichia coli
gtgggaaactattcagactttgagactgattttatcgaaagaacactggccctaatcgatcaatataacaatatgattgaggggaagcccttccctgagcagtacaactatacgcttactctgaactgtcttttgggcctaatcgtgatgccgagagagcgcgctgtttcttacctcccgtcggatcgtctaacgccagagcttaaagctgaaattgggttaaacgagtcgcagttaccgggtgaggaaatgaacttaagagaactgattcataaaatgcgaaattctgtggcgcatttctgtgttcaggttgaatctatcagcgatgcacgcctagttgatcaaatcatcttcaaagagacgcatggtgctggccgggcttatgcaattttcagtgccccggagcttctcccatttctaaaatattacgcggctttgttgatcgccaatatgagacgccatcggggtgtccccacgactgacgttgtgtaa

SEQ ID NO: 20585 - DNA, 759 bp, Escherichia coli
atgtttattctcgattgttcaacacgatctcaggcgctgctttcactttcatccggttttggttgtagtgtaatggagctaaaaaaggttttgttatctctcgatcttgagcagatttacgagacggatcattccattatgatcgattcacgacagtatctgagagagtacgtatgtagggaactgggtattccgggtgagttcaccaccgcatactggtttcatggtacccgcacttctgctgataatacttttgaaaatggtttacttgcactgaaccaaactgagtcactggtgatggacatgctggtaaatctggctccagacgctgaggtcaaagagaaattacaggcctggaattttcatgcaggcgtacctgatcacctgtttcggacccgaaccagggataaaatgcactggggaccatatggtcaccttgtgcgggaggtccatcttcatgcacgtaaactctggcagcacgactatgtacggctgccggagctggtagaggatgtctgcaatgcttacaaaaaaaaatatgggcaggatcttacaggacattatcttgaggtactgaaaccttgcatagtctgtttcagggcggatattgattatgaaaagggtgcgcttgaagctgcgcttagttacgcatacacgtctgttagagaattgccaccggatagtggcgctgtgttcggtattgatcgacatggtaaatccgtttctgtcgatgaaattgtgaatgttgaattcatatga

SEQ ID NO: 20586 - DNA, 129 bp, Escherichia coli
atgagcttgatgactgaagcccgtagggttatagatgttatcaatacttctttttttagtggcaaaattttctacaggaaaatgaagtttgtgacagataatctaaagggcctcatttatgtcatttaa

SEQ ID NO: 20587 - DNA, 1593 bp, Escherichia coli
atgacatcgattatagttacttcgttacttaaaaccggtccttgccttagctctgtacttgtagaggaaatgctgaaaacctcgggcgttaaccgtgataccgcgcgcaaacagatttcccgggctgcttctgcagggcaaatccactgtgttgacaagcttttccccaagcgcgaacgatttatttatctgaaacaagagtatggtaccgggcgcttctggtccagtctcaatgcggcccttcttgataccgggtcggcctacggtctcgccctgagttgcctccgggcacgcggggggatcctgccggtcagaaatttttctgcagcctgcggttcgccggtagcaatgaaaaacagattatcctggaagtcagttctggacggtctgcttcagtacaaaatggtcagggtcgttacgttaccgggtctgggggaatgtgttgcgctgacagaaaaaaatgataacggttatctgcgcgcgctccatcccctgaaagccagactactcaccgagtcagttctgatgaaatccctgagtcagtgggtccgtaacaatggcatcatcagttacgacacgctgcgtacgcgagaggaactcaattcggatcagactccctgcgtggcaaattttgattttgacgtcactgctgcatcctatcttaatcctcttctgcagttctcccggtcaggtgaaatccggcctggtttctttgtctgcgacatgctcttgggctgtaagctcagtctggtgcatctccagccttttattacgaaatgtcgctcgataaacagcctccggaacagccccagatgcctgtttatgttcatcgctgatgaatacagtgaagaggcatttctggaaatgaagcgtgccgggataatacccgccacgccggaaaatctcttcgggaaagactttgctgatgcactctttcagctacgggatcttgtcggctccataacgctcagcttaaaagataatatagccgcaatagatgacatcatgtccaagctggcgaatatagccggcgcgactaatcagcttcagggcgatttatttgaatatattgtcgctgagaccgtgcgtatagacagtaaggacgttgaggttggaaaaatatgtaagtcgcttaagggggagacggcggaatgtgatgtactcagtttgaatgggcatgcgaaaattaccttcattgagtgcaagggttataaaccctattcgacggtgagacatgaagatgtaaaaaaatggattggtaagcaggttccggtattcttcagctatgccaaaagggaataccccaacgctgaaattaatgttcagttatggactacaggaaagctctgcgatgattccagagagtcgcttcgtaaattccaagaaaataacttaactaatcagcgttataatataaccgtcatggagccgcatgaagtttgtgccagaataaaggcgaccaggaatgacgcgcttatccgggtttttgataagcattttctcagttatccagaaaaaatcgttcgccgtaaacatgtgcccgacccggtcaggcttgcaggtcatgatgaagcaatagaatttgatttctga

SEQ ID NO: 20588 - DNA, 177 bp, Escherichia coli
atggattacacaaaaaatcagcatgtgctttcacagtgggtgttacgcaactttcgcagcgatgacacagccctgtatgcaaaggaaaagcagcgggtatggtgtcataccgtgtacatgacgcccgaaaaagaaaatgttctccacacgggtgatgctgccaacttactgatttag

SEQ ID NO: 20589 - DNA, 1071 bp, Escherichia coli; identical to SEQ ID NO: 7594

SEQ ID NO: 20590 - DNA, 2508 bp, Escherichia coli
atgaacgtacagttcttcgaccacgcacaccacaagctcaaaattcgcggcctgaaaagcccggtggacgtgctgacttttacaggccacgaacagctcagctcacccttccgctacgacattgagtttaccagtaccgataaagccatcgagccggagtcggtactgatgcaggacggcgcattcagcctgagcgccccgccggtacaggggatgccggtgcaggtccccctgcgcaccctgcacggcgtcattaccggctttaaacacctctcctcgtcacaggacgaagcccgttacgaagtgcgccttgaaccccgtatggcgctgcttacccgcagccgccagaacgccatctaccagaaccagacggtgccgcaaatcgtcgaaaaaatcctgcgcgagcggcaccagatgcgcggtcaggacttcgtgtttaacctcaaaagcgaatacccgtcccgcgaacaggtgatgcagtacggtgaggacgacctgacgtttgtctcacgcctgctgtcggaagtgggtatctggttccgctttgccaccgacgcccggctgaaaatcgaagttgtcgagttttatgacgaccagagcggctacgagcgcgggctgacactgccgcttcgccatccttcagggctgtttgatggtgaaacggaagcggtatgggggctgaataccgcgtacagcgtggtggaaaaaagcgtcaccactcgggactacaactaccgcaccgccacagcagagatgatgacagagcagcatgacgccaccgggggcgataacaccacctacggcgaagcctaccactatgccgacaacttcctgcaaaaaggcgataaagaggcagcggaaagcggcgcgttttatgcccgtatccgccacgaacgctacctgaatgaacaggccattctcaaaggccagagcaccagttcactgctgatgccggggctggaaatcagggttcagggcgacgacgcgccagcagtgttccgcaagggcgtactgattaccggcgtgacggccagcgcggcgcgtgaccgcagctatgagctgacgtttaccgccatcccgtactcagagcgctacggctaccgcccggcgcttatcccccgcccggtaatggccggcacactcccggcgcgggtcaccagcacggtgaaaaacgatatctatgcccatatcgacaaggacgggcgctaccgggtcaacctcgactttgaccgcgatacgtggaaaccgggttatgaaagcctgtgggtgcgccagtcgcgcccgtatgcaggtgacacgtatggcctgcatctgccgctgctggcgggaacggaagtcagcatcgcctttgaggaaggcaacccggaccgaccttatatcgccggggtaaaacacgactcggcacacaccgaccatgtgaccattcagaactacaagcgtaacgtgctgcgcaccccggcgaacaacaaaatccgcctcgacgatgagcgcggcaaagagcatatcaaggtcagtaccgagtacggcggcaagagccagctaaacctcggccatctggtggatgccggaaaacagcagcgcggggaaggttttgaactgcgtaccgatctgtggggtgcagtacgggcaaagaaaggcatctttatcagcgccgacgcgcaggataaggcgcagggtcaggtacgcgaaatggccgacattatcagcgaactgaacagcctgagcgataaaatccagaaactgtctgacgatgcggccacggcgaacgccgatccggcggatatggccgcgcaggtggcgctgataaccagccggataaatgacctgaccgcctcggtgattttgatgcacgcgccgaaaggtgtggcggtcgccagcggcgagcacctgcaactggccgcagtgaaaaacctccagataaatgcgggaaacaacgccgatatcggcgtggtgaagaatatgtttatcggcgtagggcgggcgctgagcgtgtttgtgcgcaaggcgggtatcaaactgattgccaataaaggcgcagtatcggtacaggcgcagcacgatctgatggagttactggcgaagaagtcgatagagatcaccagtacggaagatgagattaaaatcaccgcgaagaagaaaatcacccttaacggcggtggcagctacatccggctggatgcctgtgggatagaggccggtacgccgggagaatataacgttaaggcgggatattacgggcgtaagccgaaggcgaagctgacgccggagctgatggcatttccggtgattaagtctgaggattttaatcagagctttattttgctggatgaaaatactgggcaaccacttattaattggccctatgaactagaactggaaagtgggctaaaaatgagtgggattactgatgaaaatggaaatacagaactaatatcctctgataaggaggaggtcgttaatattagtgtgtttgaacccgatgagtttttagacgatgaaattaattaa

SEQ ID NO: 20591 - DNA, 1215 bp, Escherichia coli
atgagcgagatgagttatctggaaaaattgctggatggggttgaagttgagtggttgccattgggggaaataaccaaatatgaacagccaacaaagtatttggtaaaagcaaaagattatcacgacacatataccataccggttcttactgccggaaaaacatttattcttggatacacaaatgagactcatggtatttatcaggcatcaaaggcacctgtaataatttttgatgatttcaccaccgctaataaatgggtggattttgactttaaggcaaaatcatcggccatgaaaatggttacatcatgtgatgataataaaaccttactgaaatatgtttactattggctcaatacattaccaagtgaattcgcagagggagaccataaacgccaatggattagtaattattctcaaaaaaaaatcccaatcccctgcccggataatccggaaaaatcccttgccatccagtctgaaatcgttcggattctggataaatttactgcacttaccgctgagcttaccgctgagcttaacatgcgtaaaaaacagtacaactactatcgcgaccagttgttgagttttaaagagggtgaggttgagtggaagactttgggagagatcggaaaatggtatgggggagggacaccatcaaaaaataaaattgaattttgggaaaatggaagcattccatggatttccccgaaagatatgggccgaacacttgtagactcttcggaagactatataactgaggaggctgttctacaatcgtcaacaaaactgattccagcaaactcgattgcaatcgttgttcgctcaagcatattggataaagtattaccaagtgcattaataaaagtacctgctacgctcaatcaagatatgaaagcagtcattcctcatgaaaacatcttggttaaatatatttatcatatgattgggtctagggggagtgatattctgcgagcagcgaaaaagacaggagggtccgtagcttctattgacagtaaaaaattattttcatttaaaattccggttcctaacatcaatgaacaacaacgaattgtcgaaatactcgacaaattcgacacactgactaactccatcaccgaaggtcttccgcgtgaaatcgagttgcgccagaaacaatacgagtactatcgtgatttactgttcagtttcccgaaacctgaaactgtcagtaattaa

SEQ ID NO: 20592 - DNA, 1263 bp, Escherichia coli
atgactcatcagacacacaccattgctgaatccaataactttatcgttcttgataagtacatcaaagctgagccaacaggcgacagctaccagagcgaatcggacctggaacgcgaactgatacaggacctacggaatcagggctatgaatttatatccgtaaaatcacagtcggcgatgctggccaatgttcgggaacagcttcagaacctcaatggtgtggtgtttaatgacagcgagtggcggcgtttcacggagcagtatctggataacccgagcgatggcattctggataagacccgtaaaatccatatcgactatatttgcgactttatttttgatgacgagcgtcttgagaacatctatttgatagataaaaagaatctcatgcgcaataaggtgcagattatccagcagtttgaacaggcgggttctcacgctaaccgttatgacgtaactatcctggttaatggcttaccgctggtacaaatcgaactgaaaaaacgcggcgtggcgattcgtgaggctttcaaccagatacatcgttacagtaaagagagttttaacagcgaaaattccctgtttaagtatctgcagctgttcgtcatttccaacggcactgatacccgttattttgccaacacgacaaagcgcgataaaaacagttttgacttcaccatgaactgggcgaaatcagacaatacgctgattaaagacctcaaagactttaccgccacctgtttccagaaacatactctgcttaatgttctggtgaactacagcgtttttgacagcagtcagacactactggtaatgcgaccgtaccagattgccgccaccgagcgcattctgtggaaaattaagagttcctttacagcgaagaactggtcaaaaccggaaagcggtgggtatatctggcacactaccggttctggtaaaaccctcaccagctttaaagccgcgcgtctggcaacagagctggactttattgataaagtcttctttgtggtcgacaggaaagacctcgattaccagaccatgaaggaatatcagcgtttttcgccagacagcgtcaacggctcggaaaataccgcaggccttaaacgaaatctggataaggacgataacaaaattatcgtcactactattcagaaactcaataacctgatgaaagcagaaagcgatctgcctgtatataatcagcaagtggtgtttatatttgatgaatgccaccgcagccagtttggagaagcgcagaggtga

SEQ ID NO: 20593 - DNA, 1101 bp, Escherichia coli; identical to SEQ ID NO: 8289

SEQ ID NO: 20594 - DNA, 405 bp, Escherichia coli
gtggctgattttacttacgtcagcacatggcagggcttcgtctatgtggcgttcatcattgatgtgtttgccggatacatcgtggggtggtgggtctcatcgtctatggaaacgacattcgtgctggatgcgctggagcaggcgttgtgggcccgccgtccgtccggcaccatccatcacagcgataaaggctctcagtatgtgtcactggcctatatggagcgattaaaagaagcaaaactgctggcatcaacagggagtacaggcgactcgtatgacaacgcgatggcggagagcatcaatggtctttacaaagcggaggtaatacaccgtaagagctggaaaaaccgtgcagaagtggaactggccacactcacgtgggtggactggtataacaatcgatga

SEQ ID NO: 20595 - DNA, 201 bp, Escherichia coli; identical to SEQ ID NO: 8170

SEQ ID NO: 20596 - DNA, 189 bp, Escherichia coli
atgaaaacgttattaccaaacgttaatacgtctgaaggttgttttgaaattggtgtcactatcagtaatcctgtatttactgaagatgccattaacaaaagaaaacacgaacgggagttattaaataaagtatgcattgtttcaatgctggcccgtttacgtctgatgccaaaaggatgtgcacaatga

SEQ ID NO: 20597 - DNA, 585 bp, Escherichia coli; identical to SEQ ID NO: 14852

SEQ ID NO: 20598 - DNA, 585 bp, Escherichia coli
atgtgcaaatgtaataccgtcacccgcgacgatattccgtttgccatctggtcagggcttcgccccgacaccccgtatcagtgcgtacgtgctcaatgtggtttccggttctcttccgcttcctcgcccactcgctcactaacgttcggtcgctggggctgcggcgagcggtgccacctctcgcatgttgtcggtgattccgctgttgttctttcggggataagtcgtcagatagcccttcaaacgcgctcagaagctctcagacgcacgaaacggggtttaaatgcccgtcagggcatggaaggcgcgaaaaacgcttacagagcgtttcaggaggtcaggcgcgccgatacccctagccaggggctttcaggtcgccaggaaccgcgccagccccctgcaaagcccatttgcacggtacaggcagtcactcggttggtaggtggtcgtagaccgtcggtgttacagcgatgggggtctggggttccccccagacggtttccggttgcgctcaaggcgctgccggaaccgtggcggctcggtcgttctggagatcggggagcaaaaacacgcaagggattttga

SEQ ID NO: 20599 - DNA, 585 bp, Escherichia coli; identical to SEQ ID NO: 14851

SEQ ID NO: 20600 - DNA, 1077 bp, Escherichia coli
ttgttgctgttccagcttgcgtgctttggcacgggcaatagcagcttcgacggcggctttgcgtggatcaacctgttcttctggttccgcattagcctgttgttgctgttccagcttgcgtgctttggcacgggcaatagcagcttcgacggcggctttgcgtggatcaacctgttcttctggttccgcattggcctgttgctgttccagcttgcgcgctttggcgcgtgcaatagccgcttcgacggcagctttgcgcggatcgacctgttgttctggttcggcattagcctgttgctgttccagcttgcgtgctttggcacgggcaatagcggcttcgacggcggctttgcgcggatcaacctgttgttctggctccgcattggcctgttgctgctccagcttgcgtgctttggcgcgggcaatagccgcttcaacggcagttttacgtggatcagcaacggttgcagcgtcgttagtttgctgcagttctgcctgtttcgctctggcttgcgctttacgggcttcccgtgctgcaataattgcactgttatccgggcgttcgcccgctttaatcacaataggctgtgtagcctgggcctgtttctctttcacccgcgccagagcggcagcaatcgcatctttatctttggctgcaggttgaacggctgcgctcttatgtcgttcaaggcgagccgttttttcgcgctccagacgagcctggcgcgcttcgaaacgcgctttggcttctgcggcgcgcttttcttcctgacgaatagccgcaatttcagctttttcctgacggaaatattgcaccagggggatattgctcgggcaaacccacgcgcaagccccacattcaatgcagtcggcaatgttatgcgtggtggctttatcgtgttgctgacctttgctgaaccagtacagctgttgcggcaaaagatccgcagggcaggcgtcagcacaggcgctacaacggatgcaactttgttcttcctgtggttcgccaagttcattggcagagggagccaaaagacagttggtaatctttacgaccgggacatccagccacggtaa

SEQ ID NO: 20601 - DNA, 762 bp, Escherichia coli
atgcattttgccggtgcgaagtctgttgctgagtctttaataaaacctatgttttattatgataataatgttgcagggacgttgaaattaatcaattgcgctataaaaaacgatgtggctaattttatttttagctcttctgcaacggtttatggtgaaagcgaaataatgcctgttacagaagattgccatataggcggaacattaaatccatatggcacatcgaagtatatatcagaattgatgattagagatattgcaaaaaaatatagcgatactaattttttgtgtctgagatattttaacccaacaggtgctcacgagtcgggaatgatcggtgaaagtcccgctgatataccaagcaatttagttccttatatattacaagttgctatgggtaaactagaaaaacttatggtgtttgggggggattaccctacaaaggatggaaccggtgttcgtgattatatacatgtaatggatttagcggaagggcatgtggctgctttatcttaccttttccgtgataataacactaattatcatgtttttaatttaggtactggtaaaggatattctgttttagagctggtttctatctttgaaaaaatatctggggttagaattccatatgaaattgtttcgagaagagagggggatattgctgaaagttggtcatcacccgaaaaagcaaataagtatctcaattggaaagctaaaagggagttggaaacaatgcttggggatgcctggcgctggtag

SEQ ID NO: 20602 - DNA, 588 bp, Escherichia coli; identical to SEQ ID NO: 17157

SEQ ID NO: 20603 - DNA, 546 bp, Escherichia coli
gtgaccatctcattacatccggagcaacaccttcgtcccttccggggtatcctgcaagcagatgcgttcgcaggttacgatcggctgttcagtgccgaacgtgaaggcggcgcgttgacggaagcaggatgctgggctcatgcgcggcgcaaaatccacgatgtatatatcagtaccaaaagcgcgacggcggaagaagcactgaaactaatcggcgaactgtacgccattgagcacgaaatacgcgggttgccggtgtctgaacgcctggcggtcaggcaaatgcagagtaaaccgctactgacttccctgtataagctgatgcaggagaaagaacacacgttatcgaaaaaatgccgtctgagagatgcgttccggtatatcaggaagcactgggttgcgttgtgcaacttctgtgatgacggtctggcggaggcggacaataacacagcggaaagagcgcttcgtgcagtctgtctcggaaagaaaacgtgttcttcggtagcgatcacggcggcgagcgtggagcactgctgtacgggctga

SEQ ID NO: 20604 - DNA, 993 bp, Escherichia coli; identical to SEQ ID NO: 12426

SEQ ID NO: 20605 - DNA, 651 bp, Escherichia coli
atgataagtttatcaccaccgactatttgcaacagtgccatttcagttatcaattgggcagaaaagcaggaatgtattgataatcagcgtattgggttatggggaacatcgctgggaggggggcatgtcttcagtgcagctgcgcaggaccaacgcgtaaaatgtattgtcagccagctggcttttgctgacggtgatgttctggttaccggagagatgaatgaatcggagagagcgtcttttctgtccacgctgaataaaatggcagagaagaagaaaaacaccgggaaagagatgtttgtgggggttacccgggtactgagtgataatgaatcaaaggtattcttcgagaaggtaaaaggtcagtatcctgaaatggatataaaaatacctttccttacggttatggagacgttgcaatataaaccggcagagagcgcagccaaagtacagtgcccagttttgattgttattgccggccaggatagtgttaatccaccagaacagggaaaagccttatatgatgctgttgcttctggtactaaggaattatacgaggaagctgacgcatgccattatgatatttatgaaggcgcgttttttgaacgtgtggcggcagtacagacgcaatggtttaaaaaacatctttaa

SEQ ID NO: 20606 - DNA, 159 bp, Escherichia coli; identical to SEQ ID NO: 6188

SEQ ID NO: 20607 - DNA, 645 bp, Escherichia coli
atgagcagaattatcaccaccaccgtgtatacactgcatgagctatcctccaccgcacaggaaaaagcccgcgactggtaccgtcagcatcatgctgacagcaactggtatgaaaacgtgtatgaggacttcagggcggtctgtggcattttcggaattgacctccgccagcgcgttttccggctcagcaatggcaggtttatggaagagccgtgcatctggttcagcggattctgcagccagggggacggagcctgttttgaagggcgctggcactggcagccagcgacaccccggaaaatcagggaatatgcccctcaggaccgtgagcttcatcgtatcgcggataccctgcaggcggtgcagaaacgtaacttctggcagcttcaggctgaaatcagtcaccggggacgttactgccatccgtacagcatggatatcaccgtcacccggaacagtccgactggtcaggcaatgacaaccgatgcggaagccgctgtcagcgaagccctgcgcgacctggccttctggctgtaccgccagctggaaaacaagtacgactggctgacctcagacaccgctgtggatgaggcccttctcatcaacgaatataccttcaccgaagccggtctgcgcgccggctga

SEQ ID NO: 20608 - DNA, 222 bp, Escherichia coli
atgaaaattatcactcgtggtgaagccatgcgtattcaccaacaacatccgacatcccgtcttttcccgttctgtaccggcaaataccgctggcacggcagcactgaagcgtataccggtcgtgaagtgcaggatattcccggtgtgttggccgtgtttgctgaacgtcgtaaggacagttttggcccgtatgtccggctgatgagcgtcactctgaactga

SEQ ID NO: 20609 - DNA, 477 bp, Escherichia coli
atgcaacagctttcctttctgcccggagagatgacgcccggcgagcgcagcctcattcaacgggccctgaaaaccctggaccgccatcttcatgaacccggcgtggccttcacctccacccgtgcggcacgagaatggctgattctgaacatggcgggactggagcgtgaagaattccgggtactgtatctgaataaccagaatcagctgattgccggtgaaaccctcttcaccggcaccatcaaccgcacggaagtccatccccgggaagtgattaaacgcgccctgtatcacaatgccgctgctgtggtgctggcacacaatcacccgtccggtgaagtcacccccagcaaggcagaccgccttatcacggaacgtctggtacaggcactggccctggtggatatccgggtaccggaccatctgatagttggtggcagtcaggttttctcttttgcggaacacggtctgctttaa

SEQ ID NO: 20610 - DNA, 222 bp, Escherichia coli; identical to SEQ ID NO: 20608

SEQ ID NO: 20611 - DNA, 1746 bp, Escherichia coli
atgacgtccggggagaggagggtggcttcacgactggagagctttctgaatgatgattgctttgtctggtacgatatcccggtgggacggaaaaaccgacatccggattttgtcattattgacccggataacgggctggtatttctggaggtcaaggactggactgtatccacattacgtaaagcaaatcaggagcaggttacactggaaaccgacggtcttctgaaatcagaaataaatccgctggtacaggctcgtcgttatgcatgtgatacggttaatgccttacctgctgacccgtgcttacggcagaatgacggtcagtataaggggcggctgaacctggcctgggcgtatggtgtggtgttcacccgcattacccgtcagcaactgaaggcactgacagggaatgatgagaatgcggtggaaaagatttttccttcagcacagacaatctgtcaggatgaaatgacgcagtctgttttacctgagatattccggcaaaaaattgccgggatgtttaccacgggattcagaacccaggtgacaccccggatgagagatattctgcgcgcccatctgtttcctgaagtgaccgtaaaacagaactcacaaatcaaaatcatggatattcagcaggagattctggccagaaatattggtgacgggcatcgtgtcattcatggtgtggccggctccggaaaaaccatgattcttttattccgttgcctttacctggctgaaaccacgcccggaaagattctggtgctgtgctacaacattactttggccagttatctgcgggaatgcattgatgtcagagggctgacgtcacgggttacggtatctcattttcacagctggtgtgcctcaatgataaaacgccacggtattcaggtgacggctgacagaaaggattacccggagaaatgcttcagcacactggaagaggctgtgaacagcgggaaaatcaccgacgccggatatgatgctgtactggtggatgaagggcatgattttgacagtcgctggctggccctgattgcccgtctgtttgataacgcatcccgttcactgctcctgatgtacgatgatgcccagtccatttatcggcgggagcgggctctgaacttttctctggccagtgtggggattcaggcgcagggacgcacttctgtcctgccggtcaattatcgtaatccgaaacgcattctgcactttgcttatgcattctctcgcgagtattttgaaaaacatcagaaccgtgaaataccacttgttcagccacaggcaggcggtgaagagggtacagagccggaaatcctgcattgtgcttctgaacgtgatgaagccagacaggttgcagactggctggagaagtgccatgccctgtgcggtcactggagtgatatggctgtgctgtgtccgacagagcattcagcgaaacaattgcaggacgttatgacacaacgcgggatgccttttgccacctgttttgacagggaaggcaagaaggcatactcgcgacgtaaggatgtggtgcatttactgacatatcagagcagtaaggggctggagttcccgtatgtggcggttatcaatgcgtctttcattccttctggtgtagcggatgagtctgaagtaatcccggtgctttatgtggcgttcacccgggcaacccgtgaattactggtgacctgttaccgtgaaaacagtatcagtcgtcaccttgaggattttgcataa

SEQ ID NO: 20612 - DNA, 372 bp, Escherichia coli; identical to SEQ ID NO: 11381

SEQ ID NO: 20613 - DNA, 372 bp, Escherichia coli
atggatacaattatcacatggatgggagatcgtctgttggggtggataacaaacaaatccgatctgcggcagagggcaatcactggattaactcctgcgatttattcaacaattttatatactgaaaaattaaaacgtggtgagcctaataacccaaacgaagaagaaaaactttatagactttggtatgaagcgtcttcccaagtcgtagtgaaccgccccgggtttcctggagagtgttttatctgtgaactcaggctgccagatcatcgtttccgatggaagcataataagctttttctgcttctgccggaggagtatggcccagcctttccagcaatcgtcgattgttataccagtccacccacgtga

SEQ ID NO: 20614 - DNA, 828 bp, Escherichia coli
atggcttcattcgcatatgaaaataaaaaattgaaaaaactcttcactttattagataagagagacatgtttttgaatgagttgcatcaacatgtttttttaaaaggcgatgcgattaccccttgtatcttccttggggatcatacaggcgatagatttagtactatttttggtgataaatatatccttactttgctaaattctatgcgaaatatggagggtaataaagatagtcgtataaataaaaatgtcgtcgttctggctggaaatcatgaaatcaattttaatggtaactatagtgcccgactagcaaatcataaactctcttccggtgatacatataacttaattaaaacgctcgatgtttgtaattatgactcagaaacgaaagttttaaccagtcatcacggaataataagaaatgaagaaaatgaatgttattgtctaggtgctttgcaggttccatttaatcagatgaaagacccaattgatcctgaggaattagcaaatatatttaataaaaaacataaacaacacatggatgatcgtcttatccatctaattagaagcaatgctatagcatccacacctgtatatgacaattattttaataacactactgctttcagaccaaaacctgaagatatcttcaaatgtggacagacgctcaaaaaaagtaaacagaaatatggccattatggattaggggtagatcagcatcaaaaaattgataattatatcatggggctaaattcctggaagatagcacctaacgaacgtggtgataaaaaaggtgtcccagggcttagttgttttcaaccacattaa

SEQ ID NO: 20615 - DNA, 516 bp, Escherichia coli
atgaaatttaaaaaatgtcttctgcctgtggcaatgttagcgtcattcactctggcaggatgccagtcaaatgctgatgatcatgccgccgatgtttatcaaaccgatcaactgaataccaaacaagaaactaaaaccgttaatattatttccattcttcccgcaaaagttgccgtagacaactcccaaaataaacgaaacgcacaagccttcggcgcgcttattggtgcagtcgctggcggtgtaatcggccacaacgtggggtctggcagcaattccggaacgacggcaggtgcagttggcggcggagctgttggcgcggcagcgggttctatggtgaatgataaaaccttagtggaaggtgtttctctaacgtataaggaaggcaccaaagtgtatacctccacccaggtgggtaaagagtgccagtttacgacaggtttagccgttgttattaccacgacgtataacgaaacgcgtattcagccaaataccaaatgtcctgaaaagagctaa

SEQ ID NO: 20616 - DNA, 531 bp, Escherichia coli
atgtggacggcaacgccggtgaaaattttcttctccgaaattccggaaggcatctttggtaagaaaaccgtcgaactgaacgaaaacggcgttccggcgcgcgcagcgtggatccagttcctgatcgtcatcccgctgatgattatcccgatgctcggttccaataccgtgcaggatctgatgaataccattattaatatgaccgccgcagcgtccatgcttccaccgttattcatcatgctggcttacctgaatttacgtgccaaattagatcacctgccacgtgatttccgtatgggctcccgccgcaccggtattatcgttgtttcaatgctgattgcgatatttgccgtagggtttgtcgcttcgacattcccgactggcgcgaatattctgaccatcattttttataacgtcggcggtattgttatcttcctcggctttgcgtggtggaaatacagtaaatatataaagggattaacggctgaagagcgccatattgaagcgacgccagccagcaatgttgattaa

SEQ ID NO: 20617 - DNA, 579 bp, Escherichia coli
atgcggagccagaacaacaggttgacccgcgcaaagccgccgtcgaagccgctattgcccgtgccaaagcacgcaagctggaacagcaacaggctaatgccgagccagaacaacaggtcgatccgcgcaaagccgccgtcgaagccgctattgcccgtgccaaagcacgcaagctggaacagcaacaggctaatgccgagccagaacaacaggtcgatccgcgcaaagccgccgtcgaagccgctattgcccgtgccaaagcacgcaagctggaacagcaacaggctaatgccgagccagaacaacaggtcgatccgcgcaaagccgccgtcgaagccgctattgcccgtgccaaagcacgcaagctggagcagcaacaggctaatgcggaaccagaagaacaggtcgatccgcgcaaagccgccgtcgaagccgctattgcccgcgccaaagcacgcaagctggagcagcaacaggctaatgcggagccagaagaacagattgatccgcgcaaagcggcagttgctgcggctattgcccgcgttcaggccaaaaaagccgcccagcaaaaggttgtaa

SEQ ID NO: 20618 - DNA, 276 bp, Escherichia coli
gtggggcgcaatagccgtaacggtacccgaggtgggcgcgtgaaccggcagcattttgccgcgtccacgggtaagcggctggccgcgcagtactttatcgccgacgctaacgcacaactcaccttcagcgccaatatgttgtttcagtggtatgacaaaacgctgcgccagtggtacctggcgcaggggcgtaccgttggactgggttttcatctccggtggatggatgccgccgttgaaatcccagattttattttttctgaatgcagagaataa

SEQ ID NO: 20619 - DNA, 363 bp, Escherichia coli
atggctaaaatcgagtaccatcgcgatcgcggtaattacctggaaatatacgatcatgaatctcttaacgatatcaacgatgcgttatatgaatactgtgaaaaaacgagcatcacagatgcacctgatgcatttgtcgagctaccggtatatctccgcgacatctatgcaatacgaacaccgcccgtatcggtgatccacattggctatgtccgcctgtccatcgaagaagatgaagatcgatatatcgtgcgccactatacattggacagaaaagagcttcccaatgaatggaacatgagtaatttctacaacggtgaatatggcttaaaacccgctaagaatggcgcgggcattgcgtaa

SEQ ID NO: 20620 - DNA, 216 bp, Escherichia coli
atggagcaaggcgagcaggcacatcactgcgaagctttcgtgacaaagtcgcgtagatccgacggttgtgcggggaatgatcgcgttcttacctggggagttctcgcctcatgcctgaaagggcaacgtcgtaagacggagcgagaagtcagcagaggccgtagtagtcaggactccgacgaagggccgaacgagaaggaaagccaaaagatatga

SEQ ID NO: 20621 - DNA, 156 bp, Escherichia coli
atgccgggtggtgtggcaggggcgcagccttgtgctcccccctatgccgatcaagcagaacattgtgctgggcctctgacgcatctccttgatggtcttggcatcgtgcttaagtggattggtgtcgtctctgataggctcatggaggcagaatga

SEQ ID NO: 20622 - DNA, 3720 bp, Escherichia coli
atggaaagaaaaaacgccaatattgacgatgttataaggacagttgaaaccgccagcgcgaaagagctggaagagcttgcaggtattcgggaagctgttgaagatttgaaaggggaacgagttgcaactgttgatcctgtctctcgcagtgtgtcggcattaaatcgcacaatcgaaaattcacgtcctgactttgtgaccaatgtgccatcagtggactctattgttgacgcaatgaaacggcttaatttaggggacgtttctcgtatacgggaggacaaagtcactaaccgtgaacagcaggctgcaccaacagcgcacaatcccccaaatagacgaagagaggcaataacagaggatgttaaagcacagcggttagaaacggtcaaactcgctcgtgatttgaaaggggaacgcgttgcaacggttgacccagtatctcgcagtgtgtcggcattaaatcgaacaatcgaaaattcccggccagactttgtggccaatgcgccatcagtagaccctattgttgacgcaatgaaacggcttaatttaggggacgtttctcgtgtagttcaggagggcattgctcaagaggaacagcaggccaaatcaactacaccaaagggtaaaaaaagacgcaggaaggctatatcagaggatataaaggcacaacggaccgaagcagccgaacacgctcgcgaaatgttcgatcaaaaaggcggtgcgcaaaaaagccaaaaccaacgcgatgcgcgtggtcgttttattggaaagtcagggagtaaggccgcagcggaagatgcccgtgctgaacgtgctgaaaaggccaggcgcaaagaggatgatgagcgtctaaatgctgaatcaggtttattaaaaaaactgtcaaaagtagctgaaggcataggtaacccttcagagactcgtgccgtcgatgcgttaggttatgccgttgctggtccattgtgggcagcagggaaggagcttggcgggatatcaaaagaagttggtggatcgcttaatggtgccagaaagtctattgccgatgtgattcgtggcaatgacgataacagccgtagaaaaggtttttttaggcgtaaatcgcaaaatagtgccgatgtcgttcaggttaacacccaaaaacggacggttcaggaacttcaggagcagaccagcgaaattaaagagggcaatgacaagattctcagcgcccttgatcagatagccaaaaacaccgggaaaaagaagggcggcttgctgtccaaactatttagcctgttagggaagggggccggtggcgtcgcgtcgttgttaatggggcgtggcatgctgaaaaaagctggagcactcgcttttggcgctctgggggcaaagagactcgtaggaatgctacgcggtgggggcaagaagactctcgcccatgaaggcggagatttggctgcccgggcagcaggtaaacttggattaaaggcagttggtaaaggggcgttacgcgcaattcccctagtcggcacagtggctggaggtatttatgatgcggtaaccggttggaatgatacagaagcgcaacgtcgagcgtttgggcttaaatcaggacaagatccatcattccagcaaaaagccgcttatacgttagccaatgttcttgatttggggggactggtatctggtattagcagtgctattggtgatgttctcaaatcacttggatttgaggatatcggcaatatgttgcaatcattttcgacggaaagtattgcccaggccattgatagcggggttaccaacttagaaacatatatttctaaccttggcgacaccatttctaccaagttcgatgattacacagcaaagattggtgatgctgtttcagcatggtttagcgatacatctaataagttgcttgaaaagctggatgccatcaaagacttctttactgtcgataacctgaaacaggttttcagtgatgcaattgatagtgcaattgacttcattaagaacccagggaaacacattaaagaggcggctggtaatatttgggatggggttaaaaatttacccggtaaagcattagatgcagcggttgatgccgttaaaaatacccctgcggcaatgattgtatcaaaaatacccaatccgatcggcgaggctaatgcaaaagaaatcactccagagttaaaagctccggttaatagccaccaggagacatctgattctaaaactgaatccgatgctaaacagactaatattgctacccgcgtgataaatgcggcactggacacggcgaaagatagcaataaaacagttaaagaaactgccaatcagattatcaatgcaaatgccgtagaaatgggcaatagcgcggtgcggaaaattgattcagctattggacaaaatagctcgtcatcatcgtcgcgtaataccaccggcactgggaatgacattcagaaagctgctgatacctacaataatggcaacttagatgtaaaagtcggaagccttggcgctgaaggtaaggcaaatctcgataagttagctccgtattttgctgaactagagaataaatatggtcttcctgaaggcactctttacgcgattgctgcaactgaatcaggaggggatcctaacgcaaagtctccgcttacaagatcaccagatggaaagttaagtggtggcgcactcgggatgttccagttcacgagtattgctcgtaaagagacagggatatcggaaccggatgcatttgatcctgtgaaatcggcagaagctgcggctcttctcatgagcaagtatctgaagcaagccaatggagacttaaacgaggccatcactgcatataacgctgggtttggcactattaataggtggaaaaaaggcacaggtgacttatcgaaagaaaaccgtgagtacgcgatcaaggtcaatactcatcgtgctcgctatttaggtggtgaaatctatacaccaggggcaggagcacaggggggggcgcaatatggagtgaggggaccactgcctgataacgccgttatcgatcagtctactggcctggcgtttacccctggtgatagcccgtttgagaagggcggtctggtagacaaaatcggtaatgctgttggcgttaacgatctggtcaacaaattcatgaatggtcgggggatgcgtcgagaagtcgtccagggaaccctcgaagaacgtgcacgaggaaatgggaccgcaacagcagctggcaatgtgtatgttgatactccgacgccagttgaagaggcgcgtccagtggccagcaactcaagttactttgaccagctcggcgcacaaatggggattgatggactgtatgacaaactcattaatgcccggggaatgcgctcaaataattctcctcaaccagcatccacgttccaggtgacgactgccgccaacgatttgcagcaaccaaccggtcgtatgcagatagacggacaggttattagtgaccttggcggctccggtgccaagccgacaatgcagttggctgataataccgtttcacttgatggtgaaacgaagcggctgtttgcgcagatgacctcattgcttgccaggattgaagagcacaccaaagactcggcgaaaggccagggaactgtcgtaaaggtcagcacgcctcagccgggcgttatgcgcacggtaccactgtcaattgatgatccgttgatgaatgactacgcgagagttgattga

SEQ ID NO: 20623 - DNA, 1035 bp, Escherichia coli
atgacaaaaattactaattctaatgagttgaagttgctgtataaacagtcagtgctcattccatcatacaaagatcacgtagcgatcttgcaaaaacaattaggaatagaaaaacattcttttcaaaatatgccaagattgaatagacaagctgtaattagtaactctcttcgaaaacaattggctagtataccgaacttggctggaataggcagcaagtatcgtgaacatatcgcgattttacagaaacagactcaggctcttttccctcatgatgcaaatagatatattcaaatgctaaggaaacaggccgaaatagctatgccattacgaaaacagcttgaggtgcttaataagcaagctggtttaaataacatgcaagcgatacttaaagaattacaacaaagtgcaagttataaaatagatgtaagccaagacataaagaaagtactagatcactatgctagaacaagaaatgcttcattacatcaaataatagagcaggggatttcatctattgcgcaggcttatgctgaaggtgctactgaaacatcacacaccaaaagtaatgttcaaaataaaggattaaataaacctagctcaaagtttgttgattcatttaaagagcttccttatccactgcaatggttactaatggttatattttctcaagttgtgtttggtgcttttattgattacggaaaagagaaaaccttgctgggaatacacaaggcagaatcatattttatatctctgtttgaggataaaccaatatcaaaacaacaattaattaaagaaaacaaagaaattagttgggaagatctcaatggttttcgttttataactggtgagaacgtcagattacacgtcagtccttctataaatagtgaggtgattgaatgcattggcaaaaatactatagtggctgttttagataaaaaagatcgccaatggcttttcgtgcaggttaaatcaggggacgagtttattactggatggattacacgaacatacacaaagcctcttaaggcttga

SEQ ID NO: 20624 - DNA, 705 bp, Escherichia coli
atgttgaaccgaagaacatttaatgtattctgcgatgaatcctgtcacctactaaatgatcataataaagtcatggtattgggtgcgctttggtgtcctggcactatcacaaaaaaaattgctagagacatcaagggattaaaattaaaacacaatttaaaacctgatttcgaaatcaagtggactaaagtatctgcgtccaaagttgaattttacttagaggtcgtagattacttcttcagcaacccagcattgcgctttagaggtgttgttgttcctgataaagagcaactggaccatgctcgattccatcaagatcataatactttctattataagatgtttttttatgtcttaaaaaacataatagaaagtaacaacacatacaatatctacctagatataaaagatactttaggtattgaaaaaattgagaaattaagaggagttcttcacaatgatcgctatgattacaatcatgagtcgataaacagaattcaacatatacgatctcatgaagtgcaacaattgcagctaacggatcttttcattggtgcgttaggctacgttcatcgaggaatgaatagcaacgcgggaaaaatccaagtcataaacaggataaaatcacatacaaacagggagttactaaaaagcactcttccaacagaaagtaaatttaatattttcgtgtgggaggctcgctga

SEQ ID NO: 20625 - DNA, 465 bp, Escherichia coli
atgcttcaaatgccagatttattgtacttcaatggaagttggcaagagtatatagacgatgtatatgatgttgttagagaagatattttaatctctaatataacgtttaagggtctccctgttcgattacgttattcaccggaatatgatgggaaagagttcggattttggcatttagtatcagagggaaaaatagaagaagaacgaatacctgatcttgaacggtgtaagcggatccgctggatcgcgcatatgataaggaattatgaccattgcgatatatcatgttggtctgaaagacgaggaccaactgaagagtgggtaatctggaacgagtgtgaaaactacgttgttgtgctatccgcacgtagagactattggcttctcaaaacagcctatgttgtaacctatgacagtaaaatcagaacactcaaacaaagcagaaaaagagcacttgggacataa

SEQ ID NO: 20626 - DNA, 297 bp, Escherichia coli
atggaaattgatttttcatactctcctgaaacgatagaacgaagattcgaaataattggatgcaaaactatttcagaggagcattattggattctctatgatgccaatacatggttatgtgccttagcagaatgtcggccatcgttatgtgcaggggagggaggacttcgacataaggtgctggctacacttgaagtgaacacgttacgatattggtgtgtcgaaatacttagggataacaaagaattacatttattattgctgaataagtgtgcgcctctgcgcaggaaagcataa

SEQ ID NO: 20627 - DNA, 237 bp, Escherichia coli
atgcagaacaattcgaacaaatgtcgaacgctatgggtgcggttatatatttatgccgtcctctgtttgattgtgtcactggttctgtatgtttggcttttgccaaatatgatctcatctaacagcacaatacttgtattgttgggagtccttctcgcgctcatttacccggctttcgcagtagtcttttttcgtgaaaaaaccaggaaattaattaatgaaaaaaacgttgattag

SEQ ID NO: 20628 - DNA, 828 bp, Escherichia coli
atgaaaaaaacgttgattagtgcagcgattattttgggttctttatgtctgaccggatgcgatcgggtagagccaggtaacgtagggatcaaagtaaataagctgggggatgataaaggtatcggtgaagtagttggcgttggtcgctactggacaggcttgaatactgaagtttatatcttcccgacctttaagcaaatgaagacatacgatgagccgttcagcttccagatgagcgacggaacaaccattggttaccacatcggcgtagcctacaaggttgatccagcaaaagtcacaacggtatttcagacctatcgcaaaggtgtagatgatattactgataccgatctacgccagaaggttgcagatgctctgaaccggttagccagcaaaatgaccaccgacaaatttatcgacggtggcaaatctgaattgcttgatgcagcccttaaagacattcaggaagaaatgacgccaatcggcattcaggtgatgagcctctcttatgtaggtaagccagaatacccgccaacagttattgacagtattaacgccaaagtcacggcaaaccaaaaaaccctgcaacgcgagcaagaggtcaaacaacgtgaagcagaggccaacatgctgcgcgcggaagctgccggacaggctgatgctattcgcacaaaagcccaggccgaagctgatgccattcgtttacgtggtgaagctctgcgccagaaccccggtgttatggagttggaagcgatcaacaaatggaacggtacattaccgcagtatatgaccagtaataccgctgttccgtttgttccggtgaaataa

SEQ ID NO: 20629 - DNA, 582 bp, Escherichia coli
atgaaaggcgaagtgaaagagcgcggcatgatttttaacgatgagatggtccgggcaattcttggcgggaataaaacacagactcgcaggattgttgaagaaaaattctatggacgggcagtggccgcagagttgcttgccaagcattgtccatatggtcaaccgggcgatcgtatttgggttcgcgaaacctaccgggtacatggcaaagcgacggacgtcgcaacgctggtttatcgcgcaagcgtgcgtaactcctggacagaacaaacgcaccgggttccggtcgaggtttgtaataaaccagtatcagaaaagtggacgccatcaattcacatgccgcgctgggcatcgcgcattcttctggaaattaccaacgtgcgcgttgagcggttgaacgatatcagcgaatgcgatgcaagggctgagggcgcaccaacagaatcgaccctcattggcgataagcattacccaggtttccgtagcctatggaaatcaatttatggcgaagatagttggaacgctaatccttgggtgtgggtaatagagtttgagcgtattcagggggcaaccagtgagtga

SEQ ID NO: 20630 - DNA, 261 bp, Escherichia coli
gtgagtgagtcaaaatgccaaattaatggcaacaagatagaaccgtgcgcggcgttggcacaatccctggagcatgacgctgaatacacgacgcgaaaaggtctgctgaaatacaaaatctataaccatgaattaattcattcacaagacctgatcatgctgcggtctggtgaattttctaaatcgcctattcgagtttcattttgcccgttctgtggtgaaagtctgaaaacgtgggaagcggaggcaaccagtgaataa

SEQ ID NO: 20631 - DNA, 645 bp, Escherichia coli
gtgaataaccgcttttacatgatgtgcttgcgtgaaactgtgggtaataacgcctcattccattgccataacggcaatggttacagttctgatatcgatcgcgctcatgtttacacgctggaagaagcccaaaaagcctggaattgtggacgagatatcgatcagcctgtttgcgctgatagcgtggatgcaatggctgtgtggcacgttgattgccagtacattcccacagaaagcctgattgagtcagattgcactgcgtatgtggcctacaaaaaaggtagctggaacggcaacgatgtttactggcttcaacacggtggattgccaacagatgacttcagtaaagcgaccatctttagcgtcgccaacaaaaacgaaccaggaatagtttggttgccattttccattgctgatgcagcaaagcgtcggacgttcaatatcaataactttaaccgcagaacaatggttcagggcgcaggtttggtcatgcctgactggttgaaagagcagaacagaagaaagaagtcgcgaagcgggaaggtgcgttggaattgtccgcattgcggaaaaataacctggcagtacagcccatatgattttgaaggctgtagtgattacaactgtgaaggatggcgagaatga

SEQ ID NO: 20632 - DNA, 189 bp, Escherichia coli
atgaaaaaccgtaaagcaaagattctgttagttcgtagaaacgctcctggcgtctggcagtgggtgagactcagcaaccgacggatggggttaatgaaacattacgggatgatggattgtggtttttgcaaaaagcccagcgcggcgcaaaaccgctggaaaaaccacttgcgcactaaaggagagtga

SEQ ID NO: 20633 - DNA, 210 bp, Escherichia coli
atggctatcgctgcaagttacaccatgcatctctattgtgattgcctccagtgtacagatggcaaatataagtcgccagacttcggtgagtatataggtacgtcatgggctggctgtgcaaaagaggcgcgcaaggatggctggcgaataagcaaagacaaaacgcgtgcttttgcgcccgggcataaagttttgaggattaacaaatga

SEQ ID NO: 20634 - DNA, 2613 bp, Escherichia coli
atgactcaacagccacaagccaaataccgtcacgattatcgtgcgccggattaccagattactgatattgacttgacctttgacctggacgcgcaaaagacggtcgttaccgcggtcagccaggctgtccgtcatggtgcatcagatgctccgcttcgtcttgatggtgaagatcttaaactggtttctgttcatattaatgatgagccgtggaccgcctggaaagaagaagagggcgcactggtcatcagtaatttgccggagcgttttacgcttaagatcgttaatgaaattagcccggcgacgaataccgcgctggaagggctttatcagtcaggcgatgcgctttgcacccagtgtgaagccgaaggtttccgccatattacgtattatctcgaccgcccggacgtgctggcgcgttttaccaccaaaattattgccgataaaacccaatatcccttcctgctttccaacggtaaccgcgttgcgcaaggcgaactggaaaacggacgtcactgggtacagtggcaggacccgttccctaaaccgtgctacttgtttgcgctggtggcaggcgacttcgacgtgctgcgcgacaccttcaccacgcgttctggtcgcgaagttgcgctggagctgtacgtcgatcgcggcaaccttgatcgtgcgccgtgggcgatgacctcgctgaaaaactccatgaaatgggatgaagagcgcttcggcctggagtatgacctcgacatctatatgatcgtcgcggtggatttcttcaatatgggcgcaatggagaataaggggctgaatatctttaactccaaatatgtgctggcccgcaccgataccgccaccgacaaagattacctcgatattgaacgcgttatcggccatgaatatttccataactggaccggtaaccgagtgacctgccgcgactggttccagctcagcctgaaagaaggtttaaccgtcttccgcgatcaggagttcagctctgaccttggttctcgcgcggtaaaccgtatcaacaacgtgcgcaccatgcgcggattgcagtttgcggaagacgccagcccgatggcgcacccgatccgcccggatatggtcattgagatgaacaacttctacaccctgaccgtttacgagaagggcgcggaagtgattcgcatgatccacaccctgctgggcgaagaaaacttccagaaagggatgcagctctatttcgagcgccatgatggcagcgcggcaacctgcgacgactttgttcaggcgatggaagatgcgtcgaatgtcgatctctctcatttccgccgttggtacagccagtccggtacgccggttgtgaccgtcaaagacgactataatccggaaaccgagcagtacaccctgaccatcagccagcgtacgcctgctacgccggatcaggcagaaaaacagccgctgcatattccgtttgcaatcgaattgtatgataacgaaggcaaagtgatcccgttgcagaaaggcggtcatccggtgaattccgtgctaaacgtcactcaggcggaacagacctttgtctttgataatgtctacttccagccggtgcctgcgctgctgtgcgaattctctgcgccagttaaactggaatataagtggagcgatcagcaactgaccttcctgatgcgtcatgcgcgtaatgatttctcccgttgggatgcggcgcaaagcctgctggcaacctacatcaagctaaacgtcgcccgtcatcagcaagggcagccgctgtctctgccggtgcatgtggctgacgctttccgcgcggtgctgctcgatgagaagattgatccggcgctggcggcagaaatcctgacgctgccttctgtcaatgaaatggctgaactgttcgatatcatcgacccgattgctattgccgaagtacgcgaagcactcactcgtactctggcgactgaactggcggatgagctgctggctatttacaacgcgaattaccagagcgagtaccgtgttgagcatgaagatattgcgaaacgcactctgcgtaatgcctgcctgcgcttccttgcttttggtgaaacgcatctggctgacgtgctggtgagcaagcagttccacgaagcgaacaatatgaccgatgcgctggcggcgctttctgcggcggttgccgcacaactgccatgccgtgatgcgctgatgcaggaatacgacgataagtggcatctggacggtctggtgatggataaatggtttatcctgcaagccaccagcccggcggcgaatgtgctggagacggtgcgcggtctgttgcagcatcgctcatttaccatgagcaacccgaaccgcattcgttcgttgattggcgcgtttgctggcagcaacccggcagcgttccatgccgaagatggcagcggttatcagttccttgtggaaatgcttaccgacctcaacagccgtaacccgcaggtggcatcgcgcctgattgagccgttgattcgcctgaaacgttacgatgccaaacgtcaggagaaaatgcgcgcggcgctggagcagttgaaagggctggaaaatctctctggcgatctgtacgagaagataactaaagcactggcttga

SEQ ID NO: 20635 - DNA, 1182 bp, Escherichia coli
atgcgtaaccatcaaaagacgttcacgatgctgctggttctggtgctgattggtcttaatatgcgaccactgctcacctccgtcgggccactgctaccgcaattgcgccaggcaagcggaatgagctttagcgtggctgccctgttgaccgctctgccggtggttaccatgggcgggctggcgctggccggaagctggcttcatcagcatgtcagcgaacgtcgcagcgtcgccatcagtttgttactgattgccgtcggtgcattgatgcgtgagctttacccccaaagtgcgctgctgcttagcagcgtactgcttggtggagtggggatcggcatcattcaggcagtgatgccttcggtaattaagcggcggtttcagcaccgtacgccactggtgatggggctgtggtccgcggctctgatgggcggcggtggacttggtgccgccattacgccctggttagttcaacatagcgaaacctggtatcaaacactcgcctggtgggcgctgcctgccgttgttgcgctctttgcctggtggtggcaaaacgcccgcgaggtcgcctcttctcacaagacaacaaccactccggttcgcgtggtatttactccccgcgcgtggacgctgggtgtttacttcggtctgattaacggtggttacgccagcctgattgcctggttacccgctttctatattgagattggtgccagcgcgcagtacagcggttccttgctggcattgatgacgcttgggcaagcagcaggggcattgctgatgcctgctatggctcgccatcaggatcggcggaaacttttgatgctggcgctggcgttacaactggtggggttctgcggctttatctggctgccgctgcaattgccggtcttctgggcaatggtgtgtgggttaggtctgggcggcgcatttccgctctgtttgctgctggcgctcgatcactctgcgcaaccggctattgctggcaaactggtggcgtttatgcaggggatcggttttatcatcgccgggcttgctccctggttttctggtgtgctgcgtagtatcagtggcaattacttgatggactgggcgtttcatgcgctgtgcgtcgttgggctgatgatcataaccctgcgttttgcaccagcacgttttccgcagctgtgggtcaaagaggcatga

SEQ ID NO: 20636 - DNA, 171 bp, Escherichia coli
atgatttttatgtctgtactggcgggcaatatgtatgaaagcatcggtttccagggcgcttatctggtgttgggtctggtggcgctgggcttcaccttaatttccgtgttcacgcttagcggccccggcccgctttctctactgcgtcgtcaggtgaatgaagtcgcttaa

SEQ ID NO: 20637 - DNA, 837 bp, Escherichia coli
atggttcaacaattaacgacgccttcccgagatcacgcactggatggtattcgtggtatagcttgcttgatagttttaataagccatttcatgcaattctttctaccatctgtttttgttcaaaatcagatagatcattatggagagaaatacataagtgaaactccatttaatatattatataatggtcactttgccgtaatgcttttcttcgttttgagtggaatggttctatcgattccctttttcaaagggaaggggctagaatggtactctaaatccattatcaagagatacccacgtcttgcaatacctaccattgcatctactatattttcctttattctgatgacaacgattggatttcattcatcagaaactgcagtgtactctttatcacaagtaatcccagcgatgccaactacaatgacattactgaatgcggtatgggaagggggtattggtacatatttttacggagttcaaacattaaacccagtattatggaccattcacaccgaattggttggctcaattcttgtactcgttctggtcccactagtttgcactaccagaattaggtttgctttttatactttaggtattgtggtatttagctcaagtcatctaataggatttatattaggggtgatttgtgcagatgtttcagttaatataaagaaaattaataccacaattatctttatgtttattttactaggatgttacctaggttcatacccatattttataactgaacatagtatctggataaataacagtgacataactgtctcttatacacatctgacgctgccgacgaatagagaggtgtag

SEQ ID NO: 20638 - DNA, 123 bp, Escherichia coli
atgcgcaggctgattcgcgaaagacattgcagctattgcggaaaagagctgttcggcggggcaattaaacgcccgtatctggaggttaaagaacaaaatgaaagtccagattttaaacaataa

SEQ ID NO: 20639 - DNA, 600 bp, Escherichia coli
atggataacgccgtattaaatagcgagcttattgccacgaaggcggggaatattactgtttataactatgatggtgagacgcgggaatatatttctgcatcaactgaatatcttgcagtgggtgtcggtattccagcatattcctgtttagacgctcctggtacatctaaggctggttatacaatttgccgttctgtggatttaaaatcatgggaatatgtgtcagaccatcgcggtgaaatcgtctataacaccgaaacgggagaatcgaaagaaatcacagctccgggtgattatcctgaaaatacaaccactatcgccccgttaacgccatacgataaatgggatggtgaaaaatgggtgacggatatcaatgctcagcacgtagcggaagtggaagcggcagagcaacagaaatctgtgcagcttctgttcgcaaaggaaaagatcattctttggcagactgaattacagctgggaattatcagcgacgaagataaagaaaaactaatatcttgggtgaactatatcaaagctgttcaggcagtagatacccagaaagctcacaatatcatctggcctaaaaaaccattcatataa

SEQ ID NO: 20640 - DNA, 375 bp, Escherichia coli
ttgttgctggaggcgttcagccgttttactgagatcatgtcccggcaatatcaggcattttttagcgatgttagtgatgctccgggcgcatgccaggctatcaccgatatgatctacagctcacaggttgcaacgccggataacatggagctgatgtaccagctctacgcgctggctagccgaaaaccgctattaaaaacggtaatgcaaaactggatgcagcgcagtcagcaaacgctcgaacaatggtttgaacccggaaccgcccgcgcgcttgatgcgtttattgaggggatgacgctgcattttgtcaccgaccgtaagccgctatcgcgcgaggagattttgaggatggttgagagggttgcagggtag

SEQ ID NO: 20641 - DNA, 1281 bp, Escherichia coli; identical to SEQ ID NO: 10716

SEQ ID NO: 20642 - DNA, 699 bp, Escherichia coli
atgcaggatatacagcaggatacactcaatgagtgcactaaaacggagcaatccgcgctggtcgtgctctgggaaattgatctgacagaggtcggcggagatcgttatttcttctgtaatgagcagaacgaaaaaggtgaaccagtcacctggcaggggcggcagtatcaggcttatcccattcagggaagcggatttgagatgaacggcaaaggagccagtgcaaggccaacgcttaaagtctctaacctgtacggcatggtcaccgggatggcggaagatctgcagagtctggtcggcggaacggtggtccggcgtaaggtttacgcccgttttctggatgcggtgaacttcgtcaacggaaacagtgacgccgatccggagcaggaggtgatcagccgctggcgcatcgaacagtgcagcgaactgagcgcggtgagtgcctcttttgtgctgtccacaccgacggaaacggatggcgctgtttttccggggcgcatcatgctggccaacacctgcacctggatctaccgcggcgatgagtgcggttatgatggcccggcggtcgcggatgaatatgaccagccaacgtccgatatcacgaaggataagtgcagcaaatgcctgagtggttgcaagttccgcaataatgtcggcaattttggcggctacctttccattaacaaactttcgcagtaa

SEQ ID NO: 20643 - DNA, 1335 bp, Escherichia coli
atgtttagcttaatcatggccggagaaccggacgtttttgaccgctggccgtgtatggaccctgggcttaaagaaggcgaggaaagattctcgatgtcccgcatgctggaaggcaccccaagcgatatttacagtaaattaacaccaataagacccgataccttaagagaactcgccaagctaccagtattgttcatgaccgaaacttatacaaaagatgatgaatatgatacaaacaagtacatcaggatcagacttggggaaataagaaacttacgtaaagatggtggcgatattttattttctttcaagattaatcataattttggagaaataacgaatccccaaacgacattatataaagaaaccctagggctaggatctttcgggttaagtcgtacacattgggcagtaaaaaataaggatttaaatattgttctggaatcacttggtttaaacaaacaaaatagccaactgaaaggtacaatcaaattaaaaaaacaaacatacccagtagtcgagaatattatagattatcttaatttcataaagaaaaactttcgtgatggtctcattaccttttatcgtggacactctaaaagctcatatgagcttgtcccctctctttacagaaaaaatcaaaacgggacgtacaggcatcttgcttcagaatctgatttagtacgtgaaatactcagcgcaagaccaaatgaatttaaggaggataaatttacgattgataaacttgtccgcatgcagcattatggcttgcctacaagactcttagacattacatctaacccactgatagcattatattttgcttgctgttcgaaccccgatgaaaacggacaggtgatttcgttttcaacaaatagaaagaaaattaaatatttcgactcagatacagtgagctgtatagcaaacttatcacttttatcttacgaagagttggaaaaattgtcctcctctgattccagaaaaggtaatatggagttatctgaactcacggataaacttgcagaccttatacagaatgaaaaatcatatttcagaaacagaataattcctgatgacttaaggaaagttgttttccttaaggctaaaataaataatgaacgcatacaatctcaggcaggagcttttcttctgttcggacttgatcccattttaccggaaacagatgctgagtttcctcttaacagagtggagatagcgaacaaaaataaaattctggaagagctggcgcagcttaatatatccgaaagcactgtatatcccagcatggagaaaacggcagcagaaattgcaacaaagtttttatcggtatcataa

SEQ ID NO: 20644 - DNA, 237 bp, Escherichia coli; identical to SEQ ID NO: 9729

SEQ ID NO: 20645 - DNA, 348 bp, Escherichia coli
atgaccacacaaacccttgagcagactcttgaagattttcgtcgccagtgtgagagttttgcgcgcaaacagcagccccgctgcggcctaatttatgaactgtatcagcgccgcctgagcgcggatattgacggctatcttgctggcgttccggccgagtatcgggaagaactgatcgcggtagcgcggcgtgaatttgactatctgacccaagacgagatcgcggaagaaatccggcaggatcgggaaaacgattattgcagccacggtattgagcgtaattggggtcgtttgcgggagagggcgaaatcctacgctaaggctttggccaacgatattctccggtaa

SEQ ID NO: 20646 - DNA, 2562 bp, Escherichia coli
atggctgaaccggtaggcgatctggtcgttgatttgagtctggatgcggccagatttgacgagcagatggccagagtcaggcgtcatttttccggtacggaaagtgatgcgaaaaaaacagcggcagtcgttgaacagtcgctgagccgacaggcgctggctgcacagaaagcggggatttccgtcgggcagtataaagctgccatgcgtatgctgcctgcgcagttcactgacgtggccacgcagcttgcaggcgggcaaagtccgtggctgatcctgctgcaacagggggggcaggtgaaggactccttcggcgggatgatccccatgttcagggggcttgccggtgcgatcaccctgccgatggtgggggccacctcgctggcggtggcgaccggtgcgctggcgtatgcctggtatcagggcaactcaaccctgtccgatttcaacaaaacgctggtcctttccggtcatcagtcgggtctgacggcagatcgtatgctggtcctgtccagagccgggcaggcggcagggctgacgtttaaccagaccagcgagtcactcagcgcactggttaaggcgggggtaagcggtgaggctcagattgcgtccatcagccagagtgtggcgcgtttctcctctgcatccggcgtggaggtggacaaggtcgctgaagccttcgggaagctgaccacagacccgacgtcggggctgacggcgatggcacgccagttccataacgtgacggcggagcagattgcgtatgttgctcagttgcagcgttccggcgatgaagccggggcattgcaggcggcgaacgaggccgcaacgaaagggtttgatgaccagacccgccgcctgaaagagaacatgggcacgctggagacctgggcagacaggactgcgcgggcattcaaatccatgtgggatgcggtgctggatattggtcgtcctgataccgcgcaggagatgctgattaaggcagaggctgcgtttaagaaagcagacgacatctggaatctgcgcaaggatgattattttgttaacgatgaagcgcgggcgcgttactgggatgatcgtgaaaaggcccgtcttgcgcttgaagccgcccgaaagaaggctgagcagcagactcaacaggacaaaaatgcgcagcagcagagcgataccgaagcgtcacggctgaaatataccgaagaggcgcagaaggcttacgaacggctgcagacgccgctggagaaatataccgcccgtcaggaagaactgaacaaggcactgaaagacgggaaaatcctgcaggcagattacaacacgctgatggcggcggcgaaaaaggattatgaagcgacgctgaaaaagccgaaacagtccggcgtgaaagtgtctgcgggcgatcgtcaggaagacagtgctcatgctgccctgctgacgcttcaggcagaactccggacgctggagaagcatgccggagcgaatgagaaaatcagccagcagcgccgggatttgtggaaggcagaaagtcagttcgcggtactggaggaggcggcacaacgtcgccagctgtccgcacaggagaaatccctgctggcgcataaagatgagacgctggagtacaaacgccagctggctgcacttggcgacaaggttacgtatcaggagcgcctgaacgcgctggcgcagcaggcggataaattcgcacagcagcaacgggcaaaacgggccgccattgatgcgaaaagccgggggctgactgaccggcaggcagaacgggaagccacggaacagcgcctgaaggaacagtatggcgataatccgctggcgctgaataacgtcatgtcagagcagaaaaagacctgggcggctgaagaccagcttcgcgggagctggatggcaggcctgaagtccggctggagtgagtgggaagagagcgccacggacagtatgtcgcaggtaaaaagtgcagccacgcagacctttgatggtattgcacagaatatggcggcgatgctgaccggcagtgagcagaactggcgcagcttcacccgttccgtgctgtccatgatgacagaaattctgcttaagcaggcaatggtggggattgtcgggagtatcggcagcgccattggcggggctgttggtggcggcgcatccgcgtcaggcggtacagccattcaggctgcggcggcgaacttccatttcgcgaccgggggatttacggggacggggggtaaatatgaacctgcggggattgttcatcgcggggagtttgtcttcacgaaggaggcgaccagccggattggtgtcggcaatctgtaccgcctgatgcggggctatgcggaaggtggttatgtcggcggtgccggaagtccggcgcagatgcggcgggcggaaggcattaattttaatcagaacaatcacgtggtgattcagaacgacggccccaacgggcgggcagggccgcagctgatgaaagcggtgtatgagatggcccgcaagggggcacaggatgaactccggctgcagttgcgtgatggcggtatgttatcagggagcggtggatga

SEQ ID NO: 20647 - DNA, 732 bp, Escherichia coli; identical to SEQ ID NO: 10708

SEQ ID NO: 20648 - DNA, 327 bp, Escherichia coli
atgactaaaaatactcgtttttcccccgaagtccgtcaacgggcagtccgtatggttctggaaagtcagagcgaatatgactcacaatgggcgacaatttgttccattgctccaaagattggctgtacgccggagactctgcgtgtctgggttcgccagcatgagcgggataccgggggcggtgatggagggctcacctccgctgaacgtcagcgtctgaaagagctggaacgtgaaaatcgtgaactgcgccgcagtaacgatatccttcgccaggcttccgcttattttgcgaaggcggagttcgaccgcctctggaaaaagtga

SEQ ID NO: 20649 - DNA, 543 bp, Escherichia coli
atgatatatccggaaattacaggcaaaagcggcgagcatttacgtctaaaaacgctggaagccgtctggatccaggggaaattacggatgtgggggcgttggtcgtacataggtggtggcaaaccaggaaatatgttcaatcagttgctggcatccaaaaaactgacaaaaaccgcaatcaatgaagccctgcgtagaatcagggagtcagggattgataaaccagagctggaagcattcttgcgagagatgatcgctggcagacagaagagctggttgtctcactgtactgatgcagaggcgttacgcattgatggggtgataagtaaagcgcttgcacgttatcctggattgattgatatcctgcggcaaaggtacgaagggcgggggatgagtaaacgcaaaatggctgaattgttgaatgaggttcaccctgagtggtgctatgcaacatgccgcaatcgtatagatatgtggctgagaatagctgagtttattctgtatccactgatgcgagatgcattttcttttactgacgcttag

SEQ ID NO: 20650 - DNA, 966 bp, Escherichia coli
atgagtcttctttttgctgaacgcccactggttataaacacgcagctggcaatgaaaattggcttaaacgaagccattgttttgcaacaactgcactactggttgagagataccaactccggcatggaatgtgatggtgttcgctggatttataacacaacggaacaatggctggaacagttcccgttctggtcagagtcaacgttaaagcgcgcgtttgcaagtctgaaaacgctggggcttttgcgttgtgaaaagctcaataaatcaaagcgcgatatgaccaatttctacacgatcaactacgggagcgagcttttagatggtggcaaagtgagcgaatccatcggttcaaaatgcgccgctccatcaggtcaaaatgacacgatggaagaggtcaaaatgaaacgctccattggttcaaaacgactcaatgtcatcgggtcaaaatggcctgatgatcttacagagaatacaacagagattactacagagaataaaaacacttctcgtccggaagcttcgcaaccggacccgcaggcggttgaacaggattttttaacccgacaccctgacgcggttgtgttcagtgcaaaaaaacgccagtggggcaatcaggaggatttggcgtgtgcgcagtggatctggggacgaatcgtgagtctttacgagcaggccgccagcgatgatggcgagatttcgcgaccgaaagaacccaactggaccgcatgggccaacgacgtgcgcacaatgcggatgctggatggcagaactcacagacaaatttgtgaaatgtttggtcgggcgcagcgggatccattctgggtaaaaaatatcatgagtccgtcaaagcttcgcggaaaatgggatgaactggttatccgcctggggcgttcgtctgtacagcgttgtgtgaatcatatttctgagccggataccgaaattccgccggggttcagggggtaa

SEQ ID NO: 20651 - DNA, 747 bp, Escherichia coli
atgaaaaatatcgcggcaggtggtgttcttgagcgtatccgtaagctgaccccgcagcatgtaatcgcgccgtaccggacagtggatgagtggcgcgagtggcaactggctgaagggcgaaaacgtagcgaggagatcaaccgccagaatcgccagttgcgggtggaaaaaatcctgaatcgttcgggcatccagcctctgcacagcaaatgctcgtttgcgaattatcaggtgcagaacgacgggcaaaaacatgcgctgagccaggcaaaatccatcgctgacgaactgatgaccgggtgcacgaattttgtgttcagcggtaagccgggtaccggaaagaaccaccttgcagccgccattggcaatcatcttctggcgaaaggtcgcagcgtgattgtgataacggtggctgatgtgatgctggcgttacacaacagctacgacaataaaaactcaggcgaaaaatttttacaggggttgtgtgatgttgacctgcttgtcctggatgaaatcggaatgcagcgggatacgcgcaacgagcaggtcacactgaaccagatagtcgaccgcagaactgcttcgatgcgtagtgtcggaatgctgacgaacctgaaccacgtagcgatgagtacgcttcttggcgagcgtgtgatggaccgcatggtcatgaacggtggtcgctgggtgaattttaactgggagagctggcgttcgaatgtcagacacctgagggttgtgaagtaa

SEQ ID NO: 20652 - DNA, 417 bp, Escherichia coli
atggtaaaagtttttactcccgaacaacgggaagaagtaaaggcgcgtattgtggaactggtacgcagagatggtaggaaaacgcgtaaacaactggaaaatgaaacaggggcgacgagacatctgattgaagttctggcgaaagaactggtagaccgtggtgttgtatatggttcagggcatggaatattcccttctgagcaggtacgtaaagactggataaaagcccataaagagatgtctaaaggtgcagcgaaaaagaagagcgaccctggcctgatttattcattaccagatggagagatacgccactacgacaggcgtcagaacataatctgtctcgagtgccagaaaagcaaggttatgcagcgtgtgctggcattttatcagggtaattttcaggaggtgatggcgtga

SEQ ID NO: 20653 - DNA, 126 bp, Escherichia coli
atgctaattagttcaatatttccgtttatgattgggctaatgcatttttttacagcccctaagtcattgcaatatttagagatcacttctatgagtgatggtgtcgtaatggataatttgaattga

SEQ ID NO: 20654 - DNA, 462 bp, Escherichia coli
atggcatcccacatcgatttgaatgccttccctgttttatccgcccaggtctccagtgttcccatgttttctttcaggcgacgggtctgctcatcaaagcctttcgtggcgatatcgttcgccgcctgcaatgccccggcctcgtctccggaacgctgcagctgtgcaacatacgcaatctgctctgccgtcacgttacggaactggcgcgccatcgccatcagtcccgacgtcgggtcagtggtcagcttcccgaaggcttcagcgactttatccacctccacaccggatgcagacgcaaaacgcgcgacactctggttgatggcatcaaactgttcaccaccacgcacaccggcattcaccagggctgccagtgactctctcgcctggttaaacgtcagccctgctgcctgcccggctcttgagagagtcagcatacgatcggcagtcagtccggactga

SEQ ID NO: 20655 - DNA, 354 bp, Escherichia coli
gtggctgatttcgataacctgttcgatgctgccattgcccgcgccgatgaaacgatacgcgggtacatgggaacgtcagccaccatgacatccggtgagcagtccggcgcagtaatacgtggtgtttttgatgaccctgaaaatatcagctatgccggacagggcgtgcgcgttgaaggctccagcccgtccctgtttgtccggactgatgatgtgcggcaactgcggcgtggagacacgctgaccatcggtgaggaaaacttctggatagaccgggtttcgccggatgatggtggaagctgtcatctctggctcaaccgtgggcaaccacccgctgttaaccggcgacgataa

SEQ ID NO: 20656 - DNA, 273 bp, Escherichia coli
atgtgcctgatggcgctggcattcttcggcaacggttttgcttcgattacctggtcgctggtctcttctctggcaccgatgcgcctgattggtttaaccggtggcgtatttaactttgttggcggtctgggcggcatcaccgttccgctggtggtggggtacctggcgcagggttacggtttcgcacctgcactggtttatatctccgccgtcgcgttgattggcgcgctctcttacattctgatggtgggcgatgtgaagcgcgttggataa

SEQ ID NO: 20657 - DNA, 519 bp, Escherichia coli
atgagcaatcttttacggacgggcgcggagttcgagaaaaagctgaaagagagagccgaatctacagagaaaatgctgaacgacgaattcagcaggctcggcgaatctgtaagcgaggctgtgacctcaaacgagacgaaaatcaaaggcgctatagcccagtttacggcctcgacggaggaatcgctgaaaaaacaccgggaaggggtgaaagaggcgatgatgcagcaccggaaggacatgttaaagctggcagggagttcgggcatgaggttgctggggatagtctttctcctgtttaccgcgagtggcgggacgctctggtatctcggcgggaggatacagacgaacctggaagaaatcagggtacaggaagagacattgcggaaactgaacgcgaagacatggggtgtggagtttgttcagggcgggggaagaaaatttctggtcattccgcaagggatgtcagcagaggtgacgcactatcaggggaaggactggatacaactgacggagtga

SEQ ID NO: 20658 - DNA, 234 bp, Escherichia coli
atgacagagctggaaacacatttgctgaacgccttagagcagctgcaacaggactatatgcagcggctgaacgaatgggagagcgccttcgtggaattgcagaagatgttttcgcttacgcaacgggacaacgcgatgctgaacgagcgggtcatgcagttgagtcagcaggtgcagcacttgagcgggcagacagaacgcttgagccagttatacagcgagaactggaaataa

SEQ ID NO: 20659 - DNA, 648 bp, Escherichia coli
ttgaaaacaatagtttatgttgatggctttaacttttattatcgtaagctgaaagattccaacaaaaagtggctgaacataaaagcaatggtcgaaaaattgctaccggatgatgaaataataggaattaactattacacggctaggatctcaggaaggattgattctgacgcacctcgtaggcaacaaatatatttcaatgcactgaaaagcatagataacctaagtatccattatggtactttttcggtgaatgaaagcagaatgtttttagtgcagcctcttgatttcaaacatcacttaaaaaacccgaatcaaaaaataaagtttgcaaacgtcttaaagacagaagaaaagggttctgacgttaatttaggttgccacttggttagagatggtttccaagggaaatacgagaaggctgtaataataactaatgatacagatttggctgaaccaatgagagtagtcaaatcagagctcagcctttatattgaactactttctcctgtaaacaaaccagcaagaaccctgagcgcaatatgcgataaggtcactcttataagcgaccaatcaatagctgatagccagtttgaagacgttattgtagttggtgagaaaaccgtgacaaaaccagcacagtggtag

SEQ ID NO: 20660 - DNA, 1533 bp, Escherichia coli
gtgccgcgcctcgccacatcccggcggcaagccgcgggatgcgcgccactgccgtccgcccacaccggttcgcggtacgcgcgccacgcgcccgagcgcacgctgctgtacgcgttggtagaggcgcactacccggacttcattgcacggatcgaagcggagggccgctcgctgcccgggtatgtccgcgaggcgttcgatgcctacctgcgttgcggcgtgctcgagcacggcttcctgcgggtggtgtgcgagcactgccgtgcagagaggctggtggccttctcctgcaagaagcgcgggttctgcccgagttgcggcgcgcgacgcatggccgagagtgcgcggcacctggtcgaggaggtgttcggcccgcggcctgtgcggcaatgggtgctgagctttccgtaccccttgcgtttcctgttcgccagcaagccagaagccattggcccggtgctgggcatcgtgcagcgcgtgatcgccggctggttggccgatcaagccggcatcgaccgcgccagcgcccagtgcggcgcggtgacgctgatccagcgtttcggcagcgcgctgaacctgaacatccacttccacatgctgtggctcgacggcgtgtacgtggaagccaccgagctgccgcggcgcgaactgcgcctgcaccgcgcccgtgcgcccaccaccgcgcagttgacccagctggcagctgccatcgcgcaccgggtgtgtcggcacctgacgcgcaaaggctggctcgaaggggagggcgaatcggccttcctggcagacagcgctgcaggcgacgacagcatggatgggctgcggatgagttcgatcacctaccgcatcgccaccggccgcgacgctggctgcaaggtcgtcacgctgcaaacgctgcccggtgacgccggttcgctggagggcgaagccggcaaggtcggcggcttctcactgcatgccggcgtggcggccgaagcacacgaaagccacaagctggaaaagctgtgccgctacatcacgcgcccggcgatcagcgagaagcggctgtcgatagcgctccagggcagggtgcgttaccagctcaagaccccgtggcgcaatggcaccacgcatgtggaatgggatccggtggatttcatcgccaagctggcggcgctggtcccgccaccgcgcgcccacctgacccgcttccacggggtgtttgccccgaacgccgccctgcgcgcacagctgacgccatcggggcgcggcaggcggcatgacgccgctgtggagccggcggacgcaagcgcgaacgacgcgccgcgcagccccgaggagaagcgccgttcgatgagctgggcgcaacgcctcaagcgggtcttttccatcgacgtcaccgcctgcgtccactgcggtggcaccgtgcggatcgtcgccagcatcgaggaacctgccgccatccgcgccatccttggccacttcgtgaagcagggcgcgcgggaagaagcgcactacaggcccgcagcgcgcgcaccgccagtgcaagccgcgtga

SEQ ID NO: 20661 - DNA, 342 bp, Escherichia coli; identical to SEQ ID NO: 20141

SEQ ID NO: 20662 - DNA, 132 bp, Escherichia coli; identical to SEQ ID NO: 20138

SEQ ID NO: 20663 - DNA, 843 bp, Escherichia coli
atgtcaaatacataccagaaaagaaaggcaagtaaagagtatggtttatataatcaatgtaagaaactaaatgatgatgaattatttcgcttacttgatgatcacaattccttgaaaaggatttcatctgccagagtattacagttaagaggtgggcaagacgctgttagattggtaattgagttctgctctgataaaaattatatccgtagagatatcggagcatttatactcgggcaaataaaaatttgcaaaaaatgcgaagataatgtgtttaatattttgaacaatatggcattgaatgataagagcgcttgcgttcgagctacggcaatcgagtcaacggctcagcgatgcaagaaaaacccaatttattcacctaaaatagtagaacaatctcaaattactgcttttgataaatcgactaatgtcagacgtgctacagcatttgctatttctgttatcaatgataaagcaacaattccactattgattaatctgttaaaagatccaaatggagatgtcagaaactgggccgcatttgcaataaatatcaataaatatgataatagtgatattagggattgttttgtggagatgcttcaggataaaaatgaggaagtccgtattgaagcaataatcggactttcctacagaaaagataaaagggttttatctgttttatgcgatgagttaaaaaaaaatactgtttatgatgatatcattgaagctgcgggtgaattaggtgataaaacgctacttcctgttttagatactatgttgtacaagtttgatgacaatgaaattataacttccgctattgataagctgaagcgttcatag

SEQ ID NO: 20664 - DNA, 699 bp, Escherichia coli
atgcaggatatccggcaggaaacactgaatgaatgcacccgtgcggagcagtcggccagcgtggtgctctgggaaatcgacctgacagaggtcggtggagaacgttattttttctgtaatgagcagaacgaaaaaggtgagccggtcacctggcaggggcgacagtatcagccgtatcccattcaggggagcggttttgaactgaatggcaaaggcaccagtacgcgccccacgctgacggtttctaacctgtacggtatggtcaccgggatggcggaagatatgcagagtctggtcggcggaacggtggtccggcgtaaggtttacgcccgttttctggatgcggtgaacttcgtcaacggaaacagttatgccgatccggagcaggaggtgatcagccgctggcgcattgagcagtgcagcgaactgagcgcggtgagtgcctcctttgtactgtccacgccgacggaaacggatggcgctgtttttccgggacgtatcatgctggccaacacctgcacctggacctatcgcggtgacgagtgcggttatagcggtccggcggtcgcggatgaatatgaccagccaacgtccgatatcacgaaggataaatgcagcaaatgcctgagcggttgtaagttccgcaataacgtcggcaactttggcggcttcctttccattaacaaactttcgcagtaa

SEQ ID NO: 20665 - DNA, 483 bp, Escherichia coli
atggtcaaccaatatattatggtaagtactatcagcaagtgtgtaacatcgttggagatagatcttaatcatcttgatgtgatcattaaagaattcgaactaccatcaacatggcaacccaaaggtgtgtataagcttattgttactacaactatgctcggtgggaaatatcatgtggatgatacatatgtagcggacaaatatgcattatctagtttttttcaacgaatacctggagtgatatatcaaacaaatgaaaatggaaaaatggcgaaaaatatcattgatgggtttgagtgttgcgaaggggaaatcactatcgataagtttatagattatctttcctctttgcccagtattaatgctgtacgtaaaaatataaaaaaattaacttatagtgttcgatttaatgaaaaattagtccatcacccttattatgattcttggacttttggcccatatattcgtaagggaaatgattag

SEQ ID NO: 20666 - DNA, 408 bp, Escherichia coli
atggaatttaaagatttaccaaaagaaatccagataattgctgcaacgacactcggtgatagtctggtgaaaattgacccggcatacaccaaaaaagaaaccatcgataatatggttcgtaatgtgcgcaatgctttttcagggctatatggttctgataatcaaaagcaggaaagcgatgttaataaacgggtaatttctgtttgcgtgaatggccatgttctttcatcaatcaaaacagaaacggcgacagtcttcgattgcctttgcattgtacagagccttgttgatgccctgtttcgttcagtgaatttagaaaatgatgcaaatctgcgagggcgcacaatagcacatccatatgcacatactttaggctctgtggatatcaaagatcccacaaatctttaa

SEQ ID NO: 20667 - DNA, 234 bp, Escherichia coli
atgttaaaatcaacgcttattgctaaatgcctttatcaaaatcgcatggtaagcagcatttcaataggcgagtctgcagttaaaagtattttcgaagagtactttcccgggcatgattttaataaatggaataccaaattaccgccagcagtttcaacgcgtattctgaaagcaactgaaagagcaagtacaattcgcgttaactatttcattaaagatttgtgggatctttga

SEQ ID NO: 20668 - DNA, 204 bp, Escherichia coli
atgaatactgctattgccctcactctgactgtttttcttaatactggcgagcctgttgacatggttattgacatttacggttcaatgaaagaatgcatggctgccgcagcagaacaaaaaatccccggtaactgctatccggtcgataaagttattcacatggataataacgaaatcccggcaggacttaaaacagcgccgtaa

SEQ ID NO: 20669 - DNA, 618 bp, Escherichia coli
atgcagtggcaaactaaactcccgctgatcgccattttgcgcggtattacgcccgacgaggcgctggcgcatgttggcgcggtgattgacgccgggttcgacgcggttgaaatcccgctgaattcccctcaatgggagaaaagcattcccgccatcgttgatgcatacggcgataaggcgttgattggcgcaggtacggtactgaaacctgaacaggtcgatacgctcgccaggatgggctgtcagctcatcgttacgcccaatatccatagtgaagtgatccgccgcgcggtgggctatggcatgaccgtttgccccggctgcgcgacggcgactgaagcctttaccgcgatcgacgcgggcgcgcaggcgctgaaaatattcccgtcatcggcttttgggccgcaatacatcaaagcgttaaaagcggtattaccgcaggacatcccggtctttgccgtaggcggtgtgacgccagaaaacctggcgcagtggatagacgcaggttgtgcaggggcgggcttaggcagcgatctctatcgcgccgggcaatccgtagaacgcaccgcgcagcaggcagcagcatttgttaaggcgtatcgagaggcagtgcaatga

SEQ ID NO: 20670 - DNA, 1116 bp, Escherichia coli
ttgtgtgaagcggtatgtggtttccgtcgtccgggccgtgctgaccagccgctcactgccgtcgtccgctgttacggtcagacggagcaggaagctcacgcccttcaccaccttcggcgtgtcccagcgcgccagcacctggtattccccgctgtctgcggtgacttctgcagtcaggtgctgcaccgcgggcggcgtgacaccgttcaccgttccgctctggtcgccgtcaaagtacgccccgttatccacgatggcttctttctccggtacatgctgcacggcagtgatggcatacgtgccgtcgtcgttctcacggatactcacgcagcggaacagtcgctggcgcagcgtcggcagcttcagcccccatacgctgtattcagcaacaccgtcaggaacacggctcacttttaccttcacgccgtcggtgacggactgaacctccacgctgaccggattgccacttccgtcaaccaggcttatcagcgtgataccggaggatggcagcgtgatttcacggtcgagcgtcagcgtccgggtctggctgttcaccgccagcacgcgaccaccggtgctgataccgacatagtcatcatcgcagatttcaatgacatcgcccggtacatggcgaagcccttcagcacccacgctgaaatccacggtctgcgtctccagcagttccgttttaatcagccacagcccggcgcggtgtgcctgcccccggctggtacagccaaaggcatccatcttcgtgacattacgaccgtaacgggcaatggcctgcgtatcttcaacaagctctgtcgccgtctcccagccgttgtccgggtcaatccagttcacctcaacggcattatggcggtccttcagggcgctgaagctgtagcggaacggcgcgccatcatccggcatcaccacattactgcggttataggtccacaccttatccgacggtcggtcctgcacgaacgtcagcgtctgcccgttccataccggcatacagcgcatcgccgagcagaaatcactgagcacatcccacgccttgcgctgtgtggtcaggtacgcattacaggtgatgcgcggctccgtgccgccaaagccgtccggcactga

SEQ ID NO: 20671 - DNA, 132 bp, Escherichia coli
atgttcatcgctggcttaaatgtatcaaagacggcatttttccacctgaaatttatcaaccattcgatgcatatggcgctggtggtattcctgtctggtctaaaaaattgtatgagtcagctggttcgttaa

SEQ ID NO: 20672 - DNA, 879 bp, Escherichia coli
atgacagctcgctacatcgcaattgactggggatcgaccaatctgcgcgcctggctttatcagggcgaccactgcctggagagcaggcaatcagaagcaggcgtcacgcgcctgaacgaaaaatctccggctgcggtgttagcagaagtgacggccgactggcgtgaagaaaatacgccagtggtgatggcaggaatggtcggcagcaatgtcggctggaaagttgcgccgtatttatctgttcctgtccgtttttcgtctattggcgaacaattaacgtcggttggcgacaatatctggattattcccggattatgcgtttctcatgacgataaccacaatgtgatgcgcggcgaagaaacacaattgatcggcgcgcgtgctttggctccttcctctctttatgtcatgcccggtacgcattgcaaatgggtgcaggccgatagccagcaaatcaacgattttcgcaccgtaatgaccggtgaattacatcatttactgttaaatcactcattgattggcgcaggtttgccgccgcaggaaaactctgccgatgccttcgcggctggccttgagcgtggccttaatgcgcccgccatattgccgcagctttttgaagttcgcgcctcgcatgtgctgggaacgcttccccgcgaacaggtcagcgaatttctctctggtttgttgattggcgcagaggttgccagtatgcgcgactatgtgacccatcaacacgccatcacccttgtcgccggaacatcgctgaccgcgcgctaccagcaagcctttcaggcgatgggttgcgacgtggcggtggtggcgggcgacaaggcatttcaggctggtataaggagcatcgctcatgcagtggcaaactaa

SEQ ID NO: 20673 - DNA, 810 bp, Escherichia coli
atgtactggattattaacgataatatcgagttctggcctgagcaccgaaaattaatatcggtacataacgccgatcttaacgtcgttctgacaacgccagccagtcgttgtttatcacttctacttgaagcttttcctgatgtggttgcacaacaagattttttcaccagagtctgggaagaagaaggtatgcgtgtgccaactaacacgttatatcagaacatatccattatcagacgcggatttcgcgctgttggtgataccacccactcgcttattgcaaccgtgccgagaagaggattcaagattcataatgacattaacatacaaaatcatgcaataaactcttcaacagacgcacatacacacaatgccccacctgccgtaaaaggtaatgcggggtacaaagagagcattggtggcgcaaacaatttcaataacaaaatcctcaaacatataaaaagttatctaattatgttgagcatatttgctataggcgtatattctgcacattggctatggaataataatcaaccgaagccattcttcaaggattacaagactgttgcggaaattaatggctgccattttaatgtgacagaagatacaattgatgggttgaaagagttcgataaatataagacacggatactggattcggggattaactgtaaaaaatatccgtggttatacttccctcttgcaaaatcctcaccagggatgattgttatggcatgcaataaaaactataaccaacatgaagtggcaggctgtttaaccctgtcttaccgtgaggctaatcgtgattga

SEQ ID NO: 20674 - DNA, 279 bp, Escherichia coli
atggcacgcaacgcaaaatattacaatcataataattcgaccgttcttgcctgcacgcacgagcggtatcctcacacattcaaatctgactggtatcagcacgacccctgcaccgaagaacaggtcgagtggctgattcagaactaccgcagacgtgggtatgagtttaggaaagccctcagcctcgattatcgtctctggataatctacgtcagactcccttattccgaacgcccaccgcgtccgtcccgcacattccagcaacggatctggaggtaa

SEQ ID NO: 20675 - DNA, 384 bp, Escherichia coli
atgggctgtcagctcatcgttacgcccaatatccatagtgaagtgatccgccgcgcggtgggctatggcatgaccgtttgccccggctgcgcgacggcgactgaagcctttaccgcgatcgacgcgggcgcgcaggcgctgaaaatattcccgtcatcggcttttgggccgcaatacatcaaagcgttaaaagcggtattaccgcaggacatcccggtctttgccgtaggcggtgtgacgccagaaaacctggcgcagtggatagacgcaggttgtgcaggggcgggcttaggcagcgatctctatcgcgccgggcaatccgtagaacgcaccgcgcagcaggcagcagcatttgttaaggcgtatcgagaggcagtgcaatga

SEQ ID NO: 20676 - DNA, 300 bp, Escherichia coli
gtggcagagctgaaagaggagcttgatgacacggatgaaactgccggtcaggacacccctctcagccgggaaaatgtgctgaccggacatgaaaatgaggtgggatcagcgcagccggataccgtgattctggatacgtctgaactggtcacggtcgtggcactggtgaagctgcatactgatgcacttcacgccacgcgggatgaacctgtggcatttgtgctgccgggaacggcgtttcgtgtctctgccggtgtggcagccgaaatgacagagcgcggcctggccagaatgcaataa

SEQ ID NO: 20677 - DNA, 1257 bp, Escherichia coli
atgaaactaaatgcccgtcaaattgagaccgccaaaccaaaagagaaagcctacaaactcgctgacggtggcggtctgtatctggaagtaaccccgagaggctcaaaatactggcgtatgaaataccgccgtcctaatgataaaaaggaggaccggttagcttttggtgtatggccgacagtcaccctttctgatgccagggcaaaaagagatgaagcaaagcgctttttatctgcgggtctggatcctaaggagcaacaaaggggggcacaggcagaggctgacggcgcattcacctttgaaacgattacaaggaaatggcatacgggcatgttgaaacgctggacagaaacccacgctaacgccgtattaagatcccttgaacaatacatttttccccatattgggaactctgatatcagaaagctcaccacccgccaacttctggccgctgtgcatgaagtagacgcaacagcaaaacatgatatagccaagcgattacgccagagaataacctccgtcatgcgctacgccgtgcagaacggtcttatcgactcaaaccctgcgctggatatggccggcgcgctgacagcagctaaagtcaaacatcgccccgcgctaccccctgcccgtataccagaattgctctcacgaatagccgcttaccgagggagagcattaactcgtctggccgtagaaatgaccttgcttactttcgtgcgttcaagtgaattgcgatttgcacgttgggacgagttcgatttagcgcgggcagtgtggaatatccccgcgcagcgggaagcggtggagggagtccgctattcctggcggggtatgaaaatgaaggaaccgcatattgttccgcttagcaaacaaatgctcaaaatactggagcagatacagaacctatgcggcgacagcgacaggcttttcccaggagatcatgatcctcgtaaggtcatgagtgaaaatactgtcaacaaggcgctacgccaaatgggttatgacacccaaacagaggtctgtgggcacggattcagggcaatggcgtgcggtgctttagtcgagtccgggagatggtcctatgacgccgtagaacggcaaatgagccacgcagaaaggaacgatgtgagagctgcatacacccacacttcggaatatctggaggaaaggcggttgatgatgcaatggtgggcggattatctggatgctaacagggagtcttttgtaactccttacgacttttcactcatatag

SEQ ID NO: 20678 - DNA, 552 bp, Escherichia coli
atgaaagatattacaaacatcgccgtgactggcgaagatggcgtggtgacgtatgccgatggcagcaaagaagggttcgagtgcagtggaaccgttgcaaacatcattgcaagtcttgcaacgacacttgagaaagaacgcacaatgcgcatcgccaccggtgaccgcctgcgccgcatgtacactcgcgacagcgatatggtttcccgcggtctgagtggcgctccttctctctccacagcccccaccgcaatgaccgccgagtttatgcgcctggtacgcgccgtagcgccgaaatatgattcagccctgcccgacgccgacccgcgcctcgtcgcgctcgatgtgctgcgctacgcccctgctgaggcgttcagcgccgtacaccctaccccaatgtcagaaattcagctggatcaggctatcgacgtgctggagcaggtaggtgactacatgaaggccaacaacgtcgaaccgaaggttttcaacaccggtgacgccatccgcagcattaacgccgacaacgccagtttctggggcaaaaaacactaa

SEQ ID NO: 20679 - DNA, 189 bp, Escherichia coli
atgtctatctatgacccgaaattagctgcaggcaacacacagagcggccgccgccagatgctgacccgtcaggaccttgaggcggcaaaggcacgtaataacttcgatcgccagagtcgcagcctgcagcaactcaacgaatcaaacgcacagttctggagtgaacaggatgaaaaagccaaacgttaa

SEQ ID NO: 20680 - DNA, 168 bp, Escherichia coli
atgaaaaagccaaacgttaagccggtcctgctgtctgccgagcagatgcaggccatacgcaacattcaggaacgcgaacgccagcgctccgatctcggcgtcgcccccaccgttcaccagattgcccgcggcctcatggctaaggcgctggcatcaattcaggaataa

SEQ ID NO: 20681 - DNA, 264 bp, Escherichia coli
atgacgctatcagatgcagaaggtcttgtacgcattaacggcgaattagttacgagccaaaaggttaaatatcttggtgcccaaggtgacgaatcaaaggctgtttggaatatgggcctgatgccagcgcgtgacgggaacaattacggctttgagttcgttaagcgcaacggtaaatcgttcctgaacgtccagctgctgcagaacagcatggacgcgccgaaaatcatcggatctttcccgtgtaaaaaagtgcaagattaa

SEQ ID NO: 20682 - DNA, 201 bp, Escherichia coli
atgtataaagacttgccaacggatctgataaacatcaaagaagtagagaaaaccacgggctttaagaaatcggcgatttacctgcgcatcgggcagggtactttccccagacaggtgaagttagggagccgaacagcaagatgggtgcgtggtgaggttgaggcctggaagcaggagatgataaaccaaagggacaaatag

SEQ ID NO: 20683 - DNA, 210 bp, Escherichia coli
atgacaaaacccggtgaaacagatgatgatctgctcactccagacgaggtatgcgggattctacggataacccaaaagacactttgtgaatggaacaatacgcaccggtaccgccagctgctggcgccgatccggttttctgcgaaggtggtgcgctatgaacggcgcaatctgaaagcgtttatcgataaatgccgtagccaatactga

SEQ ID NO: 20684 - DNA, 1113 bp, Escherichia coli
atgtttaattcagagcgtttacgtatagccagagaacggagaggcctgacacaaagagcgttagctgaagctacagagttgaccagtaagacgatttcgaactacgagaaagcagggatctttgacgccatagccagcgatactatggaacggatttctgctgttctgggctatccgatcgagtttttccgcgacagggatgtgcctactctgtctccagaggccgttagtttccgtgcaatgacaaagttaacggcgcagaaaagggactcagctctcggagctggaaagctcgcgcaagagctgtcagcctggattgatgagcagttcaagcttcctaaacctaatgtgcctgattgtagtttcgatggttattctgagcctgaacgagctgcccgagcagttagagagagctgggggatcggtgaattatctatctccaacctgatccatctgcttgaagcaaatggggttcgcgtgttctcccttgctgaaaattgcgttgaggtagacgctttttcgttctggatggatgaaaaaccttttgtgcttttgaatacgatgaaaacaccggagcgtagtcgatttgatgcagctcatgaactggggcacctggtcctccataaacattcaactaacaacggccgccaggctgagctggatgcagaccgttttgcatcagcatttttgatgcctgagcgtagtattttggcctcagttccaaggatgccatcgctcgatttactcatctcgctaaaaaagaactggaaggtatcattagcggctctagtccgtcgtacgttcgacgtcggtttatctaccgaatggcactatcgacagttatcaatagagctggcccgtcgagggttccgcaccggcgaacctcagggaatggaagaacgagaaaaatcattagtactggataaggtgttttcagccctacgcagcaaaggtgttaaaaggggagaaattctcgagcagttgaggttaccagcggacgaagcgagtgcacttactttcagtaacagcttctttatggaagctatcaatggtgggaaactgtgcacccaggaatcggggatacgcccgtcacatttacgtttagttaaatag

SEQ ID NO: 20685 - DNA, 720 bp, Escherichia coli
atgtactctcataatctctcaaaaaccattgtcttggcagatccggacgatgttgaatcctacctgcagcccctgaacctgagtcaaagcgatctcgggcgtattcttgaacgtggcttgtctggccgttattcgactactcagaaccaccctaagacctcacgtgggcaatatttttatggcgagggggtgagtgctgcccgggacattctggcaccgaaaggctacaaacggctgtccctccgcaatgttgaattgactgtaagcgataaagttgccctttatctctgccggggttgcgatcagacaggcttggttcatgggtttcctgagtctcgcatgaagaaaggtgatttcacttgtgagctgatggggttaatccataataacaccccaggtcagggtgagcttatcctggatgatagccagcttaagctggatttagacctgccggaaggtgatgtgattcccctgttaccgaacaaaatcggactggacttatggtttttactttacgatttttatgaacttgacggggatgagcgcgtggggatccgggcggagctttcacgcccgatttcatataatagcaagaacgtagttaatgacttctccacccgtttaattcttgatgttcatcaacctgacccgattgttcagaacggtgatgtaccgcagtttacaccggatatcgatcttgacattttaaaaacaggctaa

SEQ ID NO: 20686 - DNA, 720 bp, Escherichia coli
atgaaagcagatccgatccctctgatttaccctttcgaaaatccatcgttgaccgctgggctggcggcaatcaacgcaaccacgcctttattcaaaaccgaggccaaacaccttgaaacatggttcaaggaaggtgttatcgcccgttatatgctggtggacgacatacgggagtcatggaaccgtgaagggctgggagtattttttgatttgattttcggagaggcaaaaggctgcaggctgattgcttcccgccgggaggggatggagtggagtcaactaaaaggcgatgaaataccgacatattccgtttatgccgttgataccgccgaggcgctgtatgcagaggaatgcgaagaaaacagcccccctgcacgcaatctcaacaaagcggcggtatcccgcgatctggctgctcttgaattaccgatgccagaaccggtactacctcgctacgaagcgcagaaaatttacgcgatgatccacggccttagcacaccggaaaccgcgccaaaaaaacaggtaactgagcgagtaaccgcagtccagagcaaagctattgtggagttgctcacggcccacggattcactgccgaggactacaaaggcacaatcccggcattgcagcagaaactgaccagaaagggtctgaacggaacgctaaccagcgttgataaaaatgcgcttactgcctggctaaagaaagctggcgttcgctaa

SEQ ID NO: 20687 - DNA, 213 bp, Escherichia coli
atgaaacaatctcttatccgcttacccgaagtttgccgcagaactggcaacggtaaatcctggacttacaaacaaatcaaagaaggccgcttccccaaaccagttaaaaccgggttccggtctgtggcatgggtagaaagcgaggttgacgcgtggatcgagcagcgcatcacagaacgcaatactggctatgctggtggcgcaaatgcttaa

SEQ ID NO: 20688 - DNA, 195 bp, Escherichia coli
atgtcaacaataatacagcgtgataaacagcccaaaggcgggggaaaggcacctgctttccaagtgaggattgccccagaattgaaagagcaattcgaagccgccgcacgagatgcgggtatgagtttggctaattggatgaaaaccttgggccgcaaagaactccagcggctgggtattgagccgaaagcctga

SEQ ID NO: 20689 - DNA, 201 bp, Escherichia coli
atggctggattacagcatacccaaactcaccctaaatatcagtatcgttttatggcgctcgatcgcgcagaccgccaggcgaaaccctgcaaaatcattgtcgaggccaccagcgagcatgaagcacgcaaagtgcttgcccctcactacatcctgtcactgtccgccgttctgccggttcaggaggtgcgccatgcatga

SEQ ID NO: 20690 - DNA, 210 bp, Escherichia coli
atgcatgagcgcgacattctggacgtgtacaccaacccaaaagatattctgcgcccgatagcggccgctctggaagctgcgcagtacatcgcacttgacccgaacgggaaagatctggccgctgaccttattgcatgggcgcatgaaactgccgctcacgcagcaacagcgcatcgcagctccgtcgagggggagggtaaacatgcgtaa

SEQ ID NO: 20691 - DNA, 180 bp, Escherichia coli
atgcgtaattccctgcatccggtcattcttccgaagctcaaagtgctgtcccgtattgatgaacagcgactgacgccataccagcgcggtatgtatcacggtctgtctgaaatgcttgaacaggtaaaagccgcaatgatgcgtgcaggtgtggaatatcaggagggtaaaaatgcgtaa

SEQ ID NO: 20692 - DNA, 309 bp, Escherichia coli
atgcgtaatctcaatacctggaatcttttcacgctgccgctgaacggtggcgcagctgagacagcgccggacgatctgcgtctgctggccgctgtgggtgacgaggctcgcaacgactacctgcgcggtgtaagcgctatcggcaatctgatcttctgggcgtgcgataaccccaactacaccgaccataaagccgatatgccggcgctgggcgcgttcctgaaacataccgctgatatggcgcgcgccgccgagttcatggcggggcatctggacgcactggccgacgacaaagagggggacgaataa

SEQ ID NO: 20693 - DNA, 222 bp, Escherichia coli
atgccacgcaaacatcgttcatcaagcaacctgatcaagctaatggagcgtcagaagggtgttgggcgcgacgatatccagaccgcaagcagccgctctacggtaacgccgcatgagcccgacggcacctacgccacgaaccgacatacccgccgtatgctgcgcaagctccacggtatcgaggcgaaaagagtgtgtgacctgaaaggaggtcagaagtga

SEQ ID NO: 20694 - DNA, 2415 bp, Escherichia coli
gtgagtggattcgatcacctgatggacaaggggccaaaaacagcccctgcccgttttactgcaaacagcttttctgacctgtgcaaggccattctatcgcaccgtgtgcaaatttccatcacagcggaaatgagcgacgaagaacggcgcaaggaaaaacagaaattgtactggttctcggcaacaaccctgcaggacgggcagcgacgtaaacccgaaaacatggcgccgtgcgccttcggtatgctggacatcgacggcagcacccccggtgcaatcacagcacttataccggtgttccggcaatactcaatgctggtgtaccagacggcaagccatacagcggacgaacctcgcctacgtattgtttgcgagctttcccgcgcggttgaatctgacggccgccgcgcgacaggtgaatccgtagaaactatgttgatgcaggatgccgggttttcattcgccagcctggcgggtaagaaagcacgctgggagaacggcagcgattatgttgtctttgaccgcaacgtatacggcgctcaaagctattgctactgtccacacactgacgcaaaagcccagaactacgcaggcgcggtgatcgacatcgaggcgttaccgaaacccgcccagccaccagcgaaggcagtaaaaaacaagccgaagaaacagcgccagcgtgatgctgcaattcttgatatcgcagattttgacgatctgaacgccggaccggataacttcattatcgccgacctgcgcagcgcgctctggtttcccgccatgctgcaaaaggcatgggacaatggggcgtggattgagcagggctatcgtcttgcatctctcaaaggcaccgattttgaggacgacgcgcggcagctgtggatcgagtggtcattgaccgcggcggatggttggccggatgaagaacttgatgaagtcgcggcacaacgctgggatagtcttgcccctgacaaaaccagctataaagccatttttactgatgctcaggcgcaggggtggaacaacccaggcaaatggcgtgcgaaagccgcttatatcggcgatatggcgcccagcacgcgcggtgaactactggcgcagtattacggcaacgtatgtcttaaagctgatggtaacatggtttatcgctataccgggcaggggtgggagcacatcgccgatgccgagctgcgtcgccagctttcgcagattttccaggataacaaagtgccgtttaatccgaacgaggttaaaagcgcgattgaggctatgggaatgcttctgcctttaatgggagaaacacctcgtaaccttattggctttgccaacggcgtttacgatctcgaggcgcagcgattccgcccccactgcccgggcgactggctgaccagccataacggcgttgaatatacgccgccggttaaaggcgagaccctgaaaaacaatgcccctaacttctggcgctggctgcatcattccgcagggggcgacttcgacaagatggagagaatcaaagccgctctgtatatggtgctggccaaccgctacgactggcagctgttcatcgaggttaccggcgctggtggtagtggtaaaagcgtgttcacgggtattgctcgtatgctgacgggcgaactgcacgccaccagcggcacaatggaggacatggacacagcacgcgaacgtgcatcttttgtcggcaaaagcctgatcaccctgcccgaccaggcaacgtatacgggttccgggccgggaatcaaggccataacgggcggcgacgttgtaaggatcgacccaaagcacgaaaagccattccatacggttattcgcgccgttgtcatcgcaacaaacaacgagcctatgcgtttcaccgaacgacaaggcgggatatcgcgacgccgggttattttcccgttcaaccatgaggtgccggaggcagaacgtgatcaccacctgctcgataaaattaaagccgaactgccggtaatcgtccgtggtctgctgattgacttcaaacagccaggcaaagccaaggcgctgcttatcgcgcagcgtgattcagcagaagcgctgcaggtgaagaacgacaacgacccgatgtatggcttttgctcctacctgctgggtttgccgaatcctgagggcatgtacatgggcgacgggcgcatggcgcgggagccacgcatctacctctatcatgcttatctggcctatctggaagcctacggttatcagagaagccccactctgccgaagttcagcggagatttacgggacacgctcaaagcctttggtgttgtattggagaaacatccgacaaaaaaaggatacagatataacgttaacctgtcaggaaatgcacaagaatggttgggagaagacgaactctcagttgtgcccgacacattgcagtaa

SEQ ID NO: 20695 - DNA, 411 bp, Escherichia coli
atggttacggttgatgaattaaagatgaaatatccggacgcgaatgcctggcaaatgggcgacagccctgaactggctaacgagcttgcagcgcttatcaaaaaaggaattaaaacggcctcctgcggctcttatgcctcttaccagaaggaagagtttgccccaaggattgggagctataacatcatccttaacggccaagatgtaccggtatgcgtgacccggctggtgtcgatgcgactggtgcgtttttgtgatgttactgccgagttcgctcgcaaggaaggtgaaggcgatttgagtcttgaatattggcagagagagcatcaacgattttttacatgtgaaggttacttttctgatgatatggagctgattatggaagagtttgaagttgttgatgttttgtaa

SEQ ID NO: 20696 - DNA, 963 bp, Escherichia coli
atgccagtattagacttcaaagaaataccagaggctcataaagcaacagggctgcaagacacatttgaacttttttctcgcgacttcttagcttttctgggatataaaattatatctgacccagatagaggggctgacggtggggttgatattatagccgaagaaaaaaggactggtgtcggcggggaaacaattatccgttggttggtaagctgtaagcataaagctcatagtggaaattcagttaatccaggagatgatgcaaatattactgatcgagtaatagcgaataactgccaaggatttatcgggttctattcaactcttgctagtgcaggtctgtctggaatacttgacgggttgaaaggacgaattgaatttcaggttttcgataaagagaaaatagagagggaacttttacactcttccagaggattggaaattgccgaaaggtacttcccaaagtcgttatctgagtggaaaacagaaaaccccaaacccgcaagaatattttccgatgaacctagcttaaaatgcaaagtttgcaagaaagagcttctgtctcaagacgacaagggaattatcactatatggcaaagaatccgcaccgactacgaaaaagaaccagagtataatgaacatattttttggacgtgtcgaggcaactgcgaccaagcactccggcagtatgttagaaaacaaacaaacaatggccttattgatggctgggaagatatagctgatgtaatgatgccaactgtgtttataaaatgggtcatgacaataatgaatgagttaagatctgggaccctatattcagatgaggcatttgacgaactcaagacatttttgatcaatatttacccatttgcatgtcgtcatctcaccgaaaaagaaaaagaaagggttaaatcattaatgatgataccttcgtatcttggcggcatgaactatgaaggttaa

SEQ ID NO: 20697 - DNA, 813 bp, Escherichia coli
atggggcatgctatgatctttctaagtcataatcaccgtgacaaaaggtttgtaagtgttatagcggaaaaactagcagatgtttatgggcgtgataacgtattctacgattcttggtctatccaacccggagagggtattattgacaagatgaatttaggaatggagaatgtatcgttctttttcttttttgtcacagaaaatagtttggcaagtaacatggtaaaaatggaatggcaaaatgctttaattaaggcatcgtccgggaagtgtaaatttataccaatacgttgccagaatatatccttgcctgctctgcttactcaaacgctatatattgatctttattcgtatgggatcgatgtggcaataagacaaattatagatgtcattaatcaacaaaatacgtatattcctaatcctgagaagtattcaaacctctcctatgatattaaggatggtgatgggggtaagatagtgaaattatcagcaatggattttttagaaccaattgctgattttatgatgattatggataatacaattaagcatgatgatgttgttgttatggtcaatggagaaagcacattcactcaggggtttattgaaaatgcatctttagaaaatggtatgaaagtaagtggtgccactgttggcctaaatcgggggttaacaccaacgatgccaatgtatgtttctcttaggttaaaggatggttcacctttgaatatatttgcggtgctacatcgagtaagtaccgagcgttatgctcctataccacataaagccgatgatgcctttagagtaaaataa

SEQ ID NO: 20698 - DNA, 573 bp, Escherichia coli
atgttcatcctgccacgcatggtacgcatcctgatggaaggtttattaccgctgtctgaagccattaaaaagtatctcaatgccaaataccctgaccgtgacgatctctatatcggcctggatatcgccgttgccgtaggtaacccggcgattatctccaccgccctgctgctgacgccaatctcggtctttatcgcgtttgtcctcccaggtaatgaagtcctgccgcttggtgaccttgccaacctggcggtaatggcgtcgatgattgctttagccagccgtggcaatattttccgcaccgttctggcggcgatcccggtgattattgccgacctgtggattgccactaaaatcgcgccgtttattaccggaatggcgaaagacgttaacttcaaatttgccgaaggctccagcggccaggtttccagtttccttgatggcggtaacccgttccgcttctggctgctggaaatcttcaacggcaatctcatcgccattggtctggtgccggttatcgccctggtactgtatggcattttccgaatgacgcggagcacggtttatgcctga

SEQ ID NO: 20699 - DNA, 606 bp, Escherichia coli
gtgggcggtttcgctctggagtggctgcgcaacacgttccggctaaccgatgaggagatcgccgcatcacttactcgcggacatgcggattacctggcggggaactggtcgctcgatgacattcccgtttttattccgcatcttcgcggttcgggttcgccctataaaaatcgccatacccgaggattattttatgggcttggcgatacgttaaatatcgatatgttaattgccagcgtctcactgggattaaccatggaatttgccaactgcttcgcctgttttaatgtgcccggcaccagcgcgttaaaagtgataggtccggcaacccataatcccctttggctgcaattaaaggcggatattttacagcgtccggttgaagcaattgcatttaacgaggcggtttctgtcggagcattattaaccgccgcaccggatattccaccgccgcaagtcaccatagcccaacgtttgttaccgaatcgggcgagataccatcaattacagcgttatcagcacaaatggaaaagctggtatcagttgaaattacagcaagaaggcgtgatgccattacatcatcgggaggagcactatgttgagtaa

SEQ ID NO: 20700 - DNA, 714 bp, Escherichia coli
atggcgaccgccgggattttaaccatacgtgcagcaaatactccagaacaacacgttcaagcggtttataaagcggaacaagatataaattctacaaaaaacacaaataactctgcctctactgtgaaaggggagaatggtttttgtattttagcaagtatttacaatagtgcaagtgatcaatatattcaaaactaccaagctatagtttttgatgctgttccaaatatcggtgtaaaacgtcaagctgatgttactagctaccctgtagaaaatggtgctaatgtatcggatcacgttcaagttaaaaataatactttctctttatcaggaatgattacagagacacctgtaagattgatgcgagatatgctatatagtgctggtgttaacggtactcgtattagtcaagcaatcacttacttagataaaatatttgatgaaagacagcctatcattttaataacagaacataaggtgtatgagaatgttattttgaaaggcatatcatatgaatatcaaacagaatatgcaatgcaatttgacttggaatttgaacaaataagattagtttcttatggcactgtaaacactgtagctatcaaaacacagccatctaagaacatcggggctaatatgaaaaaacgtgttaacactgaaaaatcaagtagtgaaggtgaagacactattactcctgcctttaaacaggaatag

SEQ ID NO: 20701 - DNA, 228 bp, Escherichia coli
ttgagcagaaatataataaggcctgctccgggcaataaagttttactggtattggacgatgctactaatcacaagctcttaggtgcccgggaacgtagtgggagaacaaaaactaatgaggtgctagtcaggttacgtgatcatctgaaccgttttcctgacttttataatctggatgcaataaaggagggagcagaggaaactgattcgataattaaagatctttag

SEQ ID NO: 20702 - DNA, 747 bp, Escherichia coli
atgacaacggataacacgaacacgacacgtaacgattcactggctgcacggaccgatacctggttgcagtcatttctggtctggtcacccggacagcgggatatcatcaaaacggtggcactggtgctgatggtactggaccacatcaatctgatattccagctgaagcaggaatggatgtttctggccgggcgaggagcctttccgctgtttgccctggtgtgggggctgaatctgtcccgtcatgcgcatatccggcaaccggccattaaccggctgtggggatggggaattattgcccagttcgcatattatctggccggctttccctggtatgaggggaatatcctgtttgcctttgcagtggcggcacaggtgctgacgtggtgtgaaacgcgcagtgggtggcgtacagcagcggccattcttctgatggccctgtgggggcctttgtccggcaccagttacggcattgccgggctgctgatgctggcggtcagttaccgactgtaccgggcggaagacagagcggaacgtctggcgctgcttgcatgcctgctggccgttattccggcacttaaccttgcctccagtgatgcagcggcggtggccggtcttgtaatgacggtgctgaccgttggtctggtgtcgtgtgcaggaaaatcattaccccgtttctggcccggggattttttcccggtattctacgcctgtcatctggctgtgctgggcgttctggcgctgtga

SEQ ID NO: 20703 - DNA, 279 bp, Escherichia coli
atgaaaaacaataccgcacaggcaacaaaagtaattaccgcgcatgtgccattacctatggctgataaagtcgaccagatggccgccagactggaacgctcccggggctgggttatcaaacaggcactttctgcatggcttgcccaggaggaggagcgtaatcgcctgacgctggaagccctggacgatgtgacatccggacagattatcgaccatcaggctgtacaggcctgggcggacagcctcagtactgacaatccgttaccggtgccacgctga

SEQ ID NO: 20704 - DNA, 276 bp, Escherichia coli
atggaactgaagtggaccagtaaggcgctttctaatttggcgcggttatatgattttctggtgctggccagtaaacctgctgccgccagaatggtacagtccctgacacaggcaccggtcattctgttaactcatccacgtatgggagaacagttgtttcaatttgaacccagggaggtcagacggatttttgctggcgagtacgaaatccgttacgaacttaatggccagactatttatgtattgcgcctgtggcacacacgagaaaacaggtag

SEQ ID NO: 20705 - DNA, 735 bp, Escherichia coli
atgtacatcgacaattcagcactgaccttacgagagtttttcatcaagctaaaagcacaacaaccatataacattacggtaaagcgtgctttattacaaatgtttgaattagagggttctaaagataataaaaccatcttatgggataagatttccaaaatcatgagcttgcctaaaaaaatagataacacattaaaagaccactttccagaagatgaaatcactgccccacactggaggcccagtgttaatgattttttcgaaaacttaaatctgggagaatctctgtcccattccctccaaagaatctctgataatgccataaatgaattagggatgatatcagtcctattcaagaccaaaggtcagattggaaaacttaaagatgaacagttaattgaaataaaggagcaattattagaactgaaggaatccataattaattccgacttcccaatcaacctaaaaaaagaaatgttatattacattgacaacatgattagagcttttgaagactatgaaataactggtattgagccaataatttcagcaacagaagccacaatggggcatgcttgtatgtctgagcaatttaaagatgtaataactacgaccgaagaaggctcaaagctaaagaacattctgaaaaagacaatcacatcaattaatagtattgaaggcattgtaagccttggagccaatggaattacacttctagaatttttgaataaatag

SEQ ID NO: 20706 - DNA, 372 bp, Escherichia coli
atgccagcacaactctatcagtctccaacaggggatgagcttgaaatcattccattatccgatatcagtcgtttcggtgaagatgtgaagctgaaagttctgtataaaacgtcccctcttgccggagccactctggagcttgactctgtcagttatctgaaatcatcccgtcacactcatgcaacagagcataaacattcggctcataaagcagaacttacctttgtaagtaatgaggacggtatcatcactataccttcccttcatgccgggcaatggctggctaaagtcaaaaataagaaagtatttccggacaagagcctgtgtgatgaaactgtcgatgtggcaaccttaagcttctcccgaaattaa

SEQ ID NO: 20707 - DNA, 345 bp, Escherichia coli
atgtctgaaagacatttacctgatgaccagagcagtactatcgatccatatctaattacctctgttcgccagactctggcagaacaaggcgcagcattacaaaacttgtctaaacaactggattccgggcagtaccagcgtgtccttaatttgataatgaactgtaaagggcacgttattctttcgggaatgggtaaatcagggcatgtcggtcgtaaaatgtcagcgacgctggcctctacgggtacgcctagtttctttattcatcctgcagaagctttccatggcgatcggcgatgcgctggcgattgccatgatccaccaacgcaaatttatgccgaatga

SEQ ID NO: 20708 - DNA, 264 bp, Escherichia coli; identical to SEQ ID NO: 13536

SEQ ID NO: 20709 - DNA, 549 bp, Escherichia coli; identical to SEQ ID NO: 7933

SEQ ID NO: 20710 - DNA, 543 bp, Escherichia coli
atggcaatccctgaacgtatgatccccgtaaaagtcagcagcaaaaaaataagagaattagcacagaaagctaaagagatacttgcagctatagatagtggagcaagtgaagaagatgcttttttaaaggacatgatcgatgactggaacagtcaggtagtatgtccatgtgagttttcagattttagagattattcctcttggacaaatgcaaatgaatttacacgaatagcttttaatttggaaaagttctacgaggattttacttgggaggaactggttcaaacgataagctgtgtatgtgatcaaaagtcaaacgaatcggaaaaaatttttgctcttttgttgcttgaaaagaattttcatggaaatccatccgatcttatattctggcccgatgaatggtttcaggatccagatatgttagatgttgaactgagtgttgaagagattgcatgctatttgatggttcgatccggtaggcaactagttgatgcacctgaaatcgacctgaaatatcaaataccccagtctgacgaataa

SEQ ID NO: 20711 - DNA, 1350 bp, Escherichia coli
atgaaagagatatttcccgatctcatttctaaatatccaaatcacaaatacttgtttattacatttacagttaaaaatccaaagttaaaaaatcttaaatctgtattgatttgtatgtctcgcgcttacgctaaaatgtttcaacgtaaagcgtttaaaaaatggtttgtgggtgatattagatcgacagaaatcacgcgaggaaatagcggagaggatgaagcgcacccgcattttcatgcgttgatctgtgttcatccaacttattttaaaggctctaactatatgagcgccgatgtttggggcaagaactggggcgagtgcttagagtctgaattcaaaaaagaaggcttagaatataacgccgctgattatccaaagggtttccctcgcgtggatattcgtcttgctaaatctgctgatagaaaaacagacattactaatcaaaatatcagcgaacacggcgagcagcttataaactacgttttaaaatatagcgtcaaaggttcggacttgctgaaaaatggaaaggctgataaatggttttgggagttcgacaagcaagtaaaaaatattagaatgatagcggcaagcggcgatattaaaaaatcactcgctaaacttgaacgcgatcagtttgattattataaagaacaagaaaagatagaaaaactaatatctgacgatgtgaactttaaagcagataaagcagtctttaaaaaagaggatgaatataactattatttagaaagtaaaaaagataagtttcaatatatcattgaagcgattgaagctaaagcgtataactatcagtgctattataaggcgttattatctgaccatcttttagcttttagatctggtattgatggcatcattgaaaactttcgcaaaataaataaaacaaaaacgagagaagattttgaaatattggaagcagcagagcaggagcttgtaaaaatacaatgcgaaagaatagaacgcttgcgctttatttgtgatgcgcttgtaagagtcggtttatataaaaagatgtctgattttgtgtatataaatatacatacaaatgaaaaaactgttattgtaaaaaataacattgtagatattttgaaagcagcagaacaaaaacttttaaccgattttaaccaaagtttcatgaggcttgaaagcgcaaaaactcaagacgtattcaatgctattgttgagaatgtaaatgaaaaatcagcactgattaaacttgtaagaaatgagattttagccgctggcgcgtatgcttatgacgctgataatctcgaatatatagatcttgaaactaacgagcgtttagaagttatagcaaccatagagtaa

SEQ ID NO: 20712 - DNA, 1164 bp, Escherichia coli
atggcaatatttcatatgagcgcccaaacaataagccgctcaaaaggacatagtagcgtagctgcggcggcgtatcgccacggtgaaaaaatgacagatgagcatacaggagagatccacgactacagcaaaaaaaagggagtttctgatggtgtggtattaatccccgacggcgcagataaaagatttttgaaacctgaatacttgtggaacactatcgaaaaaagcgaaaaaagaaaagatgcgcagttagcacgcgagtttaatattgcgctccccgtagaaatgacaaacgaacaaaaaaaagcattagcaatagatttctgtaatgagaactttgtaaaaaatggaatgattgcagatatagcttttcataagctcgatagcgacaacccacattttcacgtaatgctaacgacaagaaagctaaccccggacggctccgggttcgggcaaaaagtcagggaatggaacagcaaggagcagctcgaaggctggcgcaagagctgggcggacacagcgaacgagcacatgcaaagggctggcatcgatgcgcgtattgatcaccgttcgctgaaagaccaaaaggccgaactggatgcactcccctcccctactcttgagcaacaggcgcaggctatcagcttagacagaccgccgaccatacacagggggcacagcggcaatccagagcgtcaggaacgctttgacgcgcttcaagaagtgaaagtgtcacaagagactaaagcacataaccacattgaacaaaacacgcttaagccctcgccagcggctcctgcttcctcccctgccgcgtctctcatggacgctaaacagggaggcaaaaaagcagcttcaacaggttcagcagcggctacagtttcaggatctaatatcaatctcgcagatgaaacaacagacaaaaatctacatctaacagaagcgcagcgcgaagagttagaagacgcagaaaataaagaagcagcagcgaagaaaaaagcatatctgacgggcggcgctggcgttcctgaaatcagcgaaacaaacaaaatacagtctaatactgattttaaaaataagctcaggaaggttaaaacagcgataaataaagaagatgaagaggaagaaaacaatcacaaaataaatagaccacgtttaaaataa

SEQ ID NO: 20713 - DNA, 342 bp, Escherichia coli
atggcgtttaatatagaaaaatataataaagtaaaaaaagagcttgagcaaaaagcaaacttactaaacaggatggagcaagaaatgaaagctgaaaaaaggaaagaagatgcagcgcgcaaaataaaagttggcgctgaactaataagaatagttagagaaaacaatatagagacgttggattttgcgaatgatattccattattggtgggggctttaactaataatctaatattaaaaagaatacacgatcagcgcgagtttttgagagttgaaggcgataaaagacttaacgagtggaagttaaaaaacaacaaaaaaaggagcaagacgaatgaataa

SEQ ID NO: 20714 - DNA, 411 bp, Escherichia coli
atgaataacataagacctaacccgaaccctaaaaaagagggaacggcggacatgatgaaccgcttaaacttctatgatacgtcttttgcttgtttgcattttctaatgatagattttgataatgacatgcaagaaatgaaaagaaaaaaagattttcatccgcttatgcttttgaataaacatgatagagcaagtttagatttagaggtgcgtaatattattagagtatcacttgcaagtaaaatgttagatattcaaagcgatgagcttttagacgctgatttatattttcataaaaaagatgagttagatattggcgaggatgcaagaataatagcttatgtatttagagactttgtaaaacagaggatagaagcagcgattaaaaacatggaggataaaaatatatga

SEQ ID NO: 20715 - DNA, 246 bp, Escherichia coli
atgaatataatgggttttttgggttttgtagcaaaagcaaaacctgacgtggatgatggcggcggaagtcttattcccgccgctatggggttttttatttgtgcttttttagttgctattattgcgtcagttgtttcaagtgcttttcgttctgctaaaaactctgctgatgtgagtataaataatgcgaaaaaatatcacgtagccttgataaaagagcagtacagaagaaaagggggcgggtaa

SEQ ID NO: 20716 - DNA, 456 bp, Escherichia coli
atgtattatttaatatgtggtctatttatagctatattttttattgcttgtttgctttccgttatatatgccgctgaaatatatcagtggcagcattacaacgcttacaagtttaaacgctggttgaaaagtggaagtataaaaaaagatgaggagcaagaaaaaataaaaagggaagtaaagaaaatgactatagataatattttaagactcctcaagaaatacaaaatagattttgacgctaacgagttagtgaaaaatgattttaatattaaaatgaaatattacaaacttatattagccgagaaagaaagactgaaagaaaataaaagattagatgaagagttaaaacaaaaaataaaaatagaaactgatacgtttgacgctgaaaagtttcagaaagaagcagaagaacgatttaaaatattcatgaaaaatcgtaataaaaataaataa

SEQ ID NO: 20717 - DNA, 1293 bp, Escherichia coli
atgcgcgatgatgttgcatttcagattatcaatgatgaattatatcttgatggcaacgctcgtcagaacctggccactttctgccagacctgggacgacgaaaacgtccataaattgatggatttgtcgatcaataaaaactggatcgacaaagaagaatatccgcaatccgctgcaatcgacctgcgttgcgtaaacatggttgccgatctgtggcatgcgcctgcaccgaaaaatggtcaggccgttggcaccaacaccattggttcttccgaggcctgtatgctcggcgggatggcgatgaaatggcgttggcgcaagcgtatggaagctgcaggtaagccgactaacaaaccgaacctggtgtgcggtccggtacaaatctgctggcataaattcgcccgctactgggatgtggagttgcgtgagatccctatgcgccccggtcagttgtttatggacccgaaacgcatgattgaagcctgcgacgaaaataccatcggcgtggtgccgactttcggcgtgacctacaccggtaactatgagttcccgcagccgctgcacgatgcgctggataaattccaggccgacaccggtatcgacatcgacatgcacatcgacgccgccagcggtggcttcctggcaccgttcgtcgccccggatatcgtctgggacttccgcctgccgcgtgtgaaatcgatcagtgcttcaggccataaattcggtctggctccgctgggctgcggctgggttatctggcgtgatgaagaagcgctgccgcaggaactggtgttcaacgttgactacctcggcggtcagattggtactttcgccatcaacttctcccgcccggcgggtcaggtgattgcacagtactatgaattcctgcgcctcggtcgtgaaggctataccaaagtacagaacgcttcctaccaggttgccgcttatctggcggatgaaatcgccaaactggggccgtatgagttcatctgtaccggtcgcccggacgaaggcatcccggcggtttgcttcaaactgaaagatggtgaagatccaggatacaccctgtacgacctctctgaacgtctgcgtctgcgcggctggcaggttccggccttcactctcggcggtgaagccaccgacatcgtggtgatgcgcattatgtgtcgtcgcggcttcgaaatggactttgctgaactgttgctggaagactacaaagcctccctgaaatatctcagcgaccacccgaaactgcagggtattgcccagcagaacagctttaaacacacctga

SEQ ID NO: 20718 - DNA, 873 bp, Escherichia coli
atgaatccgtctgatgccattgaggcaattgaaaaaccgctctcctccctgccttattcactttcccgtcacatcctggaacatctgcgcaaactcaccagccacgaacccgtgattggcattatggggaaaagcggggccggtaaatcctcactctgtaatgcactgtttcagggggaggtcaccccggtcagtgatgttcacgctggcacccgggaagtgcggcgcttccgtctgagtggccacggtcacagcatggttatcactgacctgcccggggtgggcgagagccgggacagggatgcagagtatgaagccctgtaccgtgacattctgccaaaactggacctggtactgtggctgattaaagccgatgaccgtgccctgtctgtggatgagtatttctggcgacacatcctgcaccggggacatcagcgggtactgtttgtggtgacgcaggccgataaaacggagccctgccatgaatgggatatggccggtattaagccttctcccgcacaggcacagaatattcgcgaaaaaacggaggcgctattccgtctgttccggcccgtacatccggttgttgccgtatcggcccgcaccggctgggaactggatacgctggtcagtgcgctcatgacagcgcttcccgaccatgccgccagtcccctgatgacccgcctgcaggacgagctgcgcacggagtctgtccgctctcaggcccgtgaacagtttaccggtgcggtggaccggatatttgacacggcggagagcgtctgtgttgcctctgttgtccgtacggccctgcgcgctgttcgtgacaccgtggtctctgttgcccgcgcggtatggaactggattttcttctga

SEQ ID NO: 20719 - DNA, 564 bp, Escherichia coli; identical to SEQ ID NO: 10918

SEQ ID NO: 20720 - DNA, 234 bp, Escherichia coli
atggcacctgaaccggatgaagatgatgacgaaacatgggtactgttcaataccatgaacggtaaccgcgctgaaatgagcccggaagccgccggcattgctgcctgtctgatgacgtacagtcatcacgcctgccgtacggagtgttatgcaatgacggctcattattaccgtctgcgggattacgccctgcaacatccggaatacgacgccattatgcgcattattgactga

SEQ ID NO: 20721 - DNA, 234 bp, Escherichia coli
atgcgcgtgatgcgtgtcgccagtgaagcgccaggtctgtcttcatcagtcaatattggtgcctttaatcttggaaatgcgctgggagcagctgctggtggtgcggtaatttccgctgggctgggatacagttttgtgccggtgatgggggcgattgtcgcgggactggcattattgctggtgtttatgtcagccagaaaacaacctgaagcagtttgcgttgccaacagctaa

SEQ ID NO: 20722 - DNA, 1539 bp, Escherichia coli
atggcaagagctgtacaccggagtgggttagtggcgctgggcattgcgacagcgttgatggcatcttgtgcattcgctgccaaagaggtggtggtggcggtgggatcgaacttcaccacgctcgatccgtatgacgcaaatgacacgttatctcaggccgtagcgaaatcgttttaccaggggctgttcggtctggataaagagatgaaactgaaaaacgtgctggcggagagttataccgtttccgatgacggccttacttacaccgtgaaactgcgggaaggaattaaattccaggatggaaccgacttcaacgcagcggcggtaaaagcgaatctggaccgggccagcgatccggcgaatcatcttaaacgctataacctgtataagaatattgccaaaacggaagcgatcgatccgacaacggtaaagattaccctcaaacagccattctcagcgtttattaatattcttgcccatccggcgaccgcgatgatttcaccggcagcgctggaaaaatatggcaaggagattggttttcatccggtgggaaccgggccgtatgaactggatacctggaatcagaccgattttgtgaaggtgaaaaaattcgcgggttactggcagccaggattgcccaaactggacagcataacctggcgtccggtggcggataacaacacccgcgcggcaatgctgcaaaccggtgaagcgcagtttgctttccccattccctacgagcaggccgcactgctggagaaaaacaaaaatatcgagttgatggccagtccgtcaattatgcagcgttatatcagtatgaacgtgacgcaaaagccgttcgataacccgaaggtccgtgaggcgctgaattacgccattaaccgcccggcgctggtgaaagtggccttcgcgggctatgcaacgccagctactggtgtggtaccgccgagtatcgcctacgcgcaaagttataaaccgtggccttacgatccagtgaaagcgcgcgaattactgaaagaggcgggatatcccaacggtttcagtaccacgctgtggtcgtcacataaccacagcaccgcgcagaaagtgctgcaatttacccagcagcagttagcgcaggttgggattaaagcccaggtgactgcgatggatgccggacagcgggcggcagaagttgaaggtaaagggcaaaaagagagcggcgtgcggatgttctacactggctggtcggcttcaaccggcgaagccgactgggctctatcgccgctgtttgcctcgcagaactggccaccaacgctgtttaataccgcgttttacagcaataaacaggtggatgacttcctggctcaggcactgaaaactaatgatccggcggaaaagacccgcttgtataaggcggcgcaggatatcatctggcaagagtcgccgtggatcccgctggtggtagaaaaactggtgtcggcacacagtaaaaacctgaccggtttttggatcatgccagacaccggcttcagctttgaagacgcggatttgcaataa

SEQ ID NO: 20723 - DNA, 1158 bp, Escherichia coli
gtgagttggccgatggtgagtatagaaagcgttgcaaaagtaatcacgggcaaaacaccgcctaaagcagatcctaactgttttggcggaaatatccctttcattacaccgtctgagctaacggattcggactatttactcaaaccggagacaacgttaacagaaaagggattagcaaccacaaagctgattcctaaaaatagtatattagtttgttgtatcggttctttaggtaaaatggcgatagcagatcttccagttgctactaaccaacaaatcaatagtgttatttttgatgacgataagatctattatagattcggattttacgccttaaaattattgaaaaatgatctaaaaaaaattgcaccgtcaactactgttgcaataattaataaaagtagattttcagaattaaaaataccatgccccccattagaggagcaaaagcgtatcgccactattctcgataaagccgatggcatacacaaaaaacgcgagcaagccatcaaactggctgatgattttttgcgggctaagtttctagagatgtttggaactcctgcaaacaacatacatcgtttcccgaaaggaacgattcgcgacttggttgattcagtaaattatggaacttcagcaaaagcctctattgattctggtgaatatcctatattacggatgggtaatataacatatcaaggtaggtgggattttacagatttaaaatatcttgatctcagtgtaaaagaaaaggataaatatttggttaaagaaggcgatcttcttttcaatcgtactaacagtaaggaacttgttggtaaaacagctgtgtatgaagaagacaggcctatggcatttgctggatatttaatccgcgttagacctaattctatcggaaataactactatatttcagggtatcttaattccatccatggcaaaatcacattgatgaatatgtgtaaaagtattgttggcatggctaatattaatgcacaggaattgcagaatatagagatattaatcccacctaagcatctacaagatgagtatgagattatttataaaaaaataaaaaaaggactaagcatttatgataaaagcgcaatgcaacttcaacttttagcatcaaacctatcgaataaatatttcatgtaa

SEQ ID NO: 20724 - DNA, 573 bp, Escherichia coli
atgctgcgtctgcggcgggccggacagataaccggtcagcatgtgcctgaaattattctgctcaactcccatgacggttcatccagctaccagatgttacccggatattttcgtgccatctgcaccaatggcttggtctgcggtcagtcgctgggagaagtccgggtgccacaccggggaaacgtggtggacagggtcatagaaggtgcttacgaagtggtgggcgtgtttgaccggattgaggaaaagcgtgatgccatgcagtcgctggtcctgccgccaccggcacgccaggcgctggcacaggcggcgctgacttaccgttatggtgatgaacatcagcccgtcaccactaccgacattctgacgccacgacgccgggaggattacggtaaggacctgtggagtgcttatcagaccatccaggaaaatatgctgaaaggcgggatttccggtcgcagtgcaaaaggaaaacgtatccatacccgtgccattcacagcattgacactgacattaagctcaaccgcgcattgtgggtgatggcggaaaccctgctggagagcctgcgctga

SEQ ID NO: 20725 - DNA, 486 bp, Escherichia coli; identical to SEQ ID NO: 7756

SEQ ID NO: 20726 - DNA, 2178 bp, Escherichia coli; identical to SEQ ID NO: 9011

SEQ ID NO: 20727 - DNA, 567 bp, Escherichia coli; identical to SEQ ID NO: 10268

SEQ ID NO: 20728 - DNA, 2004 bp, Escherichia coli; identical to SEQ ID NO: 10321

SEQ ID NO: 20729 - DNA, 2550 bp, Escherichia coli
atgcaacatcgtattattctccccggagccaccacgctgacccggttgatttcagaggtaagggaaaaggcgacgttgcgcctgtggaacaaactggcactgataccgtcagccgaacagcgttcacagctggagatgctgctggggccaactgattgcagccgcctgtctttactggaatcactgaaaaaaggccctgtgaccatcagtggtccggcgtttaatgaagcaattgaacgctggaaaactctgaacgattttggcctgcatgctgaaaacctgagtacactcccggctgtgcgcctgaaaaatctcgcacgttatgctggtatgacttcggtgttcaatattgccaggatgtcaccgcagaaaaggatggcggttctggttgcctttgtccttgcatgggaaacgctggcgctggatgatgcactggacgttctggacgccatgctggccgttatcatccgtgacgccagaaagattgggcagaaaaaacggctccgctcgctgaaggatctggataaatctgcattggcgctcgccagcgcatgttcgtacttgctgaaagaagaaacaccggacgaatcgattcgtgctgaggtgttcagctacatccctaggcaaaagctggctgaaatcatcacgcttgtccgtgaaattgcccggccctcagacgataattttcatgacgaaatggtggagcagtacgggcgcgttcgtcgtttcctgccccatctgctgaataccgttaaattttcatccgcacctgccggggttaccactctgaatgcctgtgactacctcagccgggagttcagctcacggcggcagttttttgacgacgcaccaacggaaatcatcagtcagtcatggaaacggctggtgattaacaaggaaaaacatatcacccgaaggggatacacgctctgctttctcagtaaactgcaggatagtctgagacggagggatgtctacgttaccggcagtaaccggtggggagatcctcgtgcaagattactacagggtgctgactggcaggcaaatcggattaaggtttatcgttctttggggcacccgacagacccgcaggaagcaataaaatctctgggccatcagcttgatagtcgttacagacaggttgctgcacgtcttggcgaaaatgaggctgtcgaactcgatgtttctggcccgaagccccggttgacaatttctcccctcgccagtcttgatgagccggacagtctgaaacgactgagcaaaatgatcagtgatctgctccctccggtggatttaacggagttgctgctcgaaattaacgcccataccggatttgctgatgagtttttccatgccagtgaagccagtgccagagttgatgatctgcccgtcagcatcagcgccgtgctgatggctgaagcctgcaatatcggtctggaaccactgatcagatcaaatgttcctgcactgacccgacaccggctgaactggacaaaagcgaactatctgcgggctgaaactatcaccagcgctaatgccagactggttgattttcaggcaacgctgccactggcacagatatggggtggaggagaagtggcatctgcagatggaatgcgctttgttacgccagtcagaacaatcaatgccggaccgaaccgcaaatactttggtaataacagagggatcacctggtacaactttgtgtccgatcagtattccggctttcatggcatcgttataccggggacgctgagggactctatctttgtgctggaaggccttctggaacaggagaccgggctgaatccaaccgaaattatgaccgatacggcaggtgccagcgatcttgtctttggccttttctggctgctgggataccagttttctccacgcctggctgatgccggtgcttcggttttctggcgaatggaccatgatgccgactatggcgtgctgaatgatattgccagagggcaatcagatccccgaaaaatagtccttcagtgggacgaaatgatccggaccgcaggctccctgaagctgggcaaagtacaggcctcagtgctggtccgttcattgctgaaaagtgaacgtccctccggactgactcaggcaatcattgaagtggggcgcatcaacaaaacgctgtatctgcttaattatattgatgatgaagattaccgccggcgcattctgacccagcttaatcggggagaaagccgtcatgcagttgccagagccatctgtcacggtcaaaaaggtgagataagaaaacgatataccgacggtcaggaagatcagttgggagctctggggctggtcactaacgccgtcgtgttatggaacactatttatatgcaggcagctctggatcatctccgggcgcagggtgaaacactgaatgatgaagatatcgcacgcctctccccgctttgccacggacatatcaatatgctcggccattattccttcacgctggcagaactggtgaccaaaggtcatctgagaccattaaaagaggcgtcagaggcagaaaacgttgcttaa

SEQ ID NO: 20730 - DNA, 618 bp, Escherichia coli
atgactaaaaggaagggagggagaaatgttcctcgagtgatgtatatatattgtgaaggggagaagacggaaccgttgtatcttgaatcttatatatctgaaaattcaagaagaacgttgagtgtgtttaaaatacctaaaacaaggaaaaatacaccagagcagctagtagatgaggcgataaagaaaaagaattcatcatccactgcggatggtgatgagttttgggtcgtttatgatcaagagcatttgactacgcagtctgttttgtgccatcaaagggcgtggaacaaagctaatagacacggtataaatatagctatatcttgtgtttgttttgaactgtggttgttgttgcactttggttatacaacaagatctttttcatcttatgaaaatttaatgtctgcctctccgtttaagggtctgttgccaaattataataaaggtagtagttcaacatatgatgttttgaaaaataggattgggaaggcgagaaaaaatgcggcacaactagagattttcgttaaatcagataacgaaaatatacatgagccatataaatttccatgttatacatcatttcataagttacttgatgcgattgataacttttga

SEQ ID NO: 20731 - DNA, 1356 bp, Escherichia coli
atgtttgttcgtttgactattgaaaattttagatccgtaaaggaaaactttacgcttgatttaagtgcgtctggctcaaatagccatttagttaatcatatttataaaaacgccgagatgtctgttggaacacttatgagtgctgggatttatggggcgaatgcgtcaggtaagtccaacgttctcatggcttttgaggctattaaatatattgctacagatagcggggatctgaaggaaggaactcgaattccatgctacgaaccgtatgccctctcgttggctacgaatgagtcaccagttcggtttgtggctgatttttactctgttgaggggaatcgttttaattatgaggttaaatatattaaagatcgaattatattcgagtcattggattactatccgtctagggtaaaggctaatttgtttactagggatgaaggcgatacatgggaaacaattaagtttggtggtcattatagaggtggggtgaaaaaaataccattcttccctaataactcatatttggccaaggccggtaataatgcggcatctccagatataattaaagaagcttatgacttttttaggaaagggataaggcatataggtcttaatgaaaaaataagaatctcatcttttggtaaaagagaggaagtagtaagtgaaaccgctgaggttctgtgcatggttgatacaggtgttgctggaatatccgtgcgagaagtagaatctgatttaccaataagaatggatgatgatattcctccagaaataaaagaaatgatagaggaggattataagtatcgatatttgttttctcatgctactgaggagggcgggagtgtttcttttcctatgtccagagagtctgaaggcactcagaagttatttgaaataatacctttaattagaagtgcatttaaaaacagcatggttgtgattatcgatgaactagataatagtttgcatccacatattgcagatctaattgttaagctatttaatgatcctgatgttaacaaaaagggatctcagctaatattctctacgcataatatgcagttgatgactcctgaaaaaatgagaagggatcagatatggttttgcgaaaaaaacaaaggtgcttcggcattatacagtttagatgattttgataagaaaaaagtaaaaacaacaacaccttatgctagttggtatgatgagggccggtttggcggcgttcctgatattaattatttgaaagtagctaaattcctatcaggaaatgctatgactgctattcatgatattgatgttgatgctcttgctggtgattttttcgaagagtttaacgaggatctttctaatgactaa

SEQ ID NO: 20732 - DNA, 231 bp, Escherichia coli
atgattcatgtcagtaagaaaagtgcccagaaaacgcacacacccgatttgcagggcaataccaagtcgattgtgatcaccccggcttttcccgataaattctttatccgcttcatcaagatgaaaataacgcgccagctgaagttcatcgggttcgccagtgaacctgccataactctcaacctgctcagtggtcaaaaaatcaacgggcatatcggcctccctgcctga

SEQ ID NO: 20733 - DNA, 696 bp, Escherichia coli
atgatgaagcacatgcgtatatgggccgttctggcatcatttttagtctttttttatattccgcagagctatgccggggttgctctgggtgccacccgtgtgatttaccctgaagggcaaaaacaggtacaactggcggtaacaaataatgatgataaaagtagttaccttattcagtcatggattgaaaatgctgaaggaaaaaaggatgccaggtttgtaattactcctccgttattttccatgcagggaaagaaagagaataccctgagaattattgatgccacaaacggacagatgccggaagacagggaaagtttgttctgggtgaatgtcaaggccatcccggccatggataaggcgaaaaccggcgagaattatctgcagtttgcaattgtcagcagaattaaactgctctaccgtccacagggactggttattccgccagaacaggcaccgggtaaattagagttcacccgtgaaaacggagggctgactctgtttaatccgacgccgtattatctgacagtgactgacttaaaggccggaaataaaagtcttgaaaacaccatggtacccccacagggaaaggtcactgtgaatatccctggaggatacaccggaggagatattacttataaaacaattaacgattatggtgctctgactgaacaggtgaagggtgtggtgaagtaa

SEQ ID NO: 20734 - DNA, 447 bp, Escherichia coli; identical to SEQ ID NO: 988

SEQ ID NO: 20735 - DNA, 267 bp, Escherichia coli
atgttgcggcgtctctccaatgccgggcagatcgaccagcgtcattctgcgttcaccgatctgcagggtaagacgatgagcctggcgggtgcagccgttcaggggatgcgtggcacagatatgggactgaaaaatagcattacacaggctacttttgccggtgccggatttacccataatgccaatcacgggttcgtaatgaataacgctgtggagatgttcaagaattttctgacgaatttcttcaggaagaaacgtcagatatga

SEQ ID NO: 20736 - DNA, 162 bp, Escherichia coli; identical to SEQ ID NO: 6944

SEQ ID NO: 20737 - DNA, 249 bp, Escherichia coli; identical to SEQ ID NO: 11081

SEQ ID NO: 20738 - DNA, 1503 bp, Escherichia coli
atgaatataagaaaactgttttgtccgggcaacactccccggattatattgtttttattcttttttgttgtttctgtcataaccacaattgcatgcggatacactgagaagaatgccaccgggaatgtgttgctgctgttccttcttctgctccttgcacacagaaataccctcacatccattacagcgctgttatttctgttctgttgtgcactgtatgcgcctgccggtatgacgtacggaaaaatcaacaacagttttattgtcgcgttgttgcagaccacggcggatgaggctgcggagtttaccgggatgattcctgtttatcattttctggtcagtgccgcgattctggtgttcatggttattttctggcggacacaccaccgtggtcaacgtaacgcgatggctctgttgttattcgtattatgctctgtaaacagctggccgttacggatggttaaaggaacagttgtggggacaactgacacattgcgtgaaatgcagcgttatgaacaactgagtcggcacggtgctgacagctggaaaatcctgccgggagcaccattatatgacacgattgttattgttactggtgagagtgtccgcagggattatatgtcggtatatggttatcccgagccaaccacaccatggctgaatacggctcccggtttatttattgacggttatacatcggcagcagccagtaccgtaccttccctgagccggacactgatttatgactatgagcagaaccctgactccggcaacaacgtggtggcgctggcagcaaaagcaggatacagcacatggtggatatccaatcagggaaagctgggggagcatgatacacgcatctctgttattgcttctgatgcggagcataccgttttcctcaagaaaggcagctttgcttcccgtaaaacggatgacatgttgttgttacaggaaacagaacgtgcgctggcagatacatccactccgaaggtgattttcctgcacatgatggggtctcatccgaacccgtgtgatcggcttcactcctggcagaataattacctggagcagtattcccgaaaaattgcctgttatcttgccagcatcagtaaactggataactttctcggtcagcttgatggtatccttcgccggtattcccgtcattttgccatgctttacttttctgaccatgggctgtcggtcagcgacagtgctaatcctgttcatcatgatggtcatgtgcagggaggctacagcgttcccctgattattaccgccagtgacatcacgtctcatcagtctgtcagcagaaaaatcagtgcccgtcatttcgcaggtatttttcagtggctgaccggcattcgtactgaaaatataccgccattcaatccgctgacagacgaagataatgaacccattatggtttttaacggagacaagaatgtaccgacagacagccttgagtcacagcctctgattcttccgggcaagggaaaataa

SEQ ID NO: 20739 - DNA, 747 bp, Escherichia coli
atgaaaaaggtttttgctgtttcagtggtgggcgcagcctgtgtatttgcagcaaatgcaggtgctgaggacggtaaaagcggtttttatctgaccggtaaagccggtgcctctgtggtgtcactttcagaccagcgtttcctgtcaggagatgaagaagaaacgtcaaagtataaaggtggggatgaccatgacacggtattcagtggcggtatcgcagccggttatgatttttatccgcagttcagtattccggttcgtacagaactggagttttacgcacgtggaaaagctgattcgaagtataacatagataaaggtaaaggcagctggtcagatggttactggcgtgatgaccttaagaatgaggtatcactcaacactctgatgctgaatgcatactatgacttccggaatgacagtgcattcacaccatgggtatcagcagggattggttacgccaggattcatcagaaaacaaccggtatcagcacctgggattacgggtacggatacagtggtcgtgaatcgttgtcacgttcaggctctgctgacaacttcgcatggagccttggcgcgggtatccgctatgacgtcaccccggatatcgctctggacctcagctatcgctatcttgatgcgggtgacagcagtgtgagttacaaggacgagtggggcgataaatataaatcagaggttgatgttaaaagtcatgacatcctgcttggtgtgacttataacttctga

SEQ ID NO: 20740 - DNA, 966 bp, Escherichia coli; identical to SEQ ID NO: 8922

SEQ ID NO: 20741 - DNA, 978 bp, Escherichia coli
atggaagatacaaaacctaaagataaaaataaactacgaagcggatggacaaatacaaccgctgagtttgagttgtttcacaagacatctcttaccgttgaactgggattaaaagtcgctaatgttgaatatacacacaagtatgtagaggaaataaaaaaactcagacaaataaaacaactggagcagatgagtagaatagatgcgctgattaaaagcattaacaaatactttgcgccagatcctgacaacaaagatggtacgcgtaaatatgcgttattcagtgcaaaaatagaacctgtcacactggggatttcttatgcttatcaatacactgatattaaagatggtccgtgccatttttatggtctatatggtgctccatttttcaaagcatcattccgatttgatatcatctcatttatatgtgcatactgcaaaatggaagatctggtaaaccgatgccgtgaatatctccgcaagcatggaaccagtgttgaatgctatatcgaaatttcaccggaagttaatctcgatcttggggctgtatattctcaaaaagataaagcatgggaatttaacactaaagaaagcaatattaaacttggtttgaaaggtgaggttagtgcaacatttgagacgaatgtttttgtcgtgaaattgaaatctgaggttggtgcttctatagaagcaaaagctgggtttggatttgataaacgagatgatggaatggatcttgttctatttcatgatggagtgacgggcgcgtttaaagttaaggttgacatatctcgcggtgataaagatagaaaagagaatagtgagaaacccgaaaaagaaaatgaacttaagtggcaactatgtaaacctttggaagtagatgactcaccattacggattaatttgtatggtaaggaaaatactgtggaaaaaaaagtaacgccagtgacgcagtggcagataggcactgattattga

SEQ ID NO: 20742 - DNA, 1344 bp, Escherichia coli; identical to SEQ ID NO: 10305

SEQ ID NO: 20743 - DNA, 1131 bp, Escherichia coli
  misc_feature (1114)..(1123): n is a, c, g, or t
atgtgtataagagacagaccaaagacacggcttaatattattacaggtgataacgggcttgggaaatcctttattctcgaatcagcttggtgggcattaactaatacttggacagatcgggtcgcctatcctgacccaagactaagaggaaaaaaaatcaacctgacttattcaatcaaaggtaatggtgaatttaagtcaggtaattgtgtgaactttgattgggacaattttaattggccgatacaaacggacagacctacaattcctggtcttattgtttatgccaaagtagatggttctttcgctgtatgggacccagccagaaaatattctactcaatctacgtttaatgaaaaagaaaaattcgtttttaaaagcaaggaagtatgggacgggcaagatgggattggtgttctcgaaggtttgatcagagactggatgacttggaagaatgatagtaagaaccagcatttcaaacattttgaaaaagtattagaaaaactatctcctccagacttgggggttttgaaaccgggtgaaccagttagaattcctgacgatccgagagtcattccaaccttagttcatccgtatggagagatcccgataacaaatgcctcagcaggtgttagaagaatagttgctttggcatatatgatcgtgtgggcatggaatgaacatgtcgttatttctgagatgatgaatattcctcctcaaaataatatggttgtgcttgttgacgaattagaagctcatttacatccaaaatggcaaagagcatttttaccatctttaatagcacttgataaggtattttcaagtgagttgaagatccaatttatcatcgctactcactcccctttagtaatggcatcctctgaggaagtattcgatatcgagacagatagcttatatcacttacaattggataacaaaggtcatataacacttgatgaattagacttcgtcaaatatggagatgtttcctcttggttaatgtccccaatttttgaattacgacaagcaagatcgcaagaaggcgaagcagctatcgaggatgcaaagaaaatacaggcacttgaaaatcctgatatagaaatgatagaagatnnnnnnnnnnagatataa

SEQ ID NO: 20744 - DNA, 369 bp, Escherichia coli; identical to SEQ ID NO: 13991

SEQ ID NO: 20745 - DNA, 351 bp, Escherichia coli
atgatctcactcccatcaggtacccgtatctggctcgttgccggcgttaccgatatgcgtaaatccttcaacggactgggagaacaggtacaacatgtgctgaatgataatcccttctccggtcacctgtttatcttccgtggccgacggggtgacaccgtcaaaattctttgggctgatgctgatggtctgtgcctgttcaccaaacgcctggaggaaggccagtttatctggcctgcggtacgtgacggcaaggtatccattacccgctcgcaactggcaatgctcctcgataagctggactggcgtcagccaaaaacatcccgccgtaactcactgacaatgttgtaa

SEQ ID NO: 20746 - DNA, 330 bp, Escherichia coli
atgcgtcggatcaaacgtatcacggtcctgctcagaccattttttaccgtcagcctgctcaatgttatttccttcagagcgcccgaaatccacctcgacagtatcaaactgatccccttccatggtgtatttgccatacagcacggcattcaccgcctgcatttcttccacctggacaatggcgtgctcttcctgtttgaggttatcggtaatgatacgcagacgacggtaggccgggtcgttcagctgagccggatcttcaccaggaaggagctcaaccgcctgctggtaattaaattcgtgtttgggcttgacgtagcccggacgtaa

SEQ ID NO: 20747 - DNA, 414 bp, Escherichia coli
atggcaacgaatgaaagcatcatgacgctaccgctggcgagtaaatttaaagccgaagcgcgggcaatggctgacagagggttatcaacctacgaggccatatatcaacttaacaaactggaagagcaggacaagccgcgcgctgatgcgattatggcgcttgatgaatctggcgactatcagccgctgttacgtgcaatggcaaacgtgccttgtatcgatgttggtacggctaaaagcatccttagcatgaccatagagcaggaacgtccgaaggttgcgccggaacttaccgcagcctttgaaaactttatggacatgcacagcccgcaagccgtatcagctggcatggcatacgatggcagaaaccagggcgatgacggcgacatcgatcgcatactgaaaaccatctga

SEQ ID NO: 20748 - DNA, 639 bp, Escherichia coli
atgaatcagaagagaggttgcttaactccacaaagaaaacatttctgtcaatgtggtctcacagcaatattttctataagaaaggaaaggaaaggaaaggaattttgcgatgtaatggtcgtctttggcaatgatgtaatcatcatgtcagataaacttattaattataatattgaaattgacgaaaaaatcgcatggaatagatggtataaaagtgctatcgaaagcagcataaaacagctaaatggtgcatataaccatataaactcatatcccgacaatctatatactgatgctcaagcaacagagccattctcaatggaattaccacattcggatgaaatatgcattcatttaattgctatcgcaaatggttgctctaacgcatgctatagaaaatacggtcgctatggattaaatattgatacagcatgtaccggaaaagacaccttatttactataggtatacccacaagaaaattcgtccatatattcaatgatagcagtctagataaaatatttacatgtttagatacaaccagagatttcattgattacattcaagctagggaaaacttacttacaacttcagataagtacattaaaatatactcaataaacctcaagatgcgggtgtga

SEQ ID NO: 20749 - DNA, 759 bp, Escherichia coli; identical to SEQ ID NO: 9256

SEQ ID NO: 20750 - DNA, 222 bp, Escherichia coli; identical to SEQ ID NO: 9129

SEQ ID NO: 20751 - DNA, 369 bp, Escherichia coli; identical to SEQ ID NO: 13334

SEQ ID NO: 20752 - DNA, 222 bp, Escherichia coli; identical to SEQ ID NO: 12867

SEQ ID NO: 20753 - DNA, 477 bp, Escherichia coli
atgcaacagatttcctttctgcccggagaaatgacgcccggtgagcgcagcctcattcaacgggccctgaaaaccctggaccgccatcttcatgaacccggcgtggccttcacctccacccgtgcggcacgagaatggctgattctgaacatggcgggactggagcgggaagagttccgggtgctgtatctgaacaaccagaatcagctgattgccggtgaaaccctcttcaccggcaccatcaaccgcacggaagtccatccccgggaagtgattaaacgcgccctgtaccacaatgccgctgctgtggtgctggcacacaatcacccgtccggtgaagtcacacccagcaaggcagaccgccttatcacggaacgtctggtacaggcactgggcctggtggatatccgggtgccggaccatctgatagtcggtggcagccaggttttctcctttgcggaacacggtctgctttaa

SEQ ID NO: 20754 - DNA, 579 bp, Escherichia coli
atggccataaaaggtcttgagcaggccgttgaaaacctcagccgtatcagcagaacggcggtgcccggtgccgccgcaatggccattaaccgcgttgcttcatccgcgatatcgcagtcggcgtcacaggttgcccgtgagacaaaggtacgccggaaactggtaaaggaaagggccaggctgaaaagggccacggtcaaaaatccgcaggccagaatcaaagttaaccggggggatttgcccgtaatcaggctgggtaacgcgcgggttgtcctgtcccgacgcaggcgtcgtaaaaaggggcagcgttcatccctgaaaggtggcggcagcgtgcttgtggtgggaaaccgtcgtattcccggcgcgtttattcagcaactgaaaaatggccggtggcatgtcatgcagcgtgtggccgggaaaaaccgttaccccattgatgtggtgaaaatcccgatggcggtgccgctgaccacggcgtttaaacagaatattgagcggatacggcgtgagcgtcttccgaaagagctgggctatgcgctgcagcatcaactgagaatggtaataaagcgatga

SEQ ID NO: 20755 - DNA, 396 bp, Escherichia coli; identical to SEQ ID NO: 5301

SEQ ID NO: 20756 - DNA, 270 bp, Escherichia coli
atgacggtcagatattatatcagttctgctgatttaaccgcagagaagttcgccacagcaatccgaaaccactggcacgtggagaataagctgcactggcgtctggacgtggtaatgaatgaagacgactgcaaaataagaagaggaaacgccgcagaattattttcagggatacggcacatcgctattaatattttaacgaatgataaggtattcaaggcagggcaagattacgaaagcccgctccccgcaaggactgacgcgagatag

SEQ ID NO: 20757 - DNA, 309 bp, Escherichia coli
gtgatcagccgctggcgcatcgagcagtgcagcgaactgagcgcggtgagtgcctcctttgtactgtccacgccgacggaaacggatggtgctgtttttccggggcgcatcatgctggccaacacctgcacctggacctatcgcggtgatgagtgcggttatcacggtccggcggtcgcggatgaatatgatcagccgacttccgatatcacgaaggataaatgcagcaaatgcctgagcggctgtaagtttcgcaataacgtcggcaactttggcggcttcctttccattaacaaactttcgcagtaa

SEQ ID NO: 20758 - DNA, 393 bp, Escherichia coli
atgagcaacacatttaaattcagcagccggagcgaaaagaatttgcagggtgtaaatcctgatctggtgaaagtgacccgacgggcgctggaaatctcggaagtggattttggtatcaccgaaggattgcgcagtcgttatcgtcagaagcagctcgtgaccacaggcaagagccagaccatgaacagtcgccatctcacagggcatgccgtggatgttgtggcttatgtcggcaaccaggtgtcatgggaatggccgctgtacgaaaaaatcgcagcagcattcagacaggccagccaggaactgaatattccggtggaatggggcggcgactggaagaccctgaaagacggaccgcattttcagttaccacacggagcctatccggcatga

SEQ ID NO: 20759 - DNA, 927 bp, Escherichia coli
atggaacaatatgatcaaattggcgcaagactggaccgcttgcctttggcccggtttcattatcgtatatttggtataataagctttagtctgttattaacggggtttttgagttactccggtaatgtcgtcttagcaaagctggtaagcaatggatggtcaaataatttcctcaatgccgcctttacctcggcattaatgtttggttatttcatcggctctcttaccggtgggtttattggtgactactttgggcggcgcagggcgtttcgcataaatcttctcatcgtcggtattgcggcaacaggggccgcttttgtccctgatatgtactggctcatcttctttcgcttcctgatgggaacaggaatgggggcgctgattatggttggctatgcctcatttacggagtttatccccgcgacggtgcgtggaaaatggtccgcgcggctctcatttgttggaaactggtcgcccatgctgtctgcggcgataggcgtggtggttatcgctttttttagttggcggataatgtttctgctgggcggtattggcatactgttagcctggtttctctcaggtaaatactttattgagtcgccacgatggttggcagggaaagggcgaatcgcaggtgcagaaagccaacttcgtgaagtagagcagcaaattgaaagagagaagagtattcgtttacccccgcttactttgaaccagagcaacagcaaggttaaggtaatcaagggtaccttctggctcctgtttaaaggggaaatgttacgacgtacattagtcgcgattactgttttaattgcaatgaacatttcgctttataccatcaccgtatggatgccgaccatatttgttaactccggcattgatgtcgataaatcaatattaatgaccgctgttattatgattgggtaa

SEQ ID NO: 20760 - DNA, 933 bp, Escherichia coli; identical to SEQ ID NO: 5585

SEQ ID NO: 20761 - DNA, 3117 bp, Escherichia coli; identical to SEQ ID NO: 8319

SEQ ID NO: 20762 - DNA, 1230 bp, Escherichia coli
atgaaaacaacagctctgcgtctttatggtaaacgtgatttacgcctggaaacctttgaccttcctgaaatgcaggaggatgaaatcctcgcaacggtggtcactgacagcctgtgcctctcttcctggaaagaggccaatctgggtgaaaatcataaaaaagtacccgacgatgtggcgaccaatcccatcatcatcggccacgaattttgcggcgatattctggccgtgggtaaaaagtggcagcacaaattccagccgggtcagcgttatgtgattcaggccaacctgcaactccccgaccgcccggattgccccggctactccttcccgtgggtaggcggcgaagcgacgcatgtggttattcccaacgaggtcatggaacaagattgcctgctggcatacgacggcgaaacctattttgaaggctcgctggttgaaccgctttcctgcgtgattggcgcgttcaacgccaactatcatcttcaggaaggtagttataaccacacgatggggattcgcccgcaagggcgcacgctgatcctcggcggcaccggaccaatgggactgttggcgattgattatgcgctacatggacccgttaacccttcgctgctcgtcattaccgataccgacaacgacaaattgagttatgcgcgcaagcactatccatcagaaccgcaaacactgattcattatctcaatgccgccgatgcagcatttgatacgttaatggcactgagtggcggtcacggcttcgatgatattttcgtctttgtgcctaatgaaggactggtgactctcgcctcttccttgctggcgacagatggttgtctgaatttcttcgccggaccgcaggataagcacttcagcgcgccaattaatttctacgatgtgcattatgcatttacccactacgtgggcacgtcaggcggcaataccgacgacatgcgcgcagcggtcaaattaattgaagagaaaaaagtgcaggccgcaaaagtggtaacacatattcttgggctgaatgccgcgggcgaaaccacgcttgaattgcctgccgtcggcggcggcaaaaagctggtgtataccgggaaatacctgccgctgacgtcactcacgcagattcaggatcaagcactggcggcgattctggcgcgtcatcaggggatctggtccggtgaggcggagcaatacctgctcgcccatgcagaggcaatttcccatgattaa

SEQ ID NO: 20763 - DNA, 549 bp, Escherichia coli
atgaaaattaaaactctggcaatcgttgttctgtcggctctgtccctcagttccgcagcggctctggccgatactacgacggtaaatggtgggaccgttcactttaaaggggaagttgttaacgccgcttgcgcagttgatgcaggctctgttgatcaaaccgttcagttaggccaggttcgtaccgctagcctgaagcaggctggagcaaccagctctgccgttggttttaacattcagctgaatgattgcgataccactgttgccacaaaagccgctgttgccttcttaggtacggcaattgatgctacgcatactgatgtactggctctgcagagttcagctgcgggtagcgcaacaaacgttggtgtgcagatcctggacagaacgggtgctgcgctggcgctggacggtgcgacatttagttcagaaacaaccctgaataacggaaccaacaccattccgttccaggcgcgttattttgcaaccggtgccgcaaccccgggtgctgctaatgcggatgcgaccttcaaggttcagtatcaataa

SEQ ID NO: 20764 - DNA, 411 bp, Escherichia coli
atgagagaggttaactatgaggcgcttcgtgaggcagcacaaaactatcagtcgacgctggcgtggtatcaggctatcccggacagcccaaatgctgaacgggattgtgatgcggctcttgctgcgtttaagcgtcacatccgtcatcgggaagcggatattatcgctgatttgctggatggactggaagaagcaaaatcacaactcaacgagcagcgtgagtattacgaaggcgttatctctgatgggagcaagcgtattgctgaactggaagcgcgggaagttcaattaccgactcgctacgacctgaagtggtttactgaatttggccacctgaacagaggtgatatgctcacctcagaacaacacaggtgccataatgaaaaaaagaaatttcagcgcagagtttaa

SEQ ID NO: 20765 - DNA, 267 bp, Escherichia coli
atgatgcagaaagaagggaaaacaccggtagaggcaatcatcgaagcagcgcgtatgcgtttacgcccaatcctgatgacttctctggcctttattctcggcgtgctgccgctggttatcagtcatggtgccggctctggcgcgcaaaacgcggtaggtaccggcgtaatgggcgggatgtttgccgcaacagtgctggcaatttacttcgttccggtctttttcgttgtagtggaacatctctttgcccgctttaaaaaagcgtaa

SEQ ID NO: 20766 - DNA, 210 bp, Escherichia coli; identical to SEQ ID NO: 12980

SEQ ID NO: 20767 - DNA, 327 bp, Escherichia coli
atggcgaagcccttcagcacccacgctgaagtccacggtctgcgtttccagcagctccgttttaatcagccacagcccggcgcggtgtgcctgcccccggctggtacagccaaaggcatccatcttcgtgacgttacggccgtaacgggcaatggcctgcgtatcctccacgagctctgtcgccgtctcccagccgttatccgggtcaatccagttcacctcaacggcattatggcggtccttcagggcgctgaagctgtagcggaacggcgcgccatcatccggcatcaccacattactgcggttataggtccacaccttatctga

SEQ ID NO: 20768 - DNA, 519 bp, Escherichia coli
atgcttcagcataccctgaacaacactgagccggtgaagttgctgggttgtgacgtagacagccagtgtgcgggtgaaggtttttcctgcctggacagcagctgtctgcagggcagcatcgcgatcgccggtgctgagccagaagaccgatgccgtcagggcaaaactgatccctccggccgccagactgacaaccgacccctcggcaatatcataagtgaccgattcgatggtcccgaaccgggtgatattacgggcctgggtataagtcagatgtccccgacgaatcagccgggacgcttctgcgggatcggttacaccgggtactttaccttcgcggatcttattcttcatggtttccacagcgccggcatactgatcacgggggacttccagttgcatgggaccatgatttcccatgtaacgatactgtccgttctgtccgtcgaatgccgcactgttaatgccagcgaatgtggcgttgaatatccgttgcgccggtccgggtcccgatcatga

SEQ ID NO: 20769 - DNA, 225 bp, Escherichia coli
atggctacatacggcggtcagtttacgcttacgttgttgtataccggcggcgaaaatgatctccagagcattctgatcgataacacgggccagattcgcgttcagattttcaatctcatgtccggtcagcaggaaactgccggcaagccatgtcatctgctcctgaatcattgccagaattttgacgcgatcttcttcaaccagcgctccggcaatttttcctga

SEQ ID NO: 20770 - DNA, 477 bp, Escherichia coli
atgcagcagctttcctttctgcccggagaaatgacgcccggcgagcgcagcctcattcagcgggccctgaaaaccctggaccgccatcttcatgaacccggcgtggccttcacctccacccgtgcggcacgagaatggctgattctgaacatggcgggactggagcgtgaagagttccgggtgctgtatctgaacaaccagaatcagctgattgccggtgaaaccctcttcaccggcaccatcaaccgcacggaagtccatccccgggaagtgattaaacgcgccctgtatcacaatgccgctgctgtggtgctggcacacaatcacccgtccggtgaagtcacacccagcaaggcagaccgccttatcacggaacgtctggtacaggcactgggcctggtggatatccgggtgccggaccatctgatagtcggtggcagccaggttttctcctttgccgaatatggtctgctttaa

SEQ ID NO: 20771 - DNA, 234 bp, Escherichia coli
atggcccccgaaccggatgacgatgatgacgaaacatgggtactgttcaatgccatgaacggcaaccgcgctgaaatgagcccggaagccgctggcattgctgcctgtctgatgacgtacagtcatcacgcctgtcgtacggagtgttatgccatgacggtccattattaccggctgcgggattacgccctgcagcatccggaatgcagcgccattatgcgcatcatcgactga

SEQ ID NO: 20772 - DNA, 369 bp, Escherichia coli
gtgtcagacacactttccgggacaacgcatcccgatgacaatgacgaccatccctggtggggactaccctgcacagtgacgccctgtttcggcgcccgtctggtgcaggagggtaaccggttgcattaccttgccgaccgtgccggtatcagaggccggttcagagatgcggatgcgtaccctccggaccaggcctttccgctgctgatgaaacaaccgaaattaatgctcaccagtggtgaactgaatccccgccatcagcataccgtgacactgtatgcgaagggactgacctgtgaagccgacaccctgggctcctgtgattacgtttatctggctgtttatccgacacctgaaacgaaaaagtaa

SEQ ID NO: 20773 - DNA, 246 bp, Escherichia coli; identical to SEQ ID NO: 4533

SEQ ID NO: 20774 - DNA, 201 bp, Escherichia coli
atgagtacaatcaagttttcttgcccagaatgtggtggcgaagtctttgacacatcctttaagtcgcagggctctgacagtttcgcgggagccatctgcaaaaattgtggtcaccttgtaactgaagatgagtcctcgcagttcgatgacgaaatcgttgacaatatcttcggtgcacttaccagagactttctgaagtaa

SEQ ID NO: 20775 - DNA, 273 bp, Escherichia coli; identical to SEQ ID NO: 9286

SEQ ID NO: 20776 - DNA, 1401 bp, Escherichia coli
atggataagaagcaagtaacggatttaaggtcggaactactcgattcacgttttggtgcgaagtctatttccactatcgcagaatcaaaacgttttccgctgcacgaaatgcgtgatgatgtcgcattccagattatcaatgacgaattatatcttgatggcaacgctcgtcagaacctggccactttctgccagacctgggacgacgaaaatgtccataagttgatggatttatccattaacaaaaactggatcgacaaagaagaatatccgcaatctgcagcaatcgatctgcgttgcgtaaacatggttgccgatctgtggcatgcgcctgcaccgaaaaatggtcaggccgttggcaccaacaccattggttcttccgaggcctgtatgctcggcgggatggcgatgaaatggcgttggcgcaagcgtatggaagccgcaggcaaacccacggataaaccaaacctggtgtgcggtccggtacaaatctgctggcataaattcgcccgctactgggatgtggagttgcgtgagatccctatgcgccccggtcagttgtttatggacccgaaacgcatgattgaagcctgcgacgaaaacaccatcggcgtggtgccgactttcggcgtgacctacaccggtaactatgagttcccgcagccgctgcacgatgcgctggataaattccaggccgacaccggtatcgacatcgacatgcacatcgacgccgccagcggtggcttcctggcaccgttcgttgccccggatatcgtctgggacttccgcctgccgcgtgtgaaatcgatcagtgcttcaggccataaattcggtctggctccgctgggctgcggctgggttatctggcgtgatgaagaagcgctgccgcaggaactggtgttcaacgttgactacctcggtggtcagattgggactttcgccatcaacttctcccgcccggcgggtcaggtgattgcacagtattatgaattcctgcgcctcggtcgtgaaggctataccaaagtacagaacgcttcctaccaggttgctgcttatctggcggatgaaatcgccaaactggggccgtatgagttcatctgtaccggtcgcccggacgaaggcatcccggcggtttgcttcaaactgaaagatggtgaagatccaggatacaccctgtacgacctctctgaacgtctgcgtctgcgcggctggcaggttccggccttcactctcggcggtgaagccaccgacatcgtggtgatgcgcattatgtgtcgtcgcggcttcgaaatggactttgctgaactgttgctggaagactacaaagcctccctgaaatatctcagcgaccacccgaaactgcagggtattgcccagcagaacagctttaaacacacctga

SEQ ID NO: 20777 - DNA, 852 bp, Escherichia coli
atgactgttcaaacaagtaaaaacccgcaggtcgatattgctgaagataatgcgttcttcccttcagaatattcgcttagccaatatacgagtcccgtctctgatcttgatggcgtggactatccaaaaccgtatcgcggtaaacataaaattctggtgatcgccgcggacgaacgttatttgccgaccgataacggaaaactgttctcgaccggtaaccatccgattgaaacgttgctgccgttgtatcatctccatgctgcaggtttcgaattcgaagtggcgaccatttccggtctgatgaccaagtttgaatactgggctatgccgcacaaagatgaaaaagtaatgccattctttgaacagcataaatcgttattccgtaatccgaagaaactcgcggatgttgtcgccagcctcaacgctgatagcgaatatgcagcaatctttgttcctggtgggcatggcgcacttattggtttaccagaaagccaggacgtggctgccgctttacagtgggcaatcaaaaatgaccgttttgttatctccctttgccacggtccggcagcttttctggcacttcgccacagcgataacccactgaatggttattctatttgcgcattcccagacgccgcagacaaacaaacgccagatattggctatatgccgggtcatctcacctggtacttcggcgaagagttgaagaaaatgggcatgaacatcattaatgacgacatcaccgggcgagtacataaggaccgtaaacttctcaccggcgacagtccttttgcagcgaatgcgttgggtaaactggcggcgcaggaaatgctggcagcttacgcgagttaa

SEQ ID NO: 20778 - DNA, 276 bp, Escherichia coli
atggacatttttatttcgaaaaagatgcgcaatttcattttattagcgcaaaccaataatattgcccgggcggcagaaaaaatccatatgacggcttcgccatttggcaaaagcattgccgcgctggaagaacaaattggctatacgctatttacccgcaaagataataatatcagcctcaataaagccggacaggaactgtatcaaaaactgttcccggtttatcaacgactttctgcgattgataatgaaatccataactcaggacgtcgttaa

SEQ ID NO: 20779 - DNA, 294 bp, Escherichia coli; identical to SEQ ID NO: 5623

SEQ ID NO: 20780 - DNA, 495 bp, Escherichia coli
atgcgtggagaattttatcagcagttaaccaacgatctggaaaccgcacgggcggaagggttgtttaaagaagagcgcattattacgtctgcgcagcaagcagatatcactgtggctgatggaagccacgttattaacttttgcgccaataactatctcggactggcaaatcatccagagctgattgcggcggcaaaagcgggaatggactctcatggttttgggatggcttcggtgcgctttatctgcggcacccaggatagccataaagagcttgaacaaaaactggcggcattcctggggatggaagatgcgattctctactcttcctgctttgatgctaacggcggcctgtttgaaacgcttctgagcgcggaggacgccattatctccgacgcactgaaccacgcgtctattattgatggtgtgcgtctgtgtaaagctaaacgctatcgttatgccaacaacgattgcatgagctggaagctcgtctga

SEQ ID NO: 20781 - DNA, 144 bp, Escherichia coli
atgaaaacattaatttgtcagcagcctggcgttatggaatatgtggaaaaggatattcccacaccagcagataatgaagtgctgttaaaaatcaaagctgtgggtatttgtggtactggtaatggtgccaacttactgatttag

SEQ ID NO: 20782 - DNA, 1887 bp, Escherichia coli; identical to SEQ ID NO: 5694

SEQ ID NO: 20783 - DNA, 1491 bp, Escherichia coli; identical to SEQ ID NO: 8027

SEQ ID NO: 20784 - DNA, 1605 bp, Escherichia coli
atgaataaattagtgctagtcggacatcctggctcaaagtatcagatagttgaacattttttgaaagaaattggcatgaactcaccaaattattctacaagtaataaaatttccccagaatatatcaccgcttcattatgtcaattttatcaaacaccagaagttaatgatgtagtagatgagagagaattctcagctgttcaagtctcaaccatgtgggatagcatggttcttgaactaatgatgaacaatctaaataacaaactttgggggtgggcagatccatctataatattttttcttgatttttggaaaaatatagataaaagcataaaattcatcatgatatatgatcaccctaaatataatttaatgcgttcagtaaataatgcccctctctctttaaatataaataatagtgtagataactggattgcatataataaaagattgcttgatttttttttggagaataaagaacgatgtgtgttgattaattttgaggcgtttcaaagcaataagaaaaatattataaagccattgagtaatattataaaaatagataatctaatgtctgcgcattacaaaaattcaatattgtttgatgtggttgagaataatgattatacaaaatcaaatgaaattgccctgcttgaaaaatatacaactttattttctttaagtgcaaatgagactgaaattacatttaatgatacaaaggttagtgagtacttagtatctgaattaataaaagaaagaaccgaggttctgaagctttataatgagttacaagcctatgcaaacctaccttatatagaaacatcgaaagataacgtttcggctgaggctgcattatgggaggtagtcgaagagagaaattctatcttcaatattgtatctcatttggtgcaagagtcaaaaaagaaggatgcagatattgaattgactaaatctatatttaagaaaagacaatttttattattgaacaggattaatgagctaaaaaaagaaaaggaagaggtaattaaactttcaaaaataaatcacaacgatgttgtgagacaagaaaaatatccagatgatattgaaaaaaaaataaatgacatacagaaatatgaagaagagataagcgaaaaagaatcaaaactcactcaggcaatatcagaaaaagaacagattttaaaacaattgcatatagtgcaagagcagttggaacactattttatagaaaatcaggaaattaaaaagaaacttccacctgtgctatatggagcagctgagcagataaaacaagagttaggttatcgacttggttatattatagtctcgtattctaaatccctcaaggggattattaccatgccatttgcacttatccgtgagtgtgtttttgaaaaaaaacgtaagaagagttatggcgttgatgtgccactctatttatatgctgatgctgataaggctgaaagagttaagaaacatttatcttatcaattagggcaggctattatctccagtgctaattcgatatttggattcattacccttccatttaagttaattgttcttgtttataaatataggagagctaaaatcaagggctgttaa

SEQ ID NO: 20785 - DNA, 159 bp, Escherichia coli; identical to SEQ ID NO: 6188

SEQ ID NO: 20786 - DNA, 312 bp, Escherichia coli
atgggagttgagcagaatgatttcagggacatgttctccgtttatctctccggcccgccgcagacgcagcatgtgttttgtgtatccccggcggcccgggtcgcgcacacgggtctggcaggcgaagaatggctgaaagccttcccgctgcaggctttccagtacggtgatggtgggaatgtacgtatagttctggcttcgggacgtgtgtttatcttccccgaaaatccccggcacatagtgcatcagttcttcgtgtgtcagcggacggtcacggcgtatctggttcgtataaccaaaacgactggctag

SEQ ID NO: 20787 - DNA, 2532 bp, Escherichia coli
atgcattggatgcatttacctcttgatcactacagagcgcatttttctttctcactgttggcattaactattgccagcgcgttacctgcgtacggcggaaaattcaaccctaaatttcttgaaaatgttcagggtattgatcaacacgtcgatttgtcagtttacgactctcctgtcggccagcaaatacccggtaaatatcgggtatttgtgtttgtaaacgaagaaaaaatggcttcccggacgctggattttagtactgccagcgaagcacaacgcaaagccagcggcgagtcgcttatgccttgccttagccgtgttcaactggaagaaatgggcgtgcgcatcgacagctttccggcactgaagatattgccaccggaagcctgcgtagcgtttgatgaaatcattccccaggccaccagtcgttttgattttaatactcagacgttgcatcttacctttccacaggcagcaatgatgatgaccgctcgtggcacggttgatccttctcgctgggacgaaggaatacctgcgctgttactggactacagctttagtggcagcaatggtcgcaacgaaggttccggttcatctccagattcgaccagtgacagttattacctgaacttgcgcagcggtttgaacgtggggccgtggcgtttacgtaataacagtatctggaaccgtaccgatggcaaaaatcaatgggataacgttggtacatcgttaaaccgggcgattattccactcaagtcacagataacattgggtgataccgccacgcctggcgagatttttgatagcgtacaaatgcgcgggacattattggcatccgacgatgaaatgttgccggatagccagcgtggctttgctccggtggtgcgtggcatcgccaaaagtaacgctgaagtgagtatcgaacagaacggatatgttatttatcgtacctttgttcagccgggcgcatttgagattaacgatctctacgcaacctccggcagcggtgacttgacggtgatcattaaagaatctgacggaagtgaacaacgttttattcaaccattttcggcagtggcgattttccagcgtgaagggtatctgaaatacagccttgctgccggtgagtatcgtgccggtaattacgacagcggtaaaccgcgattcgggcaatttactgccatgtacggcttgccgtggggaatgaccgcctatggtggtgcgttgctatcggcagactacaacgctttagctctggggctggggaaaaacttcggcaccattggtgcggtatcggtggatgtcacccaggcgaaaagtcagttacgcaacaatgaaaaagatgaagggcagtcttatcgtttcctctattcgaaaagttttgagggcggtaccgacctgcgtctgttgggctacaagtactcaaccagcggttattacaccttccaggaagcgaccgatgtccgtagtgacgccgacagtgactatcggcgttatcataagcgcagccagatacaaggtaacatcactcagcaactgggagactacggttctgtttacttcaatatgacgcagcaggattactggaacgttgatggtaaggagaactccttaagcgctggttatcacggtcatattggtcgtgtgaattacagtatcgcctatacctggacgagaagccctgaatgggatgaagacgatcgactgtggtcatttagcctctcaataccgctgggtggcgcatggggcagttatcgtatgaccaccgaccagaacggcaagacgtcacaacaggcctctgtcagcggcacattactggaagatcgtaacttgaactataacgttcagcagggttataccagtaatggggttggcaacagtggtagtgtcaacatgggttatatgggaggttctggcaacattgacgtgggttataactattccaaagataaccaacaagttaactatggtgtgcgtggtggagtcattgttcacagtgaaggtatcactctctcgcaacccttgggtgaaagtctggcaattgtttctgcgccgggtgcgcgtggtggacatgtagtaaatagcagcggcgttgaagttgactggatgggcaacgcagtggtgccgtatctcacgccatatcgtgaaaccattgtggaattgcgcagcgacacgttagggcaaaacgttgaattacaggaagcgtttcagaaagtcgttccaacgcgtggggcgatagtccgttcccgctttgatacgcgtgtcggttatcgtgtgctgatgagtttgaaacgggcgaatggcaacgcagtaccgtttggtgctaccgcagcgttaagtgatgagagcaaacctgccagcagcattgtgggtgaagaaggacagctttatatcagcgggatgccagaagagggcgaattgcaggtgagctgggggcacgagcaggcgcaacgttgccgcgtgccattccgcttgccagagaaaaaggataattcgggtatcgtgatggttaatgtggtatgcgataaataa

SEQ ID NO: 20788 - DNA, 759 bp, Escherichia coli
gtggcggcaaaagacaggattcaggcaattaagcaaatggttgccaacgataaaaaggtgacagtctcaaatttgagtgggatttttcaggtaaccgaagaaaccattcgccgcgatcttgagaagttggaagatgaaggctttttgaccagaacctatggtggtgctgttttaaatacagcgatgttgacggagaatatccatttttataagcgtgcttcatcgttttatgaagagaagcagcttattgcacgcaaggcactaccctttatcgacaataaaaccaccatggcagccgattccagtagtaccgtaatggaattgctcaaattgttacaggaccgtagtgacctgacgttgctaaccaactcggcggaagcgattcatgttctggctcaatcagaaattaaagtcgtttcaacggggggggaactaaacaaaaatacactttccctgcaaggaagaattactaaagagatcatcagccgctaccatgtcgatatcatggtaatgagttgtaaaggtcttgatattaacagcggcgcgctggactctaacgaagcggaagctgaaatcaaaaagacaatgatccgtcaggcgacagaagttgcgttattggttgatcactctaagtttgatcgcaaagcttttgtccagttagctgactttagtcatattaattacataataactgataaatcaccgggtgcagagtggatagcattttgcaaagacaataatatccagctggtgtggtaa

SEQ ID NO: 20789 - DNA, 354 bp, Escherichia coli
atgccccacacagtacattacccggaacaaccatcacagggacatgtgacgcctcccccgtcccgggatgcacctgcccgttttgtactatgctgcgtagccaaaaccgataacatccgcatttacctggtattccatgatgagttcacgcagcgactgatagaggaaggaaagatggttagtaaaagcaaggcgcattgccgccgcatgctgcaggcattgcaacagacgagagcaggtatttttgaccagttggaaaactgccagcatactttgcccgagtatatcgccatctcatcggaaaccagtgcaactcttattcatcgggttccaccagagaaaaagaagaaatga

SEQ ID NO: 20790 - DNA, 327 bp, Escherichia coli; identical to SEQ ID NO: 5216

SEQ ID NO: 20791 - DNA, 960 bp, Escherichia coli
atgaataaggatgataataaaaaggatataaaaagaactgcaaaaaataatgctatagtcaacgatgacatggcaaaaagaactgcgcatcattcactttattctaattcacaagtatcgaatagtacatctacgtatacaggaggggtacaaaaaattagtaatttgcagatagataataaaactgcaacagcttcaaataaagagcgggaaagtatatccatcaaagacgcggcaccacaaaaattaataaaaacctctctttttgttaatgaaaaagaaatgttgcatgaagctataaaatacagttcaaaagcaactgtgccggtgatggataatactgtctctaatgccattttatctaattactttgttaataataattctgaatctacaatttcttttaataaagagaatgtaaaaaaatatacaaaaagtgatattgataacatcctctggaaaaatatcaatgatcaactaaccaatttttcgcaagagttgaataagagcaaaaagaatattaatgatactaaaagaaaaataggtaaggtaatgtcttcattatctcagcaaactgcaaagattgagcaatttgatgcaacattatcaaatgctgaaaaagatatacatgagaaagttaaaagctttgaatcggaagtaattacagcaaggaactcaatgctgggtgtcattgctttatttgcttctttctttactttcatttctatttcagtaaacgtattttctcgcgatatgtctttaagcatgtcaatctcagttttgttagtgatatggtcgtgcttaattagctttatctttgtttttatggcaggaattagcaagggaggagctttttttacaagctcatcatttattaagcatgccatttttatggttgtgctttttatttcatctttcgcactccctaaagttatttttaatatctttgcaattagctga

SEQ ID NO: 20792 - DNA, 666 bp, Escherichia coli
atgaaaatcatacagttacaaatggtatttttttacgattcatcaacgactgtcgatttcgatggaatgtcgtattttattaggcaaacttttaaaaagaaggcaggtattgaattaacaaacaatatgatgttgggcgttttacctatggataccccaccagagattcctcgtctccaattgttttctatagataataaatttagagttcaatgctcactgcagagatgtgatttgttttttgaacgtatggattctgagcaagaggtagacttacatttgtttcaagaagttttcgatagtgtggttgatatccataaagaactcaataaggatattatcagaataggcttggtggccgttaaggcggaattaaacaacaacccaaacaaagagattgttaaaaactatcttagtaacaacatgcagaatgatagcgaaataattgaagatattaatttaatgtataataaaaaattcgagtttgagcagtccatatttaattgtcatttgtcgattatgtcaggatatgatattgtcagagaacaaccaatgctagtgaaacagatcgatgtgaatacaatcgagagttttatatttaaagataaatataccgcagaaaaaacaaaaaaagcctttttaagtaaagtgaatgaaattcagtaa

SEQ ID NO: 20793 - DNA, 138 bp, Escherichia coli
atgatgtcagatatcacaatctcccgcccggaactggtcaacggacatacggacctgctcaaccagtatccgccacattctggctgtacgaaagagtgcgctgctgcaaatcgacacacttatccggcaactggctga

SEQ ID NO: 20794 - DNA, 684 bp, Escherichia coli
atgagcagaattatcaccaccaccgtgtatacactgaatgagctatcctccaccgcacaggaaaaagcccgcgactggtaccgtcagcatcatgctgacagcaactggtatgaaaacgtgtatggggacttcagggaggtctgtggcattttcgggattgacctccgccagcgtgttatccggctcagcaacggcaggtttatggaagagctgtgcatctggttcagcggattctgcagccagggggacggagcctgttttaaaggacgctggcactggcagtcagcaacagccaggagagtcggggtgtatgccccgcaggaccgtgagcttcatcgtatcgcggatgccctgcaggcggtgcagaagcgtaacttctggcaactgcaggctgaaatccaccaccggggacgttactgccatccgtactgcatggatatcaccgtcacccggaacagtccgactggtcaggctatgacaaccgatgcggaagccgcagtcagcgaagccctgcgcgacctggccttctggttgtaccgtcaactggaaaacgagtacgactggctgacctcagacgccgctgtggatgaggcccttctcatcaacgaatataccttcaccgaagccggtctgcgcgccggctgccccgtcatcgttaaactatcattcaccgattttctgtga

SEQ ID NO: 20795 - DNA, 252 bp, Escherichia coli
atgacactacgcagaacatctgtggacacggttttcgcacatagtgcattaattgagtctgggttatggtcagaagatgctgtggagcttcaaatgagccacaaggaaagcaacagcgttcgtgccgcctatacccataaggccaagcatcttgaccaacgccgcctgatgctccagtggtgggctgattttcttgatgcgaatcgggatgggatggtcaggccgtttgagtgtgttgccaatagattatga

SEQ ID NO: 20796 - DNA, 450 bp, Escherichia coli
atgcaccacaccatgaaagtgagagtctggtacatattgaatggggtgcgcggcgagtctgcggcttacggttgcactccgtacatctacgatactagacatggaccaacaagcgacggcgaagcgccgaagaaatcctggacggatgctgttaagaaagcgctatcccctctcggattcagcgccgatattttcatgggcctgtacgacaatccggaataccgccagaggaataaagctgagtttgatatcaagaatgccagcgagaatgcggaagatgctacccgtcttcgtaaggaactggatgagaagctgatcaacgttgccaatacgctggccgccgcggtaaccaccaacgaagtaaacaaggtatttggcctcatcgcccgcgaagtggatgtacaccgaaaagcagcagaagccaaaggcgataaagaatattcatcgtaa

SEQ ID NO: 20797 - DNA, 426 bp, Escherichia coli
gtggctgagattcagttagtaattcgttgggttattgcgacatggcgccgtcgtagcggaagcgttccgaaacctgcgaacatttgccgcgtaaaccggtttgacggatacctggctgacgctgagacgtgggccactgctgaggctgccgttgaccctgctgaagttgtgaagggctacaacgagattctgggcgacctgctacctatagctgaaattgatactgaccgccgtcgggcaatcctgcgcctgctggcacatatgcgcacgcaaactcttggcgcatttatcggctacttcgaaaaattccgcgataacgccccagacttctatttcggcggcgaatatcgcaccggctggcgggcagggtttgattacctgatgaagccagaaacactgcgtaaaaccagggaaggggcattatga

SEQ ID NO: 20798 - DNA, 1392 bp, Escherichia coli
atgaatccagaagaactggaagcgatcgttctcgctggtctgattaacggtggcgcgacgcctgacgcgtttgatgtgattgccactactccggaggaagccttcagcatcgtgtttcaccgtcgcgctttcagcgaaatcaaaaagcaggcactggcgaacggcatgatcgacatgttgtttatcagcgaagcgctgggcggttccagccttgcggatctgtctcaaatatcccggatcccggcaacggtaccgaatctgaaaggctatgccgggaaaatggtgcgggcatggcggagccgcaaaatggcggcattgttgcaatctggcgcggatggtatccgtaacgctgtaaaccagagtcagcgtgatgaggttattgaatctcatgttgctcaggtgctggatatgagcgccgctaccggcacagtccagccggtacacatcaaagagctgttaccgctctacattgacaccgttgataaacggatgtctggcgacgcgcaggaaatgatgctgaaaaccggagtcgaggatctggatgtcgccctgggcggtatcaacatgaccgaccttgttgtggttgccggtcgtccaggcatggggaaaacggaatttaccctgaagattatcgatggcgttaccgcagatggcggcggcgcactgtttttcagcatggaaatgggcgctcagcagattgttgaacgtaccgttgccggggctgggaatatgtccacgtcgcgtctgcgtaatccaaaagaaatggacgatgaggatttgaccagattaaccgccgcgcttgcaatcatgcaggatcgcgatatctggattgttgatgccactgatttgacgattgagcagatccgcgccattgcagagactcataaacgccgttatccgcacctgaagttgattggtgttgattacatgggcctgatcaaaaaaccgaaggccgagcgccacgatctcgctgtcgggcatatctcccgcaacatgaagactatggccatgcgtctgcatacccctgtttttgctcttagccagctttcccgccaggtggattctcgacctgctggccagcgtcgcccggtgatgtcggacctgcgcgattccggcagtgttgagcaggacgctgacagcattttgtttttgtaccgcgatgaagtttacacacctgattcacctgcaaagggtatcgccgaggtgattatcggtaaaaaccgttctggcggggcaggtgaaattatttatcaggaattccggaatgggcatttcctgccagttgatcaacacgtagcacgcgaaaaattacgcatccagaaggaggcagagcaaccgagaaaacgtgaaaaacggtattcaaacaaaaactttaatacggacccattttaa

SEQ ID NO: 20799 - DNA, 291 bp, Escherichia coli
atgataagtgttgattcatttagaaaaataacaaaccctgtttttaatgacgagcatgggttatctataaatattatttgcgatattgacgggattggaaacgacattccattcaccgcaatgaaaaatgattgcgaggaacacggtagggttttatatgaaagagcgctgagcggggattatgggagcatttctaaatttgtaaaaaagagcagacgcaaaaactccagactacattacggactgttggcgatctgtcaattgaggcattctcaattcagtgtgcagtag

SEQ ID NO: 20800 - DNA, 1503 bp, Escherichia coli
atgagcgtaactaattttttgcacggtattcgcacgctcgaatacgacgacggcacaaaagagatcaacacagtagatatttccgtgattgggattgttggtactgcgacgaacgtcgcggaggctacgagagcatcattaacgtggggctcatcgctggctgataatctcgttgagttttcaactgtatcaccgggcagcgacgggaataaatgggttgttgaaattgtagatatgacagttgagggcgcaacctgcactccaggatatagcacgctgcccgacggaacaaaaaaattaacgatgattacggagccgggaatgacccccggcaaaatgtatgatcagaatcaggaatatagagaggggaaaacagacggagagtggattaatgtaacttttggtggcgagcattccggaaccggtacagtatttggtcttccaccaacaaatttatcaggtggaacagatgacgcattcccgattaattctcctgtattaattgcaggtagtcagaagaaagccgccctgctcgggaaatacgggactctgccccccgctatttctgatattttaaatcagactgatgcattaatcgttgttgttcgcgttgtagagagtagcgacgacgctgatatgagcgaaaatgttatcgccggaattaattcgcttttgacgtcagcgcaaattaacgaagttaccccgcgaattattatagcgccggattacagcgcacgagacgaaatagcggctcagcttgaagtggttgcaaataaactccggggagtgtgttatatcgactctccgcgcgctgctacccctgcagacgttgtgaatcgcaggcaaaaactcggcggacgcgctgagttgttgcgacctcgcgtttattctacgagtgatgtcagtgggttatctcgtccgtattcagctatcgctgctggtttacgagcccgaattgataatgaaaaaggattctggtggagtaaatcgaaccagaatatctacggagttacagggcttgaacaagtcgacgattttattattggtgagacaaactgcacagcgaacctgctgaatgccagccaggtcagcacgattattcgctatgacgggttcagacactggggtaactatttgtgcagcctcagcccgcaatggtctttcgagagcgttcgtcgaacagctgacgtaattgaggattctatagcccgggcaatgatgaccgattttattgttcgtccgatagacctgcacctcggaacagacgttgtcgagtcgataaacgcatatctgcacaaattagaggagcagggtgcgattaacggagggcgtgcgtggttagacagtgagctgaatacaaaagaaagcctggctgcgggtaatctttatattaatgttgattttggtccgaaatctccggcacaaacaattacgttaatgtaccgcattaataatgactatacagttgaagcactggcctccctttttaaagaagcagcctga

SEQ ID NO: 20801 - DNA, 1353 bp, Escherichia coli
atggactttacggaatatcaagaagaaataatcgaagatgttaaatcttgccttgaaaacttacaagtccaacccattttattcatgggtgcaggtatttcacaacgatatataaaagcgcctgactgggaaggtctattaaagcaactagcggaaatatgccccttgatcaaacgcccttatggttactacagccaaacaaagggtgataacaaacctttgattgctagcgatttttgtgacttctatgctgaatgggcttgggatgatggcaaggatcgctatccagagacatactttgaaggaacgactccaaaagatatttatattaagcatgaaattgcatccattctgaatgaattatcaaactccgttgatttctcgaacatggaatatacagaggaagttcagaaattaaggaaagtaaaacctcatgcaataatcacaacaaattatgacgacacattagaaaaaatatttgacaattatcaggcaatagttggtcataacgttgttaaagtgaattattcatcttatggcgaaatcatgaaaattcatggtagcagtcatgaagttgaaagtattgttattacaaatgaagattatgttgatttctataaacgtaagaaatatatcagtgctaagttgctaacatattttgctgaacaccccttgtttttctttgggtacagtatcaatgatgaaaacataaaggcaattctctctgatatagatgaaatcatcgctcccaataatgcattgattccaaatatttatcttgtctccttcagtaaggactgcgaggccactggttctcatcaaaaggaattgctaatcggtgttggtgagaataaaagcgttcgaatcaaggtgatatacgcaaataattttggttggatttttgatgcgttatcatctaatacaccggaaattagcgttaatccaaaacttgtgcgtgcatttctagccagaacgtacacattcgcatcagaatcccttgttaaacaagaacttccatacgattttgagatgttccgcaatattgcagagcatgatgatgcattagcaaaaatgtatggtatcgctgaactcaataatgggcaggcactaaatgctagtttcccatatacaatgtctgatctggcaaggattctcgacatgggatcgtggcactatgttaatcaagaattcgaaaaattaagaaaactaaccgacttcaacattaaagcatcagacaacaattatcatgttttcattaaatctgggaaaagtggtgtcggaaaatactcatctgaggcacttgacttattgcgaaaattaataaacggggaacagtttgagttaaacccataa

SEQ ID NO: 20802 - DNA, 1257 bp, Escherichia coli
atgaagctcaacgccagacaggtcgagaccgcaaagccaaaagacaaaacctacaaaatggccgatggtggtggtttgtatcttgaggtttcggccaaaggttccaaatactggcgcatgaaatacagacgtccctctgacaaaaaagaggatcgtcttgcgtttggtgtttggcctactgtgacgcttgctcaggcaagagcaaaacgcgatgaagctaaaaagcttttagtacagggcatagacccaaaagtcgtacaaaaagaagctcgggccgagaattcgggggcatatacttttgaagctatcgcccgagaatggcatgccagtaacaagcgctggagtgaagaccatcgatcgcgcgttcttcgctatcttgagctttatatattccctcatatcggttcgtccgacattcggcagcttaaaaccagccacctgttagccccgattaaaaaagttgatgccagtggcaaacacgatgtcgctcagcgcctgcaacagcgcgtcacagccattatgcgttatgccgtacagaacgattacatcgactcaaatccagccagcgatatggctggtgcgctatcgacaaccaaagcgcgacattaccctgctttaccttctagccgattccctgagtttcttgcacgtcttgctgcatatcgtggccgtgtaatgacacggattgcggtcgagctttccttgctaacttttgtgcgttccagtgaattacgtttcgcacgttgggatgaattcgacttcgataaatctctttggcgtatacctgcaaagcgagaagaaattaaaggtgtgcgttattcgtaccgaggcatgaagatgaaagaggaacatatcgttccgcttagtcgacaggcgatgattttattaaaccagttaaagcagattagtggtgataaagagctgctttttccgggggatcatgacgcaactaaggttatgagtgaaaacacggtaaacagcgcattgcgtgcgatgggctatgatactaaaaccgaggtgtgtgggcatgggtttaggactatggcgcgtggtgcgttgggggagtcggggttatggagtgatgacgcgatagagaggcaactgagccactcagagcgtaataatgtacgtgcggcatatatccatacctccgagcatttggatgagcggcgtttaatgatgcagtggtgggctgattatttggatatgaaccgtaataaatatattacgccttatgattattcaaaatacaaataa

SEQ ID NO: 20803 - DNA, 795 bp, Escherichia coli
atggctgagttattgcgagagcaggaagttaaaatagccctaattgaatggttatataaaaaaggcatgcttagtgatgcaacgatcattaatgaaatggttgttgctaactggagcagaagagctgatttggctattgccaatggaagcctacaagcttttgaaataaaaagcgattttgactctcttaagcgcttggatggtcagttaaaaatttttaaatctagcttcgaaaaagttacaattgtgtgcgcgccaaaatttaccagtgaagtatctaaacgggtttcatcagatgttggcgttgtagaatttcaatctaataatagtagcgtacgctttaaaataattcaaaaaggaagggtttgctctcgcttaaataaatttgtttatttgggttttttgcttaagtctgagcttaaagatctgcttaatcagtatggaattacattttcaaatgaactacatagggattgtcttgaggttttggcatctaagttatctttaaacaagattagagaatttgtcattacatctattaaaaataggtatcatgcgacatctaatgattttttatctagactccatggtaatcaagaaatatctataaacgatcttgccttattgagcaaagctaaaagaaggaataattctttggttaagtttgagtttaaggcttgttcggagaaatctttaaatgaataccataaggttgatgttgactctatagttaggaaatatggcgatgatgtttcctatattccggaaaaagtacttaaaagggttgtgggctag

SEQ ID NO: 20804 - DNA, 1068 bp, Escherichia coli
atgaaagtatattttgaaaattactcatactatccagccctaagaacacgatcagcagaaatgaccggactgaataatttatcatatgagaataagaaaaaaatattacctttaatttctttggggaaatggcctcgctcggaagaaatacaggtatcgttagataaaagtttagaagtgatgagtaatctcccatttattttggatgtcacaaaggataattctcatcattgcgcgtcaagcttcgaactactctctcctgagaatggttttaaaaactggatagagttttgttccagaaatgataatattattccagtagtccagatgccggattcagcaaaacttagagatatatctatccaagccagggttttagaggaacttaaaggttcaattgcatttagaattagaaatctaaatacagacattaataaaaccctgacgtcactagtatcgatgaactctccagaaaatgccatagttttcatagatttgggctacattagagggaatgtatctgctataacagctgcagcaataaattcgattaatcagattagaactgagattcctgaagccataattagtgtgctagcaacaagcttccctagttcagttacaaatttttgccgtgaaaatggacagtccggatatattgatgttattgagagagaattgcatcaaaatattggtggaagtgatgtcgctatttatggcgatcatggttcaattcattcagtagtgtatgacaacataattgggcgatatgttcctagaattgatatagcgttaaatgattcatggtatttcgagcgccgccctgggatgaataaagaagggttcattgaagctgcgaaatcaattttggcagagtatccacattatcaaagggaggactcttggggagctgcaatgataagaaatgctgctataggggatatagcaggtatgggaagtccagctaaatggattgctgttcgagtgaatctacacttaaataagcaaattgagctatctgaagctctacagtatggctttgatcatgatgaggaagatcttatctaa

SEQ ID NO: 20805 - DNA, 402 bp, Escherichia coli
atgctgaatcatgtatatggattaattggcgttgttgggaccataatcactattgctactagcttcatccgcaaccaagatatttcacaatggttgctcgtttgttctggatggttagctgctttacttattggatggtttacacacagaacgattaaagcaattagcaacaaccacacgaatgttataaaaagtaatatggaggtaatcaagagtcataatgaatccaatcaaaacttgatggctgaaaacaaagaattgattaaagaacttgcaagaacttcagaacagaaagagaagatggaaagtatagctgcttatcttgctactcagaacccccaaattaacgctatgccaagaacagcaagccgaccagaaaatatcgattcggaggctaattaa

SEQ ID NO: 20806 - DNA, 297 bp, Escherichia coli
atgttcacccttcacccattattcaccacctatcatactgaaataaaaggagaaaaaagaaaggtgaacagtgtgaacagttctttcgaaaaaaaattttttatgtggataaaagatgcactggtttggatccgggctacggatccaaacttactgattaaaaattatttaactttccgatttattgatgggctgaaaatagattggtcagaaaaacagtgggggcacaaaagggggcatatttcattgttgtgttttattatttgttttttatcattaacttattttgatatttga

SEQ ID NO: 20807 - DNA, 1050 bp, Escherichia coli
ttgattaaggttgttgatttattctgtggcgcgggtggcttgactcacggtcttcagaagtcggggcttaatgtagttgcaggttatgatatagatgcagcctgtcgatttgcctatgagacaaataataaatcactctttgtccagaaaagtgttacagacattgaggacggcgaattagttaaatatttcgaaggagcgaaggttcgagttttggctggttgtgccccatgccaacctttttcaagctataccaatagtgctaaattaggggtagtacgttcaaaagataaaagatggtctttgctttatagctttgctaagcaaattaaatttgcaaagccagatattattacaatggaaaacgttccccgagtggtgaatcataaggtttttaaggacttcattaagtctcttaaaaatgatggctattttgtttggtatggggtggtgttttgtccagactatggaatggcacaaagtcgttcaagattagtgttattggcatcaaaatatggagaaatagaaataattccaccaactcatgagaagaatgattataaaacggtgcgagatataatcggtaatcttcctgaaattagtgccggtgctgttcacgctggagataaactacatcgctctgcatcattatctgatattaatataaaaagaataatggcatcaaaacctggtggaacatggcgtgattggccagaagagctaagagcaaaatgtcatacaaaagaaagtggttctacatatactgctgtatatgggagaatgtgttgggataaacttggaccgacaattacaactcaatgtattggatatgggaatggacgctttgggcaccctgtccaaaatagagcattaagtttaagagaggctgcgctattacagtcattcccagaaaagtatgagttttggcctgatgatgtaaaaattgaaatgagaacagttgcgcgtttaataggtaatgctgttcctgttaggcttggtgaggtcgtaggtgaaactattttaaaacatttgtcagaaatgaatatttaa

SEQ ID NO: 20808 - DNA, 1959 bp, Escherichia coli
atgtcagatttcgaaattaaaattgatttgaatgtgctaaatcacctagggatgagtctctattccaatactcccgcggtactaactgagattatatcaaatgcatgggatgcagatgctcaaaatgtagaaattacacttgatgttgagaaaggagaggtcatcattaaagatgatggtcatggcatgtctaaagatgacattattaataagttcctaaaagtcggttatgctcgcagggaacatggaagagccaaaagcgatcatctaaaacgtcaagttatgggcagaaaaggtattggtaagcttgccatgttttcacttgccaataaaatccaagtttattcgtacaaaaagggggaacagcctcaggcctttgaggtagatgtcaaagatttacagcaaagtatcaaagaatcaaaaaactatattgctgactcccttgaaatacccgaaaatcttgcttacggcactacaattaaattatttgaactaaaaaaagccattgataggactcaaacttacctcagaaagcgaatagctcgtcgatttagcattattggccccaaccataactttacagttaaaattaatgggaccgatattacaccggcagatagagatttcctttcagatctcgagttcatttgggaatttggcgaatccgaccctgaaaggataaaatcctgcacaaacatcacacaaaaaaacatattaccaaatactattacctttgaaggaaaagatgtaaaagttagtgggtacattggcagtgtagttaagccatcacagttaaagaaagaccctgaaatatctaacaacagcattactgtaatctctcacggacgtgtttttgaggaggacatattattagaatttggaagtgctaaagtattcaccaattatctggtcggtgaaatagtcgccgattttctagatgataacgaaaagcctgatatggcaacatcttctcgtcaaaaactacaacagaatgatccaagataccctgtacttaaaggttttctggaaagaacgctacaactaatcgataaagattgggataaatggagacgcgaaaaaggagtaaatgaagttaaaagcaatactccaatagtaagtgaatggctgaattctctcaaaaaacatgagagagaaagtgccgaaaagttaattggacgagtaaacacattccgtttttctggtaatgaggaagaacaaaaagcagcaagaaaaaccgtattaaaaaatacggtattagcctttgaaagacttagaattcaagacaaccttgatgcattagataaaataagcaaccttcaatcagaaaattttaaagatgtatttgcatctgtcaatgacattgaagcaagcatgttttatgaaattacttcgcaacgccttaaagtaattgaaaaattccaaaaaataactgatgaaaatcagcttgaaagagctgtacaaatgtatttatatgatcatttatggttattggatccttcatgggaaagagtcacaggcacatctgttatggagcaaacattgaccaaggaactaaaacagataaaccctgatgctgctagcggtgctcgtattgatatcgctttcaaaaccgtttctggcaagcatgtaattattgagatgaaacgacctaaagtgcacccagatataatgaacctagtcgcacaaggtaataaatatgtacaggcaacgacacaatggttctccaataaccctaaaaattgcccaggtggaaatataccgcatatagaagtaatattcctggttggctctggatatttacaagagaaccaacactttataaatatgcaattactttctatcaatggaaaaatattgacatataatgacctaatcgtgcaatcaaaacaagcctatgctgaatatcaagacaaaaagaatgatgcagctagaattatgaaaatagttgagggaatctaa

SEQ ID NO: 20809 - DNA, 318 bp, Escherichia coli
atggccggtgaggctgacaacgtttttgccctgaccacggtatatgccacgaaagcgcaggccatgcgcgccgctcaggcgaagtgggataaactgcaacggggtgtggcggagttctccatcagcctggctaccggtcgggcagatatttacacggaaacaccggttaaagtgtcaggctttaagcgcgtcatagacgagcaggactggacaatcactaaggtgacacattttctgaataatagcggcttcacgacgtccttggagcttgaggtcaggctttctgatgtggagtacgaaacagaagatgatgagtga

SEQ ID NO: 20810 - DNA, 423 bp, Escherichia coli
atgggggatctgtacagtcatcgctgggaaatcgaactgggatacagggagataaaacagacgatgcaactgagcaggctgacgctgagaagtaaaaagccggagcttgtggagcaagagctgtggggtgtcttactggcttataatctggtgagatatcagatgattaaaatggcggaacatctgaaaggttactggccgaatcaactgagtttctcagaatcatgcggaatggtgatgagaatgctgatgacattgcagggcgcttcaccgggacgtataccggagctgatgcacgatcttgcaagtatgggacaacttgtgaaattaccgacaagaagggaaagggccttcccgagagtggtaaaggagaggccctggaaataccccacagccccgaaaaagagccagtcagttgcttaa

SEQ ID NO: 20811 - DNA, 1473 bp, Escherichia coli; identical to SEQ ID NO: 1933

SEQ ID NO: 20812 - DNA, 396 bp, Escherichia coli
atgattcaagaggatataatacgagcgcaggaagaacaaggcagacttaatcgtattgaagaacagcgcaagaaagaagaacaaatacgcaaagcgaaagaaagagaggagtatgaacgacctttaaaggcttttatttcttcaaaaataaaagaaagtggtttatctgagaaggatttcaaaaagcaggtttgttcaagctgcgactatctgaaagatcgcgcaacaaaatcaagatactttactgaacgacctgacttgttagaaaaacattataatgaaagattaattcgttcctcgataaaaggcactgatggtaaagtaggaaaaatagaaatttatacggatacaggcgtgcttatttttgaacagtataaaacacctcagattgtttaa

SEQ ID NO: 20813 - DNA, 168 bp, Escherichia coli
atggatattgaagatctgacaaaaaaggtgaaagaattagcggctaagagaaccgatgaagaacggttaaaattattagtggacgctaagatactgactaagaacggcacatttaactctcggttcttctcaaaagaaacagtagctaaaagtaaaatacaaaaatag

SEQ ID NO: 20814 - DNA, 1617 bp, Escherichia coli; identical to SEQ ID NO: 16548

SEQ ID NO: 20815 - DNA, 483 bp, Escherichia coli
atggctagattgcgagaggtgcttaacgcgattttcagcgccccccgatctggaaaatccagaatccccaaatatcagcaaggaattttcttgcgtaatcaacatcgtttttacctattaaatcattacacagaaagcctttctgtaatgtctctcactaaactttcactaaacacgagaatgatcggttttatgtcggatcagatgctagaaacagcaccacgtctcacaagggctgtaagcgatgaaaccagtgtttatgcgggtgcaggtcaaaatataggccaaaatacatttaacataataatcgtaatatgcactaaggaacacatagaacgccttgagttgatgtatcaggggaaaagtgatggattttttacgtatgagcacgagagggcttctgttgacttttgtatgctatggaatataattaaaggttttttgtttttattgtgtggtgtggtggattacacagggggatag

SEQ ID NO: 20816 - DNA, 1269 bp, Escherichia coli
atgaaaatgatttttaccggtaaggtcagcggagaaaaaaccgtgctgactgtcggaggtcgtcatacagttaaagcacagcccggggagcagtatggactgatcgatgaggtgaccggcctagtgcctgacggtgttgaggcggatcgctccggtgatgatttaattctgcgtaaaaaggaagaagatactgaggtccggatagagggattctgggaagaatgccagcccggggaaacacagtgtacggcggtatttaatattgttggggaagatggacaggtcaccgaagccgtactgactcaggatggcccggtgctggatgatattactgccggacaatcgggaaccttgtcagatgatgatcgtggcggttttatatggttgggcggtctggcatttggtgggggactggctgctatggctttagctgcaggtggcggtggaagcaaacatagacatgaaaatgatgactctgatactacagccccatcgtcaccagcactgaaggcagaggatgacggttctgtttctgttgagctgccgggtgatgccaataaaggcgataccgtggatgtcacctttgaagatgaaaaaggtggtaagcacaccgtgacgctggagaaaggggataacggctggacatccagtgatccgacgctgatcccggacagcactggcgataaagcgaccattccggcagataacgtgaaggataacagtgaagttaccggggttgccaaagatccgagcggtaatgaaagtgacccgtcaaccgtgacgtcaaaaactgatggtgtggcagatgccccggttctgagcattcctgaagtgactgacggttatgccaatgctgatgagctgaaagacggtttgcaggcagaggtcacgttgccggcaggcacggcagaaggtgcagttattacacttaccgtgacccgtccggacaaaaccacggagaacgtgacacataccgtgactaaagatgaagtggctgccggtaaagtatccatggatattccgaaggatgcggtgattgacgggcagaacagcgtcagtgtcactctgactcagggcagtaacccggcgaaacccgggaatgtggttgattttgctgccgatacccagatcccgggggataccgatggtgatggtgcaacagatgcaacaccggtagttgccattccggaagcggcagatgccgaagagctgaaggatggtgtacagaccgaagtcacggtacagtggcgccgtcggcaccggtattaa

SEQ ID NO: 20817 - DNA, 237 bp, Escherichia coli
atgattcacctgttcaaaacctgcattattactggcgtcattctggggttaacgtggtctgccccactccgggcacaggatcaacgttacatcggtatacgcaatacagatacgatatggctcccgggaaatatttgtgcttaccagttccggctggataatggcggaaacggtgaaggatttggcccctcaccatcactctgcaactcaaagacaaatatggtcagacgctggtga

SEQ ID NO: 20818 - DNA, 519 bp, Escherichia coli
atgacgattcttgaagaaatggaagcagaagcatggcatatcctaacaaccatctatacgtatcagcggttgatggaaggccttactaatagcagtacaagatatgagcttgccaatcagttggtagccctcaatgcattgttggaaatgttggtgatccgtttagcgcgtcttgcggataaaaggaaagatgtgagatctgtatcaatgtttttgaaacgcggctcgtattctgcttcaccagaggctgtgaaattggcagctgaaaagttccttgcactcgcagaaccagtattaaagattaggcatgagcagattgcacatatgaagcccggcacactcagtagcttcgagcctcgagaacttccaaatgaagctctgagagcaactgaggctctaatcgatctcattgacattgccagagatcaccctcagtcttacacataccgagttggctcacaggagcctgccattaatttgagagcttcagtagagactagcgaactagttaaaatctaa

SEQ ID NO: 20819 - DNA, 198 bp, Escherichia coli
atgaacggtgggtgcagggagcaaaaaatcgtacagttctctttcattataaaaacattattactgatcttaaccaagcgcattcatgcagagcgtccctgggcgcatattgcccatttcatggagaaattcttcgtaaactggatcaaaggaatgaagttcagagggttaaactctctattgacgttccatttctag

SEQ ID NO: 20820 - DNA, 540 bp, Escherichia coli
atggacagagtcattcttgatgacgttctatattcattgagcctacgatacagagtgaatctatcagaaaacgtagttgaaaaatttattgaaagcgatagcaaagagaaggttgaacatctcaggaaggaaattgctaggtttatcaggtttgctaaagaaaactttgatcttatccgtggagagtttatcgtttttgtacgaagagaatcctctattaaagattcggagagagctaatggaattttagaagataactctgatactaatttcctatttcgatatctcccccctaatattgcccgtctgtatgaaaatagactatccgtacagaatatagaacgtctgggcaatacaaataaaattcggttgttaaacagaaatgttttaacgaatgaaattatgttgaaaattaaagactgcgaaagcacgtatacaaatggatatatgtatcaatatataaataatgccattgataatgatgatggcaccatatctatggaaattgtcatgggaaagcatagcggaaaaaagttatga

SEQ ID NO: 20821 - DNA, 1437 bp, Escherichia coli
  misc_feature (1314)..(1323): n is a, c, g, or t
atggccagaaaacctaaagaaatcaaaacagacccgttagaggtcatcctgtggaaagcggctgacaagctacgtaagaacattgatgcagccgagtacaagcatgtcgtgctgggcctgattttccttaagtatatttctgattcttttgaatctcattatgagttgctgaaggctggtgaaggcgagttcgcaggcgctgacccggaagatagagacgagtacaccgcttacaacattttctttgtccctgagcttgcacgctggaactatctaatatctaaggcaaagctacccgaaatcggtaagctggttgatgatgctatggagcttatcgaagcgggtaacccacagctaaaaggtgtgctgccgaaagtctacgctcgccagaacctcgacgcaactgtgctgggtgaactgatagatctgattggcaacattgcactgggagatgccaaagcgcgttctgctgatgtattaggccacgtattcgaatacttccttggtgaatttgcactggcagaaggcaaacagggcggtcagttctatacgccaaaatccatcgtaagcctgctggttaacatgctggaaccctataaaggccgagtctttgacccttgctgcggttccggtggtatgttcgttcagtcagaaaaatttgttgaagcgcatcagggaaatattgacgatatttcgatttacggtcaggaatccaaccagaccacctggcgtctggcaaaaatgaacctggctatccggggtatcaattcagaacacgtccgctggaacagtgaaggctcattccttaacgatgcccacaaagatctaaaatctgattttatcattgccaatccaccgtttaacgtgtctgactggtccggtgagcagcttcgtggcgatgcccgttggcaatacggtatcccacctaccgggaatgctaactttgcctggatgcagcattttctgtatcacctgtcgccaaaaggtcaggctggtgttgtactggcaaaaggggctttaacatctaaaagttctggtgaaggtgatatccgtgccgcactggtaaaagatgccaatgtgattgactgtatcgtaaatttacctgcaaaactgttcctgaacacccagatccctgcggcgttatggtttatgcgtcgtgatcgtgaaaatagcagccaatatcgtgatcgcagtaaagaaattctgtttattgatgcccggaatttaggccatttaattaatcgtcgaaccaaagtcctgtctgactacgatattaaaaccatagccgatacctaccataactggcgtaacaannnnnnnnnncacctggccgttatgttggtcttgctgatgaagaagacgatttcgactttaaagaacgctttacggctcttaaagctgagtttgaagcgcaactggaagaagaggcgcgtctga

SEQ ID NO: 20822 - DNA, 1152 bp, Escherichia coli
atgagtaggtggagaaatttttgtataactgaattagcagatttttgcaacgcacaaagaattcctttgagtgctatggaacgagcccataagaaaggaaattttccatattatggagcgtcaggaattgtcgattatatcgacaattatatttttgatggcagctacatccttatttctgaagatggagaaaacttaaattccagaaaaacacctatagcatttgaagctactggaaaattttgggttaataatcacgctcatgtccttaaagctaaaaagccccatttaacggcattgataatccaatatttttcacaacttgatctatctccttatttaacaggtgctgctcaaccaaaattaaataaagcatcgctaaatttgattcctctttacttaccaattgatgaatctgaacaaaaagccatcgcctctattttgtcctctcttaaagacaaaatagacctgcttcattgccagaataaaacactagaatctatggctgaaaccctgtttaggcagtggtttattttagatagcactggtgtatcagttagtatagatcagataattgactttaatccaaagcgaactttaattaaaagccaagacgctacttatttggacatggctggactgagcactgttaattttcgtgcaaatggatattacagacgtccattttcttcaggaactaaatttactaaacgagataccttgctagccagaattaccccatgtttagaaaatgggaaagcggcctatattgattttttagacgacaatgaaactggatggggttctaccgaattcatagttatgcgtcctaaaaaagaaatccatccttttatctcatatatcatgtgccgaaacccggacttcaaagaatatgcagaaagctgtatggaaggttcaagtggcagacaacgagttaacttggatcatcttaagaagttcaatgttaatctgccaacagaagcttccctacgtataattaatgagttattagattcatttgaaagtaaacttattaacaactcaaaacaaattgatagcttagaaaaactccgcgataccttacttcccaaactgatgagcggtgaagtacgggttcagtatgcagaagaagcaatcgcatcagtagcataa

SEQ ID NO: 20823 - DNA, 3240 bp, Escherichia coli
atggcaaagatgaccgaatccgatattgaagtaatggcaattgagcacctgcaagggctgggctatgagtatgtttacggcccggacattgaacccagtggaatcaatccgttacgtagctatcagcaggttatccttgaagataaggtgcgtattgctctacaacgcctgaatccgcaccttagtgaacagaagtgtgaggaagccctgaaacaggtgatgcagatcagcacacctgatctaatggcaaacaatctggcctttcatcgcctgttgaccgaagggatcaatatcgaagtcagtaaggatggtaatacacaaggagagctggcctgcctgatcgactttaacgatcccactaataatgaatttctggtcattaatcagctcaccatcaaagaaggcaatcatacccgccgacctgatcttattttattcatcaacggcctgccattagtcgttatcgaacttaaaaatgccgctgacgaaaatgctacggtaacaggtgcctataatcagattaaaacctatcagaaccaaatccccggtctgtttaactacaatgcttttaatgtgatatctgacgggctggaagccaaagcggggacggtttctgccgatttcagtcgttatatgacgtggaaaactgctaacggtaaaacgcaagccaccagtacccaaccacagcttgaagttttattacaggggttgcttaatcctgtaacgctgctggatatgatccgccactttatcgtgtttgaggccagcaaacatgaagacagcaaagggattatcagtatccgtactgttaaaaaaatggcggcttatcaccagtactacgcggtcaatgcagcagttctttccactattcgtgcctcagcggtgaatgcggactccccctctgccgaagtggcactgcgccagcagggacgtaacagtaaagatcttgttaatgcgcaaaaaaccggagatcgcaaagcgggcgtagtctggcatactcagggttccggtaaatcgctttcgatggtgttttataccgggaaaattgtgctggcgctggataatccgacagttgttgtgattactgaccgtaacgatttggatgatcagctattcggtacgttctcttccgcgacccagctacttcgtcagacaccaaaacaggccgacaaccgggaagaactcaaagaatatttgcgcgtagcctctggtggtgtggtgtttaccactattcaaaaattccagcctaatgatggcagcaatatctatgagttgttgtcagacagaaccaatattgtcgttatcgctgatgaagcccaccgttcacaatacggtttcagcgccaaagaagttgacgtgaaagacagcgaaggcaacgtaacaggtaaacgcaccgtttacggctttgccaaatatatgcgtgatgccttgcccaatgctacctatcttggctttaccggaacccccatagaaaaaacggacgtaaacacacctgctgtttttggtaactacgttgatatctacgatatctcacaggccgtagaagacggtgcaaccgtgcgtatcttctatgaaagccgtcttgccaaaattgccatcagtgacgaaggtcgccagctaattgaagacttcgacgatgagtttaacgaagacgagctgacgcttacccagaaagaacggtctaaatgggccagaatcgaaggtttgattggcagttcaaaacgtattaaagctattgcggcggatatggttcagcactttgaacagcgcttaaaatctaatgccgatcatggcaagggcatgattgtcaccatgtcccgtcgtattgctgctgaactttataaagaaatcatagagttaaaacctgaatggcacagcgataatctaaatgatggcgtgattaaagtcgtcatgacctcttctgctgctgacggaccagaaatcgctaaacaccacaccacaaaaaaagaacgtcaggttctggctaatcgtatgaaggatgacgacgacaagctgaaactggtgatagtgcgtgatatgtggttaaccggcttcgacgctcccagcatgcatacgctgtatatcgacaaaccaatgaaaggccacaacctcatgcaggcaattgcccgtgtgaaccgtgtgtataaagataagataggcggtctggttgttgactatctgggcattgcctctgatttaaaagaagccctctccttttactctgatgcaggtggacgtggagatcctgctgaggttcaggaagaagctgtaacgctcatgcaggaaaagctggaaatcctggaaggcatgatgcatggctacgattacaaagcttactttgccgcaactacttcacaacgcctgacaattattcttgaatcagaaaaccatattttagggctggataacggtaaaggtaaaatgcgtttcctggctgcggttgcagccttgtcgcaggcatttgcattggcgacaccgcacgataaagcaatggaagcggcacccgaagtagcattcttccaggcagtaaaagccagactgaataaatttactgaaaactcagacggatcagaagaagaacacaatgacagtctggaagttcgggtaaaacagactatcgatcaggctctggttaccgataaagttgttgatatttttgacgctgctgggatacaaaagccagatatttccgttctttctgaagaattccttcaggaaatgaaggattaccaacacagaaatattgctttggaaacgcttaaaaaactgctttctgacgagattaaagttcgctcgaatcaaagtatcacccaaggcaaaaaactgattgatatgctgacctctgcaatcaatggctaccagaacaaggtactgacagcagcggaggtaattgatgagctaatcaagcttgccaagactatccaggaatctgacagccttgccagccagttaaacctcagcgcttatgaatatgccttctattctgctgttgcagataacgacagtgctcgcgagttaatggaaaaggaaaaactacgagaactggcagtcgtacttacggaggctatccgcaacaatgtcagtcttgactggacagtgaaagaagcagcaagagcaaaaattcgcgtggtggtaaaacgtctgctcaaaaaatatggttatccgcctgatatgtcattgctcgccacagagactgttttgaagcaggctgaacttttagctggagaattaggaaaatga

SEQ ID NO: 20824 - DNA, 1083 bp, Escherichia coli
atgcttgagctttatgatcctcaagactatgacgtgaaatacgccgcctggcgttttgatgacctgccgatcaaaacgccctggccgcccaagtacaaaatcagagccgatgcacagcagcaaactaacatcatcttttctctcatcgagaaagcgaccagtatcgttcatgccggagacccggacgatgaaggctgcctgttggttgatgaaattttagattacgcaaaaaatacaaaacccgttcagcgccttctcgttgcagatctcaacctcgctcccgttcagaaggctctcgccaatatgcagcctaacgagaaattcaggggcatgacaaatagcgctctggcacgctctctatgcgatcagggattcggctacaaccttacgcgcggctgtacccttaaagggcaggagaaaggctttcatggcgtcctgaatgttggtcgtgtgcaaagcgctgttcttgggctggttaaccagagaactctggctaaccagaaccacacagaaagcttttattatgatgttcaagcggcattgtcgatgaacgggcatctcttaaaggccaaatatcaagtcgctgaaggtgatgaaaaggatgaaaaaaatcgtctgatctctgaggctcaggcgaaggcggttgttgagcatgtcacgggtaaaaaagctgttatttctgaaacggccaccaaacccgaacacactaaaccgcctatgccgctgaacctttcgacactgcaacaaatctgcgcaagacgtttcggttataaggcaaaagaaacgctcgatatcatgcaaggtctttacgaaactcataagcttttgacctatccgcgaacagataaccgctatctgtctgacgagcatttcactcaggctggcgatattgccgacgctatcggcgcgacgttaccagagctggcgaccgcgaccgctggcatggataaaacgcaaaaacataaagcttttaacgcaagcaaaattgaggctcaccacgctattatcccgaccactaaaagcgggaaaggcgttcagcttaatgaggggagcccgcagaattcggaaaaaatcgtacgctaa

SEQ ID NO: 20825 - DNA, 921 bp, Escherichia coli; identical to SEQ ID NO: 7656

SEQ ID NO: 20826 - DNA, 288 bp, Escherichia coli
atggtctcgaagagaaatattttaaccgtattctctatctatacattcacctcttataacatgaacaaaaaagagacaataaaaaatttcattcgatttctcaaaacgacgaatgaaagtacattccataatgctttttcatttcgcggtggtaacattttgtatgtaagcaacaaaaacatgttgaaagagatctcatggttttcactcgctcgaatttacgaagacattaaaaaaataaaggaatataaaaccaaccatgacaactatatcagattagtcgcttaa

SEQ ID NO: 20827 - DNA, 945 bp, Escherichia coli
atgaataacaacgcaataaatacattactctcttgtaaaactccaaaagacattcaggcttgcattaatgcaggctccgatattaatacactggattcgtttggaagaaatatactgttttactgtaaaaacccaagaatgattgacactctggttaaagcaggaatagattttaaccatgctgacaactatggtcacaatgttttgtttaaccagcgaaatcctcacatactgaaaaaattgattgattccggcgtagatatacaccataaaaatggtctcggccaaacctgtttatgctcgttagctgataatatatcctgttgcaaaaccctgatcaatgctggaattaatgtcaacaatgtggataaatgcggaagaacaatacttttttacgtaaaaaatcactctatctttgatttgatggtacaggccggttgcgatataaaccacagagataaccagggtcacggtatttttgaaatttgctattcattaggcgatttcaaagccaaaatgctcattcgtcatattagtatgaaggatagcagtccagtaattttcaactacctcaacagcgaaagtctgcagataatggatttgcttcagaagaaaaaccttaactttactatctctgataactgccaggtttatctaagtgccaatgaaaatgaaatgagctctttcttcagtgaactaaagaagaagacagatatcagcaacacacattttcgccatattgtactgcgaggttatgatttacgcggggacattgaaaccattaaatggtttatccgcaatgacatcaaaatggataaaaaacaactggaacagcatattcgacatgatgagatttgtaaatatatagcagaacatgagaaaaagaaacttagcgaaattatgaaacaaacaatctctttaatgccagtaaaacgtagattgtaa

SEQ ID NO: 20828 - DNA, 405 bp, Escherichia coli
atgcataaaaatgaaagtaaagaagatctatcaagaagctcaagaagaggtaaattccatacagcaaaatattcacctaataaagttcgaactcactgcgtcagcgttcggttaaacgaagaagaattatctattctcgatagtaaaagaggcccttataaaaaaggggaatggctaagaatggcatccctcaacaaactcccaccggtattacctgaaatcaatcgtgaagcatggattaaactcggcaacctttcacaggatttaaaccgcctgctgaatcatctcgacagcaaaagccctgacagcgaactgacccgtacagaactcttcgccctgcgcagacaaatcaaaactctcagggatcaccttattccatcaacctttctggagccaactcaatga

SEQ ID NO: 20829 - DNA, 1242 bp, Escherichia coli
atgaaaggtatgcagaaaataaagcggggtaaacagttcgcaggtgttgttctctatagccttaagtcaggatctcaccacaaaatcacgccttatattatcggtggcaacatgacgggaagcactgctgctgaacttatcagtgaatttgaaggcacaagactactgcgccccggtgtcgccaaacctgtctggcataattcgcttcgcctgccaaagggagaaacactgtcagtcagacaatgggcggcattcgctgacgattatatgacccggatgggattcactgaaacccatcttcgctgctatatcatgcacgatgattcggacgggcagcatatccatataatagctaacagaattaacatggtcggtgggaagctgtaccttgggaaaaatgaaaatcttatcagtacccggattatcagcgagctggagaaagtccacaaactcactcaaaccacatctgcaatcagtagtcatagtcaggagaaaagaaagccttcccgcaacgagctgatgatggctgaaagaacgacaactccctgccccaggtccactctgcagagcctgattgataatgcgttaaccggccgccctgatttgctgacttttatcactatgctggaaaaggaaggcgtgaactgtaaacctaatatcgcctcaacgggaaaaatgaacggcttttcatttcagtaccagggcattgcctttaaagcgtctcagcttggaaaaaagtatggctggtcttctctgcaaacacagattgattttacaccagagcacctggctttactgaaaaaagagcaacagcagactgtgccagtgccagtgccagtgccagtgccagtgccagtgccagtgccagtgccagtgccagtgccatcatgcgagcctgaagaacaggctgcaaaccgggaaacgattctggagaaaatccttcagcttgaagaaaaaattcgtctggaaagacaacaggaaacagtgggtgtcattcaactcaggagcaaactgcacaatacagctcgtcagataccccgccagcgtcgtctgcattcgtggtttgtattgctcggccatattgtggcacttctcaggcgcaggggcatgtctctgttacatgccactgcacatcctttccaccaaatcctgcacctgcatcttctgacaccctgtcattccatgacaacaaatcccattaaagaacaattagttaaaaataacccccatcctgcaccataa

SEQ ID NO: 20830 - DNA, 273 bp, Escherichia coli
atggataataaaacgattagctgccccttctgctttacacaaagcccgcacggcgtgcggatttgcaaaggctgccatgcaaaagtcgcctacggtgagagtccgctcagtgtggcattcctgtttcaattcgtggcattagctctcgcctggttagtattttcattgaccggcagcactcctgtctcagtcattacgttttgtgccagcgtcattattcttatctgcattattaaaaagaaatatgcagacagagttgtttttatacggtga

SEQ ID NO: 20831 - DNA, 387 bp, Escherichia coli
atgaacagattcatgatttctgtgttttttatttctgctttccttatttctggttgttcaacatcaggcaaccagcatctaaaaaaagaaacagcacaaagtctgcagtcgaaaattataaaaaataaaacaacgaaatcagaaatcattaccgcattaggtgagcccgaaaccaaaactacacttgatagtggcaatgaagaatggacttattcgatggataacaatcagtttgatgccaccacattcattccagtggtcgggttgctgacaggcggttcacagacgcaggccaaaacgctggaaatcgaatttaaaggcgaaacggtcagtaagtggacgatctctgaaaacaacagcaagatgaaaaccggccttattcaataa

SEQ ID NO: 20832 - DNA, 321 bp, Escherichia coli
atgaaaacatatgcatttaccacactcattgcgtccatttttttgctgagtggctgtaccggtgaaccgtctgagcaggatatttacactgcgatgaataaggtcatggagcagacgaatgccatcgttaaatccatagcaggtaaagatgtcccgaaagacgcactgcgggaattaaaatctgtcaaaaagcatgactgcgaaaaactatcggataaaagctataaatgcaatgtaacagctgttgtcgataacgaaaaacgcacagcggctgtcaggttgatcaaaacggatgatggctggcaggtcattgataagtaa

SEQ ID NO: 20833 - DNA, 426 bp, Escherichia coli
atgagtaatatttgtgtttcttctcaggaagaaaagtttatatttattgttgataaatatataacacagcatcgcgacagtgttaataacaatattttttacagaaaactttatgtgcttttcgctggataccatctgaagtatttttattcacgggcgcaatatcgcaattcgtgttatcacgttgataatatcatgcagatgtttatgggtgtcgtttctaccctgaaggcccctctgctcaggcaactcgcaaacagtgacacattactgcattgcctgaattcgctcgtgaattatatttcaggcaatctggatgaagcagagcacatttatgctgatttactggcacagtatgaaaagaaacgcattgcacgttctctggcttatacaccaccaggatccgtggtcaggaaaaggctgtga

SEQ ID NO: 20834 - DNA, 1317 bp, Escherichia coli
atgaacgataaaaacatcattcagatgcctgatgggtatctgaataagactcccttgttccagtttattttgttatcgtgtttattcccgctatggggatgcgcagctgcattaaatgacatattaatcactcaattcaaaagtgtattttcgctaagtaactttgcttcagcattggtgcagagcgcattttatggaggttattttttaattgcaataccagcatcccttgtgattaaaaagaccagttataaggtggcaattttaattggcctgacgctgtatattggtggttgtacactttttttccctgcctcacatatggcaacctacactatgttccttgcagctatttttgcgattgcgattggcctgagtttccttgaaactgcagcgaacacatacagttcaatgatcggtccaaaagcctatgccacattgcggctcaatatcagccagaccttttatccgattggtgctgcgtctggtattttattgggcaaatatctggttttctccgagggggaaagccttgagaagcagatgtccggaatgaacgccgggcaaattcacaactttaaggtgctgatgttagagaacacccttgaaccgtataagtatatgattatgattctggttgtggtcatggtgttgttccttttaacccgcttcccaacctgtaaagtggcacagacaagtcaccataaacgcccgtcagcaatggatacgctgcgctatctggctagaaatccgcgctttcgtcgcggtattgtggcgcagttcctttatgtgggtatgcaggtcgcagtatggtcatttaccatccgtctggcactggagttgggcgatatcaacgaacgtgatgcttcaaacttcatggtctatagctttgcctgcttctttattggcaagtttatagccaacatccttatgacgcgttttaatccggaaaaagtattgattctctattccgttataggggcgctgttcctggcatatgttgcactggctccaagtttcagcgcggtctatgtcgccgtcctggtaagtgttttgtttggcccttgctgggcgacgatctatgcaggaacactggatacagttgataacgaacatacagaaatggcaggagcagtcattgttatggctattgtcggtgccgcggtggttccagcaattcagggatatattgcagatatgttccactcactacagctttcattcctggtttctatgctctgctttgtctatgtcggagtctacttctggcgtgaaagcaaagtacgtaccgcactggctgaagtcacagcgtcctga

SEQ ID NO: 20835 - DNA, 921 bp, Escherichia coli; identical to SEQ ID NO: 7656

SEQ ID NO: 20836 - DNA, 681 bp, Escherichia coli
atgactgaaattttcagtgggaacccccatcttttcaaagggaagcatctcgattatccaacagttaacgatactctctacagtcctccacacatttttatcacggatatcaccaggcttgctgaacttagtgtgatggctcttagtgtgaatcttttcacctgggaggaaggaaacgatgaatattgtgttaatgcgcctcatcacgaagcttatgtgtcacaactcttgtcccccttatgtgagaaaacggtgttgcttgaaatcgatcttggtagtggtactgacgatgaaatagccgaatcgataaaagcggccctgccacaatggagatcggtaaaaggagtggaagttaatgaaaccggtatcgttcgtttcggctatggaaccattaaaaaaattataaattacaggttggttgcgatgctggacatcttactttgggcaaaaaggaaagaactaagaatctcagatgatcgcctctcccggcttctttatactgatgaagatgaagaaacaactacccgtttagggtatcacattaaagactcagatcgtccgcttgcgatgaaagctgcaacgatagacttcattaggcagttcaattttttcatgaaccgaaatccccacctgaaaaacatgagagtttcagatgtgatgaaactctctgattctaactga

SEQ ID NO: 20837 - DNA, 207 bp, Escherichia coli
atgaacaatcaaaatacccgcctaattcgcttgccagaagttatgaacagaaccggctatggcaaggcctggatttatcgtctaatcaacgaaggtttatttccacaaccaataaaaattggttcgcgtgcaattgcatttgtcgaaagcgaagtagatgaatggatcgcatctgcaattgaacgttcacgtaaaaatgcagcctga

SEQ ID NO: 20838 - DNA, 276 bp, Escherichia coli
atgaataattcaatcagagtaccggaagataaagattttgtatgtgcatttgtgacttcaccggatagcttgtatgaggctattgaaacctatcgtaattatgtagatccagtcgaagagatagagtttgagcacgtccttctttatttgttgtgttctatactggtcgaaggtgctacagatgttaccattaatgatgaagtacgaatgtgtattgagcaccttgtcaatgaaaaaaatattatcagaaagaataatgcaggtaaaaaggtgtaa

SEQ ID NO: 20839 - DNA, 306 bp, Escherichia coli
atgaagcaaagactccctgcttacctttaccagaataaattatcagatgaacaacgcaatctgaacaatactgctcactatgtgttttggcttctcacattaatcgcttcatacacaccagataaaaacactgtttacctgaactttcaccgtgcaacatccatcgcacagcaggaagatatacatattacgccagcccgattttatcgggccatcgatgaactgattgatacgaatgttattatacctactgagttcaaataccagtatcgtttaaaccctgtatttttcagttatcttaaataa

SEQ ID NO: 20840 - DNA, 564 bp, Escherichia coli
atgtcaaacacaagtgttatgttaactaaagaacaaaaagcaatcattgcagaagcattagatgttatgcccgaagatctggaagaaataaaagttaaagcaagtgcctgtaaaaagacatcctttcgtgacgatttttcgatggtctttaaagataatacggccacactcgcccgaatggatctgacaccaacggcattcagaattgttctttatcttttctcagtcattgattatggaaatattatccctgacttttcacagtcacgtactgccagagagttaggactgaataaatcgaatgtttcacgtgcattcagagaattatttgagaggaaaatactgatccgtaacgctgaagacggtcaggtttacctgaattctaatttatgcgtaaaaggtattcctcatcgtttcaatgaagatctgatggataaattcagtaaatccagacttgagactgaagattttgccacttcattcaacttttatcgcgcagggcgcaaaacaaagcctgtaaaaaaatccagaaacagatatccaactgacggcattcccttttaa

SEQ ID NO: 20841 - DNA, 426 bp, Escherichia coli
atgacttcagataataaaaatattgatttacaattaaatataaatgagcatggagtttctcataaactgattaaaaaaacgtctaataaattgctcgtctttttttcaggtacagataaaaaagatggccgctttgatttttggaaatcagcagatgaactgccatataacattttgttaattaacaatggtaaaaatgaatggtaccaagatagtattccagggtttagttcttcaatatcagaaacaatagaaaaaataaaatatatttctgaaaaactaggttgtgacgagattataacaataggcgtcagtatgggaggatatgcagcttcattatttggcgctcttctggattgtcgtgtgttagcctttagctttgacactgtactaaaatatcccttgagccgtagtgctaaaaggtga

SEQ ID NO: 20842 - DNA, 603 bp, Escherichia coli
atgcatcacaataatgatgcaaaaacacctgaatgggtagattctgcaaagaaagcaaacttaaaacatgtttacgatggttctgcagaccaattaaaattgctttgtgcggcagatttgattataagtgatttttctggagctatatttgacggtatgtatgcagaaaaacctattcttctatatcaagctggattggagaacaaaataggtattcaaaaatttgatcttacatctttagagtttaaacatagagatgagataggttatgtttgcactagtctttctgattttgaaccatccataattcactgtctcaataactgtcaagatattgtattaagagcatcaaatcttcgtgaaaaacttttttacgtagataaagaggtaaatgcttcacagctatgtattaactatataaaaaaactatataatgggttaattccgccactaacacaaacgcagttctatgttagagagactgtgcaagagcttcgaacatgtaagccaaagctgaataaacttgaaaaatccattaagaataaaaaactaccattttacagaaaagcgaaaaatttgttttctagaaaattaaaagtataa

SEQ ID NO: 20843 - DNA, 537 bp, Escherichia coli
atgaaagtaggatttataatctggaatccattccagttgattcaattcaaatctattgcattaaaattagaaaaaccaactatttttattattagaaaaaacaataaccttaccttgtttcctaatgagttaattaataacaaatcatggagtatagtgtatattgagccccatgatgttcccgttatcgatgggactcatgatatcttactttttcagtcagctttccctggtattgagaaaattaaaaatagtaaattagtctcaatacaatatggtttagcaaaggagcgccataattatggtgaatggcgttctcttgctgacatgaatttaatgtatggtgactattcatctaatattgtgtctcactatgcgccatcttatcctgttggaaatccaaagtttgataattggttagagtacaaacaacaatactcaaatagagaagagctttataaagaattaaaattagatataaccaaaaaaacattgctttacatgcctacttgggggggagttgggttcatattttga

SEQ ID NO: 20844 - DNA, 300 bp, Escherichia coli
atgaaaaagatacttttttgttcgctgcttcttctttctgcaagttcatttgcacaacaattccattatcagtgtgaaggacgagatttaaagataatgctttcacctaatgcagcttttcttgatggtaaatcattcgaatataagaatggagagacgaatggggaaacgacaaagatgaccttctttggtccttctggtgaggttctcaagtttttggttaatcctgtcaacaacttatatcgtatggggctgacttcaggtgctacatttgaagagataaattgcactgaaatctag

SEQ ID NO: 20845 - DNA, 201 bp, Escherichia coli
atgaacctttgccccgatgaacgtctgctctttgtgcggatgatttccgctatgcttcgccgttcgggcggtgatgcgggtgctgttatgtttgaggcgtatcgccatattgtgtccgataccaatcaagctcgtcgttcctgcatgctcgacctgctcgaaagcgtcaggcatgactatgtacacggtggatatacatag

SEQ ID NO: 20846 - DNA, 189 bp, Escherichia coli
atgacaaaacaggaatcagccgcactgaacatggcaaaatttatccgggcgcagtcgctgctgctgctcgaaaaactcgacgtgctcgatcttgatgacgaggcagccgactgtgagcgaatgcacgaacaggcagaagcgctttatcagaagctgagcgcacgcttcggtatacaggacggcgaataa

SEQ ID NO: 20847 - DNA, 432 bp, Escherichia coli
atgaaacaaaataacagaattgatgatagattgttgctacgcccttttccccaacactcaagtaaacaatcattgtctgcgttatggacacagtatcgtgatgatatgatatctcatgctggcttttccatatttctttttggaaacaagcaatccaatgatgagatcgtattatcaaatggaatgagggaggagtatgagatatcaaaaaataaaaaaaacatcatccttccaattggggcgacaggatacatggctagagagttatgggaagaagaagttaataggctacatagtttaccaaataaagatgatgaattttgtaaattattcactttattaggagatcaagataaatcattagatgaaatcttagataacataataaatatcattgactatagtgttaaaaaaggagatttacatggctag

SEQ ID NO: 20848 - DNA, 501 bp, Escherichia coli
atggctagaaaatgtttcttcagttttcattacactccagataactggagagtatcgcaagtaagaaatataggtgcaattgaaggaaataaaccagccaaagataatgattgggagacagttgtcggtgggggagacaaaaagataaaagaatggatctcagaacaaatggaaggaagaatttgtacggtaattttagctggtacaaatacagccgatagaaaatggatcaaccatgaaatagttgaatcatggaatagagggatgggtgtagtagccatacatattcatggattgaaaaataaggatggagagcaatctgcgaaaggtaagaacccattatcatatataactcatggtccaacagggaaaaaactatcagatatcgcaaaatgttatgaccctccatattcagttagtacaaatgtttataattacatcgctgaaaatattgactcttggatcgaagaagcaataaaaatacgaaaagaaaacaaataa

SEQ ID NO: 20849 - DNA, 987 bp, Escherichia coli
atgatatcaagagaaaataataaaaataacctattccgtgtaaagtctaaaaatggtgtccttcgttgccttaaggctggcatggatataaatatgtgcaatagtaaaggtcaaactgctctttttacctgtaatgtacctgaagctatacaggcaatgattgacgctgacattgacattcaccacttggataatgacggtaataatgcattattctatgctcaaaatgttgaaacagtggaacttcttgtcagcaatggtattaatgttaaccaccggaataagtcaggcacccttgcgattcaacatattgatgtttcaccagggttagtaaaatatcttatcaaagcaggactagatatccataccaaagatagctatggcaattcctttcttttcattccatttgaaggatatgtgtacgatgcactaattgaggctggttgcgacattaatcataaaaatataagtggacagacagcattcgatcactggcagtcagaaaataatagcatagttggtaaatatacgcactgggaatctaaaaatgataactacatgcgcttccttatccgtaatattcaccttacaaatagttcaaaaattgtactcaagaacattacatttaaatcaattgagctgttgtcattgcttataaaacaaaaaaatgaatttgagataagtgataaatgtatcataacaccaacaaatgccgacgctaaaaaattaattttacaactaaagaagctgacagacattagtcatgtttggttttacataagcagtacatatctactgacgcactatgcaggaagactgctaattaaatggttaatacgtaatgatataaaagttgatatagaatcgctaaaagaacgctacttttatgaagaaatcctccaggacaaattacagagagagcaaaaggttttacgaacaacgcttcaaccagttacctgtaaagcaattacaaaaaaaagattatga

SEQ ID NO: 20850 - DNA, 897 bp, Escherichia coli
atgctgcctgaaaaaaatgaattcccaataattcaaattgagattgcaaaaataaaatttcttaacccacgaacaagaaataagttagtgcatgaagaaataaaggaaagcataaaaaaaagaggattaagcaagcctataagcgtaagagctattgatgaaggcgatttcaaatatgctttaatttgtggtcaagggagaatagaggctctcgttgcattaggtgaaactattattccagcaattataagagatgtatcagaagaagatgcttacgttatgagtttagttgaaaacattgcaaggagaagaccacgttctaatgagttattacaggtgattaaagacatgaaaatcagaggactttcagactccgaaataagtgagattactggatattcatcgaactgggtgagcagtattaatatgctacttgataagggagagcataaacttctctcagcagtcgaacggggtaatttgcctctgtatctcgcagtgcaatttgcaagatgtgaaactgaggaagcacaagatattcttaccgaagcatatgataaaaaattaataaaaagtcgggacattataaagataaaacacattctaaatcaaagaacagttgggaataaaggtgcaaaagcagccggattttattatcacaaaccatcaaaaaggatgactgcagaggagttgattgagctttatgaaaatagtatcgctgaacataaatctgtttataacaactcaaaattcataaaaaccaacctactaatagtaaatgagatttttaacatcataatgatgaataaaagctttcaacatatacttgaacaagagaatctttcagaactaccatctcagatattaaccccagtaaacaaagaggtattaaaatga

SEQ ID NO: 20851 - DNA, 168 bp, Escherichia coli
atgaagaaactgtttgcctcccttgccctcgccgccgctgttgccccggtgtgggccgctacccagaccgtcacgctagcggttcccggcatgacttgcgccgcctgcccgatcaggggtctgacgctcagtggaacgaaaactcacgttaagggattttggtcatga

SEQ ID NO: 20852 - DNA, 150 bp, Escherichia coli
atgaaagagcgcattttgcccatgtccgttgatatggtgtatattaattccataactgagcaggaaatccatggcttccagggttctgcaggcaaaaatggcattgttgccgttactgttaacagcattgatgtcatagcctatttttaa

SEQ ID NO: 20853 - DNA, 264 bp, Escherichia coli
atgatctgctctcgtcgctcactggtgcctgtcactcgcttctcacctgaagcgtcggtattactcatagtaagtcctttcgtaaaactttcgtttcatttcgttttgcctattaacgcctttctattaagcaaatgcaagcccaccttacccattggcgcaagctactctcgtttcactgactttcattatgtttcttttgtgaatcagatcagaaaactattatctttcgttttatttttatttcaccatgacgcagtataa

SEQ ID NO: 20854 - DNA, 468 bp, Escherichia coli
ttgttctataagttgctcagcaagctcatttccgctgttcttcatcgtgccgaaggctgcagtcgtcagcagatggctggtcagttccatctggcatgccattttgacctgcgggtagagcgccgggttcccggcatgtgtctggcgggggaaggcagcatcgttctctggtgtatccggtgtgcgccagaacacaccatcgatggccagcaggggcaggccgcaccagtgcggatgcggcgtggcgttatgccagagctgcgctgttttcgtgaacacgcggcggacagcctcacttcccagacgctggcgggcctgaataacggcactgggggcaacgaaggggcgattgcacggcagcatgatgtccaggtgattcgcaatctggtgaagaggttctttacgctcaagcgccatgccaacaatacaccagaccatcatttcgaggggaagacggcgcttgtgtag

SEQ ID NO: 20855 - DNA, 1149 bp, Escherichia coli
gtggcttttgaagaacgttactaccgcgaagagctggattatcttcgccagctaggcaaactgctggcgcaggaaaaaccacatctggcccactttctggccgagaaagagggtgatccggacgtggagcgtctgatggaagcctttgcctttatgtccggtagcctgcgccagaaacttgaggacgaattccccgagttcacccatgggctgatccgtatgctgtgggcaaactatttacgcccggttccggccatgacggttattgcctatgaacccaaaaccgatcagttaaaagtccctgttcaggtctgtcgtaatgaactgatcagaagccgctcagaaaagtcctccctgactgctcagaaggtgctgcctgacaatcatgataaaatcgtttcttccgtagcctgccatttcacgctggcgcgcgatatctggctgcaaccactgcgcattctcgatacccgcaacgccagcagcctgaaagaaggcatcatagatatcagttttaccgcagataacaatgtctcccccgccatgcttgacctgaacaaaatcacgttctggctgggtaatgaagacgattatacccgacaccagctttatctgtggttttgcgaatgcctgatggatgcggaactgattgccggagagtaccgcctgccgctgccggatctgtggctggaggcggcgggttttgacaaccgggatgctctgctgccgtggccgaaaaatgtccacagcggctaccgcgtgcttcaggagtatttctgctatcccgaagccttcttctttttccatctgcgcgatgttgcgccgctaccagacgatttcccgatcaatgcgtttacgctgcgcctgcactttaaccgcccgttacctgccgacatcaagctgcgccaggattcgctgcgtctgcactgtacgccagccattaacctgtttacgcattatgcggaacccgtcaggccggatgggcggatggcggaatacccgctgcgcgccagccataagcatccggacgcctatgacatttttcaggtcagcacagtcaccagtaaagtcaaagtttcaggtactgaaatcagcccaggtagccaggcgcgtgtctggcccgaatttgaaagcttccagcaccagatgtag

SEQ ID NO: 20856 - DNA, 1191 bp, Escherichia coli; identical to SEQ ID NO: 5878

SEQ ID NO: 20857 - DNA, 1182 bp, Escherichia coli; identical to SEQ ID NO: 8788

SEQ ID NO: 20858 - DNA, 843 bp, Escherichia coli
atgaaaatattcattactgagcaacaaaaagctgaacttgaacgccttcatgattccagtcgtgacgggcgagtcagagatcgtattaaagccattcttctggcttccgaaggctggagttctgccatgattgctcaggctttacgcctgcatcagacaacgattgatcaccatatcagcgaattcctgaataaaggaaaactgaagcccgaaaacggcggctcagacagcaaactcagtgctgaacaaacggcctttttaatcagccagttatccgataatttatttcaccatacccgcgatgttattgcgtttgtcacccggacatggaacatcattttcagcattccggggatgaataagtggctgcatcgtaatggtttcacctacaaaaaaccgtcaggcgtcccccataaactcagtgaagagaaacaaaggcaattcattgagtattataaggaactgaaaacaactgtgggtgatgagccgattctttttattgatggagtccatccgactcaggccactaaaatcagctatggctggatacgcaaaggccagaaaaaagcagtaaaaacaacaggcagccgcacacgcctgaatatcatgggggcgctgaatctgaaagcactgacgtcaccgctaatctgcgaatataaaaccattaatgaatataatgtatccctttttctcaatgagatacgaaaggtttatcctgattataaccagaaaatccacgttattctggatggagcaggttaccaccgttcacagttagtgaaagactgggcggaagtggtaaatatcaggctgcattaccttccccttacagtccaaacctga

SEQ ID NO: 20859 - DNA, 528 bp, Escherichia coli
atggcagttcgtggaattaacaaggtcattcttgtcggtcgtctgggaaaagatccggaagtccgttacatccccaacgggggcgcagtggcaaacctgcaggtcgccacgtcagaaacctggcgcgacaaacagacgggggaaatgaaggaacagacggaatggcaccgcgtggtgctgttcggcaagctcgcggaagtggcaggtgaatatctgcgtaagggcgcgcaggtctacatcgaggggcaactccgtacccgtagctgggaagataacggtattacccgttacgtcactgaaatccttgtgaaaaccacgggcaccatgcagatgctggggagtgcaccacagcagaacgctcaggtgcaaccgcagcctcagcagaacggccagccacagagtgctgacgcaacgaaaaaagggagcgcgaaaacgaaaggccgtggacgtaaggctgcgcagccggagcctcagccgcaaccaccggagggggaggattacgggttttcagacgatatcccgttctga

SEQ ID NO: 20860 - DNA, 234 bp, Escherichia coli; identical to SEQ ID NO: 10186

SEQ ID NO: 20861 - DNA, 432 bp, Escherichia coli
atggccagcctcttcgaaccggaggttgcctccggagaaggcgtgactcaggctgaacagccacaacagccacaacagccacaacagccacaacagccacaacagccacaacagccacaacagccacaacagccacaacagccacaacagccagtgtcttctgtcatcaatgataagaagtcagatgcaggtgtgagtgttccggcaggggggatcgagcaggagctgaaaatgaaaccggaagaagagatggaacagcaactgccacccgggatcagtgaatccggtgaagtggtggatatggccgcttatgaggcatggcaacaggaaaatcatccggacatccagcagcagatgcagcgtcgtgaagaggtgaacattaatgtgcaccgggagcgtggggaggatgttgagccgggagatgatttctga

SEQ ID NO: 20862 - DNA, 477 bp, Escherichia coli
atgcaacagctttcctttctgcccggagaaatgacgcccggtgagcgcagcctcattcaacgggccctgaaaaccctggaccgccatcttcatgaacccggcgtggccttcacctccacccgtgcggcacgagaatggctgattctgaacatggcgggactggagcgggaagagttccgggtgctgtatctgaacaaccagaatcagctgattgccggtgaaaccctcttcaccggcaccatcaaccgcacggaagtccatccccgggaagtgattaaacgcgccctgtatcacaatgccgcagccgtggtgctggcacacaatcacccgtccggtgaagtcacacccagtaaggcagaccggcttatcaccgaacgtctggtacaggcactgggcctggtggatatccgggtgccggaccatctgatagtcggtggcagccaggttttctcctttgcggaacacggtctgctttaa

SEQ ID NO: 20863 - DNA, 477 bp, Escherichia coli
atgcaacagatttcctttctgcccggagagataacgcccggcgagcgcagcctcattcagcgggccctgaaaaccctggaccgccatcttcatgaacccggcgtggccttcacctccacccgtgcggcacgagaatggctgattctgaacatggcgggactggagcgggaagagttccgggtgctgtatctgaacaaccagaatcagctgattgccggtgaaaccctcttcaccggcaccatcaaccgcacggaagtccatccccgggaagtgattaaacgcgccctgtatcacaatgccgctgctgtggtgctggcacacaatcacccgtccggtgaagtcacacccagcaaggcagaccgccttatcacggaacgtctggtacaggcactgggcctggtggatatccgggtgccggaccatctgatagtcggtggcagccaggttttctcctttgcggaacacggtctgctttaa

SEQ ID NO: 20864 - DNA, 258 bp, Escherichia coli; identical to SEQ ID NO: 11054

SEQ ID NO: 20865 - DNA, 219 bp, Escherichia coli
atgcatacctttatttttcttgtgctgataaaaaatattaacggtggcggaagctggaatgttacccccatgccaaatacggacgtatgcgtgcaggttcttcggacaatcgagtcacacggaggcaggggatttggaaatacaggggaatgtattgaagttaaaacaaataaacctttgaacaacgtgatggatacactgaatggtggtgggcaatga

SEQ ID NO: 20866 - DNA, 261 bp, Escherichia coli; identical to SEQ ID NO: 12476

SEQ ID NO: 20867 - DNA, 360 bp, Escherichia coli
gtgctcggtgtctttgataaagtcactgaaaatatggagacaatgaaagagatacatcttaacagtgacgaacaacatttatttggcagagctgcattgatggccaggtacgaagatgaaaataaaacgccagtgacgccagaacaaataattactccccgccgttgggaggataaacagaacgatctctggacaacctggcagcgggttcaggagaatatgataaaaggtggattatcggggcgaagtgcctccggtaaaaataccagaacaagagccattacaggcattgacggtgatatccgaatcaacaaagcattatggatgattgccgaacagttcagggagtggaagtcatga

SEQ ID NO: 20868 - DNA, 201 bp, Escherichia coli; identical to SEQ ID NO: 19525

SEQ ID NO: 20869 - DNA, 201 bp, Escherichia coli
atgaaaccggaagaagagatggaacagcaactgccacccgggatcagtgaatccggtgaagtggtggatatggccgcttatgaggcatggcaacaggaaaatcatccggacatccagcagcagatgcagcgtcgtgaagaggtgaacattaatgtgcaccgggagcgtggggaggatgttgagccgggagatgatttctga

SEQ ID NO: 20870 - DNA, 393 bp, Escherichia coli; identical to SEQ ID NO: 15238

SEQ ID NO: 20871 - DNA, 327 bp, Escherichia coli
atggcagcggagcgtctggtagcgaagctggaagatgctcaggtgcaactggaaaacaaccgtctggagcaggagttggttctgctggcacaacgaattgacgttgccgaagaactggaccgcctcgaagcgcatgtcaaagagacctacaacattctgaagaaaaaagaagccgttggtcgtcgtctggactttatgatgcaggagttcaaccgcgagtcgaacactcttgcgtcgaaatctatcaacgccgaagtgacaaactccgccatcgagctgaaagtgttgattgaacagatgcgcgagcagattcagaatatcgagtaa

SEQ ID NO: 20872 - DNA, 159 bp, Escherichia coli
atgaagcatcctcacgataatatccgggtaggtgcgatcactttcgtctactccgttacaaagcgaggctgggtatttcccggcctttctgttatcagaaatcccctgaaagcacagcggctggctgaggagataaataataaacgggagagtgtatga

SEQ ID NO: 20873 - DNA, 2190 bp, Escherichia coli
atgagttttaacgcaaaggatatgacccagggcggtcagattgcgtccatgcgtatccgcatgttcagccagatcgccaatatcatgctttactgcctgtttatttttttctggatactcgttggtctgattttatgggtaaaaataagctggcagacgtttgtgaacggctgtatttactggtggtgtaccacgctggaaggcatgcgggatttaatcaagtcccagccagtatatgagattcagtattacggcaaaaccttccggatgaacgctgcccaggtactgcatgataaatatatgatctggtgcggtgagcagctatggtccgcattcgttctggcgtctgtcgtggccctggttatttgcctgatcaccttctttgttgtctcctggattctggggcgtcagggtaaacaacagagcgaaaatgaagtcacaggtggtcgtcagctgacagacaatccgaaagacgttgcccggatgctgaaaaaagacggcaaggactccgatatccggattggcgacctgccgattatccgggattccgaaatccagaacttctgtctgcacggcacggtcggggccggtaagtcggaggttatccgtcgtctggccaactatgcccgtcagcgcggtgatatggtggtgatttatgaccgttcaggggaatttgttaaaagttactatgatccctccatcgataaaatcctgaatccgctggatgcccgctgtgccgcatgggatttgtggaaggagtgcctgacacagccggattttgataataccgcaaatactctgatccctatgggtacaaaagaggacccgttctggcagggttcaggacgtaccatttttgcggaagcggcgtacctgatgcgtaatgaccccaaccgcagctacagcaaactggtggacacactgctttccatcaaaattgaaaaactgcgtaccttcctgcgtaattcaccggcggccaacctggtggaagagaaaattgagaaaacggcgatttccatccgtgctgtgctgaccaactacgtgaaagccatccgttacctgcaggggattgagcataacggtgagcccttcaccatccgtgactggatgcgtggtgtccgggaagatcagaaaaacggctggctgtttatttcgtcgaacgccgacacccatgcctccctgaagcctgtgatctccatgtggctgtccattgccattcgtggtctgctggcaatgggagaaaaccgtaaccgtcgtgtgtggtttttctgtgatgagttacccacgttacacaaactgccggacctggtggagatcctgccggaagcccgtaagttcggtggctgttatgtgtttggtatccagtcctatgcccagctggaagatatctacggtgagaaagcggcggccacgctgtttgacgtcatgaacacccgtgcttttttccgttccccgagccataagattgcagagttcgctgccggtgagattggtgagaaagagcacctgaaagccagcgagcagtattcctacggtgctgacccggtacgtgacggggtatcgaccggtaaggatatggagcgtcagacactggtcagttattccgacattcagtctctgccggatctgacctgctatgtcactctgcccggaccgtatccggcagtaaaactctccctgaaatatcaggcacgaccgaaggtcgctccggagtttattccgcgtgacatcaacccggaaatggagaaccgtctgagtgccgtacttgctgcaagggaagcagaaggtcgccagatggccagcctcttcgaaccggaggttgcctccggagaaggcgtgactcaggctgaacagccacaacagccacaacagccacaacagccacaacagccacaacagccacaacagccagtgtcttctgtcatcaatgataagaagtcagatgcaggtgtgagtgttccggcaggggggatcgagcaggagctgaaaatgaaaccggaagaagagatggaacagcaactgccacccgggatcagtgaatccggtgaagtggtggatatggccgcttatgaggcatggcaacaggaaaatcatccggacatccagcagcagatgcagcgtcgtgaagaggtgaacattaatgtgcaccgggagcgcggggaggatgttgagccgggagatgatttctga

SEQ ID NO: 20874 - DNA, 222 bp, Escherichia coli; identical to SEQ ID NO: 8358

SEQ ID NO: 20875 - DNA, 828 bp, Escherichia coli
atgttatcgccgcctgccctgcgggcggcgatacagggagaacgcttaatcatgaacgaaaacagcacgctgaacgcactgatttgtcgtcacgcccgtaacctgctgctggcgcagggctggccggaagagacggatgttgaccagcgaaatccgaactatccgggctggatcagcatttacgtgcggctggatgcgccccggctggcgacgttacttatcaaccgtcacggcggcgtactgccgccgctcctggcctccgccattcagagactgaccggaaccggggcggaactggtactgtccggcagtcagtggcagtcgctgccggtacttccggcagacggaacgcaggtgtctttcccgtatgccggagaatggctgaccgaagacgaaatcagggctgttcttgatgcggtgcacgatgcggtacgaagcatctgttaccaggtggcagaagatgcgcggcgtatccgtgcggcgctgaccaccaccggtcagacgttgctgacccgccagacgcgccgctttcgcctggtcgtgaaggaaagcgatcacccctgctggctcgatgaagatgacgaaaacctgcccgtggtgctcgatgccatcgtgaaccggggagcacgtttttcgtcggtggaaatgtatctggtcagtgagtgtattgagcatatcctgtccagtgggctggcctgcgatgtgctgcgtataccggatgaaccgccccgccgctggtttgaccgtggtgttctgcgggaggtggtccgggaagcccggaccgaaatccgcagcatggcggatgccctggcaaaaatccggaaatga

SEQ ID NO: 20876 - DNA, 1215 bp, Escherichia coli; identical to SEQ ID NO: 5959

SEQ ID NO: 20877 - DNA, 1092 bp, Escherichia coli
gtgaccattcagaactacaagcgcaacgtactgcgcaccccggcgaacaacaaaatccgcctcgatgacgagcgcggcaaagagcatatcaaggtcagtaccgagtatggcggcaagagccagctcaacctcggccatctggtggatgccggaaaacagcagcgcggggaaggctttgaactgcgtaccgatctgtggggtacagtacgggcaaagaaaggcatctttatcagctccgacgcgcaggacaaggcgcagggtaaggtgcgcgaaatggctccggcgatggcaatactggatggcgcacagtcacagatgaagtcgctgtccactgatgcgcagacggcgaatgccgatccggcagatctgtcatcacagatagcgctgttgcagcagagtgtaaaagatctgacgcaggctgcgatcctgctaagcgcacccaaaggcgtggcgatcgccagcggagagcacctgcaactggcggcgtcgaaaaacctgatcgcgaacgcaggaaatcacgctgatatcggtgtcgtgaagaatatgtttatcggcgtgggtcaggcgctgagcgtgtttgtacgcaaagcgggtatcaaactgtttgccaataaaggggcgatctcggtacaggcacagaacgatctgatggaactgttggcgcagaaatcgatagagatcaccagtacggaagatgagattaaaatcaccgcgaagaagaaaatcacccttaacggcggtggcagctacatccggctggatgcctgtgggatagaggccggtacgccgggagaatataacgttaaggcgggatattacgggcgtaagccgaaggcgaagctgacgccggagctgatggcatttccggtgattaagtctgaggattttaatcagagctttattttgctggatgaaaatactgggcaaccacttattaattggccctatgaactagaactggaaagtgggctaaaaatgagtgggattactgatgaaaatggaaatacagaactaatatcctctgataaggaggaggtcgttaatattagtgtgtttgaacccgatgagtttttagacgatgaaattaattaa

SEQ ID NO: 20878 - DNA, 738 bp, Escherichia coli
gtggcgctgccctttgctgctgacgcctgtctggtcgcctcatcttttgaagcagacgcagatgatgccgatgacgccgctgaactggctgacgatgcggcagccgtttttgaggattctgcgctggtttccgacgctttcgcgttcgtctcggatgtcttcgctgcagaagcagacctcgctgctgcagtggcttgctcagtggctttgccagccttcgttgtggctgttgaagcggatgatgcggcgctttctgccgattttccggcggcggtggcactggctgaggcctgcccggcacttgttgacgcggcactggcagataatgcagccgctgtttttgaacctgccgcagctgaggcgctctgtcccgctgctgtttcagaagacttagcgttcgtctcggacgtttttgccgccttcgcggaatttcctgccgccgttgccgaggaagctgcactactggcacttgatgatgcattcgtttctgaagatttcgctgcctcttttgaggccgccgcaccccgtgccgaggtggcagcttctgacgccttcgtggtcgctgtggatgcagaagtggctgccgatttttgtgatgctgcggcattcgtttctgacgttttcgcggcactggcgctggtagctgccgcgctttttgatgactctgcagcagcagcactttttgctgcttcacgggcctttgtcgatgccgttcctgcgctggaagacgctgactga

SEQ ID NO: 20879 - DNA, 573 bp, Escherichia coli; identical to SEQ ID NO: 7694

SEQ ID NO: 20880 - DNA, 435 bp, Escherichia coli
atgaaaactgaactgaccctgaatgtattacagaccatgagcgcacaggaatatgaagatatccgggcagccggaagtgatgaacgtcgtgagctgacacacgccgtgatgcgggaactggatgcgccggacaactggatgatgaatggcgagtatggcagtgagttcgggggctttttccccgtccaggttcgtttcacgccagcccacgaacgtttccacctggcgttatgttcaccgggcgatgtctctcaggtctgggtgctggttctggtgaatgccggtggtgagccgtttgcggtggttcaggtacagcggcggtttgcaccggaagccgtcagccattcactggcactggcggcgtcactggacgcgcaggggtacagcgtcagtgacatcatccatatcctgatggcggaaggaggtcaggcatga

SEQ ID NO: 20881 - DNA, 1974 bp, Escherichia coli
atggaaccgatgataactttcatggaatgtctcggtatatatatgaaaattagaccacagcagcacctaattaacatcctgacttcaaccaaacaacatcatccaaattttactctttttcttggtgcaggtgctagtatctcaagtggtgttgatagtgctggtgggatgataaggcgctggagagatgcttacactctaatgtatggagaagatgctctcaaaaaacaagtttggtacgataaagataatgagtattcagagctttttgaagcattatatgatcaaccaactcaaagaagagaatttattgaaagttgtattaccgcagctaaaccatcttggggatacgtttatctcacaaatctattggataaaggccattttaatacaatttttacgactaacttcgatgatttagtcaatgaagcttgctttaccttttctaataatctgagaccaatagtgtgtgcccacgattcaagtatcaacagcatacgtttaaccacagctcggccaaaaataataaaattacatggtgattttttatttgacaatatcaagaatactataagggagcttgagtcacttgaagataacatgagggccaaatttagacagtttgcaactgaatttggcatgatcgttattgggtactcgggacacgaccgttcaattatggatactctcaatacgttattgcattccggtagttgttttcctcatgggatttattggtgtatccgtgactcagacactgaaaaactttctgagcaacttaaaaatctggcccgctttcctcattttcatcttattaaaattaatggatttgatgagttcatggctgaattacattacgcattaggctgtaatttgcagcaagaggtagtagagccatactctgcattatctaataaactagatagatatttctctatagctgaagaagatgacgcagatgtccagcatgagattattaaaagagatatgaataatcttgctgatcatgtcaggagagtgaatacagtaagccagtttgtaaaaaaaataaaagtacttctttcagagaaagactcatcgttagatgataattcgatcactaaatctttagaaataatgttaaaggaaactaaatttgctggttctcctgaggggattcatttttataatacccccaattatttgattgcaaactctgcatttcgtgctggagagtataatgaatgtgtagaatatgctactaaacatctggctaatgggaaatctctcgaaacagaagtattaatacttcgttcctatattcatttggataatgattctgaaatacaaaagtcaatagaaagaataacaagttataacaaaatgaatgatggtgaagttggcaagcttgtaaatggattagtggacttaatggatgctaaaaaattcaaaattgcgaatagccttatggacatacttgaatcccgaacaataccgtctaaacataagcagttattgcttataaatagagttctttgcaacaaattacaaaagcagccgctttcagcaaaacagcaacaagagcttgaggaagtgctgaatgaagtgatagataaaaacgaagcttggcttgctctgggggctgctatacttttagaaaaatgggacattgctgaagaagtgctatcagcattagatgaaactgagatagttacaatattgacgcaatcaatgccgatttttgacttgatttctacagagttttatgaaaaggtcaagctagtagctatagagcgtggttataacgtttcattcgaagaagaaacggagttaccagaggttgttcctgctgaggatgagactcaaagtctcagccctgatgtgagagaaatacctacagataaaaagaaagccataactcacaaatcagcagacaatgatgaggcatttgatggattacgcactggcgaagaaagtataagcaaaccagcttaa

SEQ ID NO: 20882 - DNA, 786 bp, Escherichia coli
atgagtacagcactcgcaacgctggctgggaagctggctgaacgtgtcggcatggattctgtcgacccacaggaactgatcaccactcttcgtcagacggcatttaaaggtgatgccagcgatgcgcagttcatcgcattgctgatcgtcgccaaccagtacggccttaatccgtggacgaaagaaatttacgccttccctgataagcagaacggcatcgttccggtggtgggcgttgatggctggtcccgcatcatcaatgaaaaccagcagtttgatggcatggactttgagcaggacaatgaatcatgtacatgccggatttaccgcaaggaccgtaatcatccgatctgcgttaccgaatggatggatgaatgccgccgcgaaccattcaaaactcgcgaaggcagagaaatcacggggccgtggcagtcgcatcccaaacggatgttacggcataaagccatgattcagtgtgcccgtctggccttcggatttgctggtatctatgacaaggatgaagccgagcgcattgtcgaaaatactgcatacactgcggaacgtcagccggaacgcgacatcactccggttaacgatgaaaccatgcaggagattaacactctgctgattgccctggacaaaacatgggatgacgacttattgccgctctgttcccagatatttcgccgcgacattcgcgcatcgtcagaactgacacaggccgaagcagtgaaagctcttggattcctgaaacagaaagccactgagcagaaggtggcagcatga

SEQ ID NO: 20883 - DNA, 309 bp, Escherichia coli
atgaacggtataaaaacggggctggggatcacgccgggtgagcacattatcagtgccgactctgcgctcagcagaaatatccggcattgtttctgcctttcctgtcatggccggttgattctgcagacagatgctcagggggcgtggtttgagcatgatttacatgccctgagtgagcaacagaagggtaagcgtgcagcaagaaccgtattgacggggatgtgttattcagtcggcagtgctacgcgccaggggagcagttcgccgacccggtttatcggccagtcggctatgacgtcaaggacatag

SEQ ID NO: 20884 - DNA, 213 bp, Escherichia coli; identical to SEQ ID NO: 5358

SEQ ID NO: 20885 - DNA, 381 bp, Escherichia coli; identical to SEQ ID NO: 8379

SEQ ID NO: 20886 - DNA, 159 bp, Escherichia coli; identical to SEQ ID NO: 6188

SEQ ID NO: 20887 - DNA, 162 bp, Escherichia coli
atgaaacaaccggaactcatgctcaccagcggtgaactgaatccccgccatcagcataccgtcacactgtatgcgaaaggactgacctgcgaagccgataccctgggctcctgtgattacgtttatctggctgtttatccgacgcccgaaatgaaaaattaa

SEQ ID NO: 20888 - DNA, 1437 bp, Escherichia coli
atggcgcagtcgaaactctatccagttgtgatggcaggtggctccggtagccgcttatggccgctttcccgcgtactttaccccaagcagtttttatgcctgaaaggcgatctcaccatgctgcaaaccaccatctgccgcctgaacggcgtggagtgcgaaagcccggtggtgatttgcaatgagcagcaccgctttattgtcgcggaacagctgcgtcaactgaacaaactcaccgagaacattattctcgaaccggcagggcgtaacaccgcacctgccattgcgctggcggcgctggcggcaaaacgtcatagcccggagaacgacccattaatgctggtgctggcggcggatcatgtgattgccgacgaagatgcgttccgcgccgccgtgcgtaacgccatgccgtatgctgaagcgggcaagctggtgaccttcggcattgtgccggatctacctgaaaccggatatggctatattcgtcgcggtgaagtgtctgcgggtgagcaggatacggtggcctttgaagtggcgcagtttgtcgaaaaaacgaatctggaaaccgctcaggcctatgtggcaagcggcgaatattactggaacagcggcatgttcctgttccgtgccggacgctatctcgaagaactgaaaaaatatcgcccggatattctcgatgcctgcgaaaaagcgatgagcgccgtcgatccggatctcgattttattcgtgtggatgaagaggcgtttctcgcctgtccggaagagtcggtggattacgcggtcatggaacgcacggcagatgccgttgtggtgccgatggatgcgggctggagcgatgtcggttcctggtcttcattatgggagatcagcgcccacaccgccgagggcaacgtttgccatggcgatgtgattaatcacaaaactgaaaacagctatgtgtatgccgaatctggcctggtcaccaccgtcggggtgaaagatttggtggtagtgcagaccaaagatgcagtgctgattgccgaccgtaatgcggtgcaggatgtgaaaaaagtggtcgagcagatcaaagccgatggtcgccatgagcatcgggtgcatcgcgaagtgtatcgtccgtggggcaaatatgactctatcgacgcgggcgaccgctaccaggtgaaacgcatcaccgtgaaaccgggcgaaggtttgtcggtacagatgcatcatcaccgcgcggaacactgggtggttgtcgcgggaacggcaaaagtcactatcgacggtgatatcaaactgcttggtgaaaacgagtccatttatattccgctgggggcgacgcattgcctggaaaacccggggaaaattccgctcgatttaattgaagtgcgctccggctcttatctcgaagaggatgatgtggtgcgcttcgcggatcgctacggacgggtgtaa

SEQ ID NO: 20889 - DNA, 153 bp, Escherichia coli; identical to SEQ ID NO: 14351

SEQ ID NO: 20890 - DNA, 1107 bp, Escherichia coli; identical to SEQ ID NO: 9004

SEQ ID NO: 20891 - DNA, 198 bp, Escherichia coli; identical to SEQ ID NO: 8562

SEQ ID NO: 20892 - DNA, 198 bp, Escherichia coli
atgacccgcctgcaggacgggctgcgcacggagtctgtccgctctcaggcccgtgaacagtttaccggtgcggtggaccggatatttgacacagcggagagcgtctgtgttgcctctgttgtccgtacggccctgcgcgctgttcgtgacaccgtggtctctgttgcccgcgcggtatggaactggattttcttctga

SEQ ID NO: 20893 - DNA, 570 bp, Escherichia coli
atgacctacaaatacaaccccttctggcagcaacgtattcgtgagacggtgcggcacgcactgaatgttcatccccgcctgacggcattgcgggttgacctgcgtttcccggatgtaccggcagcaacggacgcagctgtgatatcccgcttcatcaatgccctgaaagcccgaatcgacgcttaccagaaacgtaagcatcgggaaggtaaacgcgtgcatcccacaaccctgcattacgtctgggcccgggagtttggggagtgcaaaggtaaaaaacactatcacctgatgctgctggttaaccgggatacctggtgtcgtgccggtgattaccgtgctccgggatcactggccgggatgattaaacaggcgtggtgcagtgccctgggagtggatgtcgggtgccatgccacgctggtgcattttccggcctggccggcggtgtggctggaacgcgatgatgacactggctttcagcaggtgctggaacgtgctgactatctggcgaaggaacataccaaagctcactgcaccggtgagcgcaattttggctgtagccggagttga

SEQ ID NO: 20894 - DNA, 315 bp, Escherichia coli
atgcagtcgctggtcctgccgccaccggcacgccaggcgctggcacaggcggcgctgacttaccgttatggtgatgaacatcagcccgtcaccactgctgacattctgacaccacgacgccgggaggattacggtaaagacctgtggagcgcatatcagaccatccaggagaatatgctgaaaggcggaatttgcggccgcagtgcaaaaggaaaacgtatccacacccgtgccattcacaacatcgacaccgatattaagctcaaccgcgcattgtgggtaatggcagaaacgctgctggagagcctgcgctga

SEQ ID NO: 20895 - DNA, 315 bp, Escherichia coli
atgcagtcgctggtcctgccgccaccggcacgccaggcgctggcacaggcggcactgacttaccgttatggtgacgaacatcagccagtcaccaccgctgacattctgacaccacgacgccgggaggattacggtaaagacctgtggagcgcatatcagaccatccaggagaatatgctgaaaggcggaatttccggccgcagtgcaaaaggaaaacgtatccacacccgtgccattcacaacatcgacaccgatattaagctcaaccgcgcattgtgggtaatggcagaaacgctgctggagagcctgcgctga

SEQ ID NO: 20896 - DNA, 396 bp, Escherichia coli
atgctgcagggcgtaatcccgcagacggtaataatgaaccgtcatggcataacactccgtacggcaggcgtgatgactgtacgtcatcagacaggcggcaatgccggcggcttccgggctcatttcagcgcggttaccgttcatgacgttaaacagcacccatgtttcgtcatcatcgtcatccggttcgggtgccataaatgcgccaccgttgttcagggtgtacagattccagataccaccgcagtagtcttcgcacagacggtccatccagccgaaaacccggggctccagggccacccactgtggaatgaggccaaaatgctgcggccagaagctgatgcgctgttcatcagggactatggtggcaaccaactgaggctggtcattccctga

SEQ ID NO: 20897 - DNA, 375 bp, Escherichia coli; identical to SEQ ID NO: 14403

SEQ ID NO: 20898 - DNA, 333 bp, Escherichia coli
atgacctttggtgaaggcacctcatcccgtgacaccctgcgcgacagtacaaaacacggtgtgagtgaactgcctgtgaactggtgggtacagccttctgttatccgcaccttcagctcccggggagacatgagcatgggtacagccgcagccggcagtaacatgacgttctcaccgtcccggaatggcacgtcactggacctgcaggccggactggaagcccgtgtccgggaaaatatcaccctgggcgttcaggccggttatgcccacagtgtcagcggcaacagcgctgaaggctataacggtcaggccacgctgaatgtgaccttctga

SEQ ID NO: 20899 - DNA, 936 bp, Escherichia coli
atggctacaccgttacggtacgcattaatctttttgctgtgggcgatgatagcggtgatttatgcaccgctgatcccggcagctctcacgctgatatcgcctgctttgtcgttgacgcactggcaggcgttatttgccgatccacagttaccgcaggcattactggcgacgctggtgtcgacaaccattgcggcggtcggggcgttgttgattgccctgctggtgattgtggcgttgtggccagggccgaaatggcagcgtatgtgcgcccgtctgccgtggctgctcgccattccccatgtggcttttgccaccagcgcccttcagctctttgctgacggagggctgctttatgactatttcccgtatttcactccgccaatggacaaattgggtattgggctgggcctcaccctggcggtgaaagaaagcgcatttctgctgtggatcttagcggcagtattgagcgaaaaacggctgttgcagcaactcattgtgctggattcgctgggctacagccgctggcaatgcctgaactggttgctgttgccctccgtcgcgtctgcgctggcaatggcgatgctggcgattgtcgcctggtcgctgtcggtcgtggatgtggcgattattcttgggccaggtaatcccccgacgctggcggtaattagctggcagtggttaactcagggcgacgccgatcaacaaacgaaaggtgcactcgccagcctgctgctgatgctgttactcgccgcctacgttttgctgggctatctgctatggcgtggctggcggcgtactattccccgcgtagatggcgttcgtaagcctgccacgcctttattgccaggcaatacgctggcgagtttttttacccttaaccggtgtgctgtgtgtggttctgctggcgatcctcgcggatcagtcgacgatcaatag

SEQ ID NO: 20900 - DNA, 1167 bp, Escherichia coli
atgcgcctttgtgggtggttgctgggattgttatcgctgttttctttggcaacacatgccagtgactggcaggaaataaaaaatgaggccaaaggacaaaccgtctggtttaacgcctggggcggcgataccgcaattaaccgctatctcgactgggttagcggcgagatgaaaacccattacgctataaacctgaagattgttcgtctcgcggatgccgcagacgcggtgaaacgcattcagaccgaagttgctgccggacgtaaaacgggcggttcggtggatctgctctgggtgaacggcgaaaacttccgcaccttaaaagaggccaatttattacaaacgggctgggcggagactctgcccaactggcgctatgtcgacacacagcttccggtgcgggaagatttttcagtgcctacagaaggggctgaatcgccctggggcggcgcacaactgacgtttatcgcccgccgcgatgttacgccacagccaccacaaacgccgcaagccttactggagtttgctaaagccaatcccggcacggttacctatccccgcccaccggactttaccggcacggcgtttcttgaacagttgctgattatgctaacgccagatcccacagcattaaaagaagcgccggacgatgcgactttcgcccgcgtcactgcgcccttgtggcaatatcttgatgcactgcatccgtatttatggcgcgaaggaaaggatttcccgccttcgcccgcgcggatggatgctctgctgaaagctaacacattgcgcctgtcgctgacctttaaccctgcacatgcgcagcaaaaaatcgccagcggcgatttgcctgcaagcagttacagttttggttttcgcgaggggatgattggcaacgtccatttcgtcaccattcctgccaacgcgaatgccagtgctgcggcgaaggtagttgccaatttcctgctctcacccgatgcgcaactgcgtaaagcagatcccgctgtctggggcgatccttctgttctcgatccgcaaaaactgcctgacgggcagcgcgaaacattgcaatcgagaatgccgcaggatctgccgccggtactggctgaaccgcacgcaggttgggtaaatgcgctggaacaagaatggctacaccgttacggtacgcattaa

SEQ ID NO: 20901 - DNA, 306 bp, Escherichia coli
atgagggagcgatatctgtatcttgctgacacccctcaggggatactgatgtccggtcaggtgccggaatatcagttctggttactggctgagatatcgccggtgcacagtgagaaggttattaatgcgctgagggattatctggtaatgggatataaccgtatggaggcctgcgggcgtcatggtgtgtcgccgggatatttttctggtgcactgaagcggtttcagcgggtcagtcagacggtatacaggctggtgcctttttatttcccggaggcgggtcatgaagttcacaggggagagtga

SEQ ID NO: 20902 - DNA, 798 bp, Escherichia coli; identical to SEQ ID NO: 5971

SEQ ID NO: 20903 - DNA, 2583 bp, Escherichia coli
atgcgtgatacttcttcagggcggatgaaaacgggggtgacagggctggcgctggctgtgatggtggcctgtgtgatgtttcgtgcggagagtggtattgcgcgcacctactcctttgatgcggccatgctgaaaggtggcggtaagggggtggacctgaccctgtttgaggaaggtgggcagttacccggcatttatccggttgacattatcctgaatggttcccgtgtggattcacaggagatggcctttcacgcggagagggacgcggagggcaggccttatctgaagacctgtctgacccgtgagatgctggcgcgttacggggtcaggattgaggaatatccggcgttgttccgtgcatccggagagggtcgtggtgcctccgtggcggaggaggcctgtgctgacctgacggcgataccgcaggccacggagagttatcagtttgctgcccagcagctggttctgggtatccctcaggtggcactgcgtccgcagctgagggggattgcgccggaggcgttatgggatgatggcattccggcttttctgctgaactggcaggcgaatgcggggcgcagtgagtaccggggttacgggaagcgtgtcacggacagttactgggtcagtctgcagccgggaatcaacattggaccctggcgtgttaggaacctgaccacctggaacaggtcatccggtcagtcgggaaaatgggagagttcatacatacgtgctgagcgggggctgaacgggataaagagtcgcctgacgctgggtgaggattacacgccgtcagacatttttgacagtgtgcttttccggggtgcgatgatgagttctgatgagagcatggtgccttataacctgcgtgaatttgcgccggttgtacgtggcattgcccggacacaggcgcggatagaggtgcgtcagaacgggtatctgatacagagtcagacggtggcgccgggggcatttgccctgacggacctgccggtgacggggtccggcagtgacctgcaggtgacggtgctggaatcagacgggacggcgcaggttttcacggtgccgttcaccacgccggccattgcgctgcgtgaggggtacctgaagtacaacgtcacggcaggtcagtaccgttcatcggatgatgcggttgagcacacgtcgctgggacaggtgacggccatgtacggtctgccgtgggggctgacggtgtacggggggcttcagggagcggagcattaccagtctgcggctctggggcttggctggtcactggggcgtctgggggcggtgtcgctggacacgacgcactcccgggggcagcagaagggacatgattatgagaccggtgacacctggcgtatccgttataacaagtcgtttgagctgaaggggacgagttttacggcagcgagttatcagtactcatcggatggttaccatacgctgccggacgtgctggacacctggcgtgatgaccggtacgcataccgtcacacggagaaccggagtcgccgtaccacgctgagtctgagtcagtccctgggtcagtggggctatgtgggactgaacggcagccgggatgagtaccgtgacagaccgcaccgtgattattttggcgcgtcatacagtacgtcctggaacaatatctcgctgtcggttaactggtcacgcaaccgcaacagcggcggctattacggtggctggtcgcgtacggaagacagtgtcagtatgtggatgagtgtgccgctgggacgctggtttggggggacggataacgacatcagtgccacggcgcagatgcagcgttccacgggacaggatacccggtatgaggccgggctgaacggacgggcatttgaccgccggctgtactgggatgtccgtgagcagatggtgccgggcagtgagagccatgctgacaccagtcgtctgaacctgacgtggtacgggacatatggtgaactgacggggatgtacagttacagcagcacgatgcgccagctgaacgccgggatgtccggcagcatggtggcccacagtgagggggtcacctttggtcagcggaccggggatacggtggcactgattgcggcaccgggcgtgagtggtgcgtctgtgggtggctggccgggtgtgagaacggatttccgggggtatacgctggccggttatgcgtcaccgtatcaggagaacgtgctgacactggacccgacgacgtttccggaggatgcggaagtgccgcagacggacaggcgtgtggtgccgacgaagggggcagtggtccgggccggattcaggacccgtgtgggtggtcgtgcgctggtgagtctggcccgtcaggacggaacgcctctgccgtttggtgcggtggtgacagttgagggcgaagcgggtcaggctgcgggctcagccggtgtggtgggagaccgtggtgaggtgtacctgagcgggctgaaggaaagcggtaagctgaaggcgcagtggggagagaacagtctgtgccatgcggattaccgtcttccggaagagaaggggcctgcggggatattcctgacccgtacggtgtgtatgtga

SEQ ID NO: 20904 - DNA, 444 bp, Escherichia coli
atgaacgggagtataaggaagatgatgcgtgtcacctgcgggatgttactgatggtcatgagtggtgtgtcgcaggcggctgagctccacctggagagccggggaggttcaggaacgcagctgcgcgatggtgcgaaggtggcgacggggcggattatctgccgggaggcgcacacgggttttcatgtgtggatgaatgagcgtcaggtggacggcagggcggagcgctatgtggtgcagagtaaggatggtcgtcatgagcttcgtgtcaggacaggaggagatggctggtcgccggtgaagggagaaggcgggaagggggtgtcgaggcccggtcaggaggagcaggttttttttgatgtgatggcggacggaaatcaggacattgctcctggtgaatatcggttttcggttggcggagcctgtgtggtgccacaggaataa

SEQ ID NO: 20905 - DNA, 477 bp, Escherichia coli
atgcagcagctttcctttctgcccggagaaatgacaaccagagagcgcagtctcattctgcgggccctgaaaaccctggaccgccatcttcatgaacccggcgtggccttcacctccacccgtgcggcacgagaatggctgattctgaacatggcgggactggagcgtgaagagttccgggtgctgtatctgaacaaccagaatcagctgattgccggtgaaaccctcttcaccggcaccatcaaccgcacggaagtccatccccgggaagtgattaaatgcgccctgtatcacaatgccgcagccgtggtgctggcacacaatcacccgtccggtgaagtcacacccagtaaggcagaccggcttatcaccgaacgtctggtacaggcactgggcctggtggatatccgggtgccggaccatctgatagtcggtggcagccaggttttctcctttgccgaatatggtctgctttaa

SEQ ID NO: 20906 - DNA, 1341 bp, Escherichia coli; identical to SEQ ID NO: 2084

SEQ ID NO: 20907 - DNA, 1116 bp, Escherichia coli; identical to SEQ ID NO: 2083

SEQ ID NO: 20908 - DNA, 1191 bp, Escherichia coli; identical to SEQ ID NO: 2082

SEQ ID NO: 20909 - DNA, 1545 bp, Escherichia coli; identical to SEQ ID NO: 2081

SEQ ID NO: 20910 - DNA, 891 bp, Escherichia coli; identical to SEQ ID NO: 2080

SEQ ID NO: 20911 - DNA, 411 bp, Escherichia coli; identical to SEQ ID NO: 2079

SEQ ID NO: 20912 - DNA, 159 bp, Escherichia coli
atgggtgatttttttgggctgtgtgttttgccagatgcgacattgatgggagatgcccacttaattgagctgaacaaaacatacacaaaaaatatagatctccgtcacatttttgcgttatacaggaagctcgccactgtgaaggaggtactgctatga

SEQ ID NO: 20913 - DNA, 2097 bp, Escherichia coli; identical to SEQ ID NO: 2078

SEQ ID NO: 20914 - DNA, 738 bp, Escherichia coli; identical to SEQ ID NO: 2077

SEQ ID NO: 20915 - DNA, 639 bp, Escherichia coli; identical to SEQ ID NO: 2076

SEQ ID NO: 20916 - DNA, 243 bp, Escherichia coli; identical to SEQ ID NO: 2075

SEQ ID NO: 20917 - DNA, 1650 bp, Escherichia coli
atgaaaaacatcaatccaacgcagaccgctgcctggcaggcactacagaaacacttcgatgaaatgaaagacgttacgatcgccgatctttttgctaaagacggcgatcgtttttctaagttctccgcaaccttcgacgatcagatgctggtggattactccaaaaaccgcatcactgaagagacgctggcgaaattacaagatctggcgaaagagtgcgatctggcgggcgcgattaagtcgatgttctctggcgagaagatcaaccgcactgaaaaccgcgccgtactgcacgtagcgctgcgtaaccgtagcaataccccgattctggttgatggcaaagatgttatgccggaagtcaacgcggtgctggagaagatgaaaaccttctcggaagcgattatttccggtgagtggaaaggctataccggcaaggcaatcactgacgtagtgaacatcgggatcggcggttctgacctcggcccgtacatggtgactgaagcactgcgtccatacaaaaaccacctgaacatgcactttgtttctaacgtcgatgggactcacatcgcggaagtgctgaaaaaagtaaacccggaaaccacgctgttcctggtagcatctaaaaccttcaccactcaggaaaccatgaccaacgcccacagcgcgcgtgactggttcctgaaagcggcaggtgatgagaagcacgttgcgaaacactttgcggcgctctcaaccaacgccaaagccgttggcgagtttggtattgatactgccaacatgttcgaattctgggactgggtcggcggtcgttactctttgtggtcagcgattggcctgtcgattgttctctccatcggctttgataacttcgttgaactgctttctggcgcacacgcgatggacaagcatttctccaccacgcctgccgagaaaaacctgcctgtactgctggcgctgattggcatctggtacaacaatttctttggcgcggaaactgaagcgattctgccgtatgaccagtatatgcaccgtttcgcggcgtacttccagcagggcaatatggaatccaacggtaagtatgttgaccgtaacggtaaggttgtggattaccagactggcccgattatctggggtgaacctggcacgaacggtcagcacgcgttctatcagctgatccaccagggaaccaaaatggtaccgtgcgatttcatcgctccggctatcacccataacccgctctctgatcatcaccagaaactgctgtctaacttctttgctcagaccgaagcgctggcgtttggtaaatcccgcgaagtggttgagcaggaatatcgtgatcagggtaaagatccggcaacgcttgactacgtggtgccgttcaaagtgttcgaaggtaaccgcccgaccaactccatcctgctgcgtgaaatcactccgttcagcctgggtgcgttgattgcgctgtatgagcacaaaatctttactcagggcgtgatcctgaacatcttcaccttcgaccagtggggcgtggaactgggtaaacagctggcgaaccgtattctgccagagctgaaagatgacaaagaaatcagcagccacgatagctcgaccaatggtctgattaaccgctataaagcgtggcgcggttaa

SEQ ID NO: 20918 - DNA, 1350 bp, Escherichia coli; identical to SEQ ID NO: 2073

SEQ ID NO: 20919 - DNA, 273 bp, Escherichia coli; identical to SEQ ID NO: 2072

SEQ ID NO: 20920 - DNA, 873 bp, Escherichia coli; identical to SEQ ID NO: 2071

SEQ ID NO: 20921 - DNA, 948 bp, Escherichia coli; identical to SEQ ID NO: 2070

SEQ ID NO: 20922 - DNA, 807 bp, Escherichia coli
atgcaaacgtggttaaatttgcaggataaaatcattattgtcaccggtggcgcatccggtattggtctggcgattgtagaggaattattagcacaaggcgcgaatgtacagatggtcgatattcacggtggcgatggtcaatatgaaagccataaaggttatcagttctggccgaccgatatttccagcgccaaagagataaatcatacggtagcagaaattatccagcgttttggtcgcatcgacggtctggttaacaacgccggggtcaatttcccgcgtctgctggtcgatgagaaagcgcctgccgggcagtatgaactcaacgaagctgcattcgaaaaaatggtcaatatcaaccagaaaggcgtttttctgatgtcgcaggcggtggcgcgacagatggtcaaacaacatgatggcgtgattgtgaatgtttcctcagaaagtgggctggaaggctcagaaggccaaagctgttacgccgcgaccaaagccgcgctcaatagcttcacgcgctcctggtcgaaagagctgggcaagcacggtatccgtgtggtcggtatcgcgccagggattctggaaaaaacaggactgcgcacgccggaatatgaagaagcgctggcgtggacgcgcaatatcaccgtcgagcagctgcgtgaaggctataccaaaaattccattcctattgggcgcgccggaagattagcagaagtggctgattttgtttgttatctgctgtctgaacgcgccagctatatcaccggagtaaccactaacattgcgggcggcaaaacgcgcggctaa

SEQ ID NO: 20923 - DNA, 408 bp, Escherichia coli; identical to SEQ ID NO: 2068

SEQ ID NO: 20924 - DNA, 495 bp, Escherichia coli; identical to SEQ ID NO: 2067

SEQ ID NO: 20925 - DNA, 798 bp, Escherichia coli; identical to SEQ ID NO: 2066

SEQ ID NO: 20926 - DNA, 825 bp, Escherichia coli; identical to SEQ ID NO: 2065

SEQ ID NO: 20927 - DNA, 1230 bp, Escherichia coli
atgaaaacaacagctctgcgtctttatggtaaacgtgatttacgcctggatacctttgaccttcctgaaatgcaggaggatgaaatcctcgcaacggtggtcactgacagcctgtgcctctcttcctggaaagaggccaatctgggtgaaaaccataaaaaagtacccgacgatgtggcgaccaaccccatcatcatcggccacgaattttgcggcgatattctggccgtgggtaaaaagtggcagcacaaattccagccgggtcagcgttatgtgattcaggccaacctgcaactccccgaccgcccggattgccccggctactccttcccgtgggtaggcggcgaagcgacgcatgtggttattcccaacgaggtcatggaacaagattgcctgctggcatacgacggcgaaacctattttgaaggctcgctggttgaaccgctttcctgcgtgattggcgcgttcaacgccaactatcatcttcaggaaggtagttataaccacacgatggggattcgcccgcaagggcgcacgctgatcctcggcggcaccggaccaatgggactgttggcgattgattatgcgctacatggacccgttaacccttcgctgctcatcattaccgataccgacaacgacaaattgagttatgcgcgcaagcactatccatcagaaccgcaaacactgattcattatctcaatgccgccgatgcagcatttgatacgttaatggcactgagtggcggtcacggcttcgatgatattttcgtctttgtgcctaatgaaggactggtgactctcgcctcttccttgctggcgacagatggttgtctgaatttcttcgccggaccgcaggataagcacttcagcgcgccaattaatttctacgatgtgcattatgcatttacccactacgtgggcacatcaggcggcaataccgacgacatgcgcgcagcggtcaaattgattgaagagaaaaaagtgcaggccgcaaaagtggtaacacatattcttgggctgaatgccgcgggcgaaaccacgcttgaattgcctgccgtcggcggcggcaaaaagctggtgtataccgggaaatacctgccgctgacgtcactcacgcagattcaggatcaagcactggcggtgattctggcgcatcatcaggggatctggtccggtgaggcggagcaatacctgctcgcccatgcagaggcaatttcccatgattaa

SEQ ID NO: 20928 - DNA, 690 bp, Escherichia coli; identical to SEQ ID NO: 2063

SEQ ID NO: 20929 - DNA, 1632 bp, Escherichia coli
gtgctaactttgcttcacctgctttctgccgtcgccctgctggtctgggggactcatattgttcgaacaggcgtaatgcgcgtcttcggcgcgcgtctgcgtactgtccttagccggagcgtcgaaaaaaagccgctcgccttttgcgcggggatcggcgttaccgcactggtgcagagcagtaatgccaccaccatgctggtgacctcgttcgtcgctcaggatctggttgctctcgcgcctgcgctggtgattgtgctgggtgcagatgtcgggacggcgctgatggcgcgtattctcaccttcgatttatcctggctgtcaccgttacttatttttatcggcgtgatttttttcctcggacgcaaacagtcacgcgccgggcaactgggccgcgtcggtattggtcttgggctgattttactggcgctggagttgattgtgcaggccgtaacgccgatcactcaggcaaacggcgttcaggtgatctttgcctcgctgactggcgacattttgctggatgcgctgattggtgcgatgttcgccattatcagctactccagccttgccgcggtactgctgaccgcgactctgaccgccgcaggcattatctctttcccagtggcgctttgtctggtgattggggcaaacctcggttccggcctgctggcgatgctcaacaacagtgccgccaatgccgcagcccgccgtgtcgcgctgggtagcctgctgtttaagctggtgggtagcctgattatcctgccgtttgttcatttgctggcagagacaatggggaagttgccattgccaaaagcggaattggtgatctatttccacgtcttctacaaccttgtacgctgcctggtcatgttgccattcgttgacccgatggcacggttttgcaaaacgattattcgcgatgaaccggaactggatacccagctacggcctaaacatctggatgtcagcgcgctggatacgcccacgcttgctctggcgaacgctgcccgcgaaaccctgcgcattggcgacgccatggaacagatgatggaagggttgaataaagtgatgcacggcgagccacggcaggagaaagagctgcgtaagctggctgatgacatcaacgttctctataccgccattaagctgtatctggcgcggatgccaaaagaggaactggcagaagaagagtcgcgccgctgggcggagatcatcgaaatgtcgctcaaccttgaacaggcctccgatatcgtcgagcgcatggggagtgaaattgccgacaaatcgctggcagcaaggcgagcattttcgcttgatggcttgaaggaactggatgcgctctatgagcaattgctcagtaatttaaaactggcaatgtcggttttcttctctggcgatgttaccagcgcccgtcgtttgcgccgcagcaaacatcgttttcgcattcttaatcgccgctattcccacgcccacgtcgatcgcctgcaccagcaaaacgtgcagagtattgaaaccagttcgctacatttaggcttactgggagatatgcagcgtctgaactcgctgttttgttcggtggcttacagtgtgctggaacagccggatgaagatgaaggacgggacgagtattaa

SEQ ID NO: 20930 - DNA, 450 bp, Escherichia coli
atgcaacgtcaatataaaaaatacattcttcttttttggggtgttatggatgttatcgcgatagccacatatctgttctactcgcttggtaatgatcgtatccctttttattccgatatcgttcattcactttctttacttaaggatatcggtgttgaaggcggtttttacgcttatgcagtcgccactgttacgctacaaatagtattattgttctctttatttttttctgcgcaatgttttttaagacaaaaattatttagtttctcttttttggcgattcaggagtttatgcgttttgctaccgtaagctgttcaatctccgtaataccgttgttacttaattatttttattcacaggatctggtcttaaatatttcgttgtttatcttctcagaggtcacaaaagtgacaacgattatctggtgtaaacgacaggggaaagtgtga

SEQ ID NO: 20931 - DNA, 321 bp, Escherichia coli; identical to SEQ ID NO: 2060

SEQ ID NO: 20932 - DNA, 3684 bp, Escherichia coli; identical to SEQ ID NO: 2059

SEQ ID NO: 20933 - DNA, 825 bp, Escherichia coli; identical to SEQ ID NO: 2058

SEQ ID NO: 20934 - DNA, 1725 bp, Escherichia coli
atgccgcgtggcctggaattactgattgcacaaaccattttgcaaggtttcgacgctcagtatggtcgattcctcgaagtgacttccggggcgcagcagcgtttcgagcaagccgactggcatgctgtccagcaggcgatgaaaaaccgtattcatctttacgatcatcacgtgggtctggtcgtggagcaactgcgctgcattactaacggccaaagcacggacgcggcatttttactgcgcgttaaagagcattacacccggctgttgccagattacccgcgcttcgagattgcggagagctttttcaactccgtgtactgtcggttatttgaccaccgctcgcttactcccgagcggctttttatctttagctcccagccagagcgccgctttcgtaccattccacgcccactggcgaaagactttcaccccgatcacggctgggaatctctgctgatgcgcgttatcagcgatctgccgctgcgtctgcgttggcagaataaaagccgtgacattcattacatcgttcgccatctgacggaaacgctggggacagacaacctcgcggaaagtcatttacaggtggcgaacgaactgttttaccgcaataaggcagcctggctggtgggcaaactaataacgccttccggcacgttgccatttttattgccgatccaccagacggacgacggcgagttatttattgatacctgcctgacgacgaccgccgaagcgagcattgtttttggctttgcgcgttcttattttatggtttatgcaccgctgcccgcagcgctggtcgagtggctacgggaaattctgccaggtaaaaccaccgctgaattgtatatggctatcggctgccagaagcacgccaaaaccgaaagctaccgcgaatatctcgtttatctacagggctgtaatgagcagttcattgaagcgccgggtattcgtggaatggtgatgttggtgtttacgttgccgggttttgatcgggtatttaaagtcatcaaagacaggttcgcgccgcagaaagagatgtctgccgctcacgttcgtgcctgctatcaactggtgaaagagcacgatcgcgtgggccgaatggcggacacccaggagtttgaaaactttgtgctggagaagcggcatatttccccggcattaatggaattactgctccaggaagcagcggaaaaaatcaccgatctcggcgaacagattgtgattcgccatctttatattgagcggcggatggtgccgctcaatatctggctggaacaagtggaaggtcagcagctgcgcgacgctattgaagagtacggcaacgccattcgccagcttgccgctgccaacatcttccctggggatatgttatttaaaaactttggcgtcacccgtcacgggcgcgtggtgttttatgattacgacgaaatttgctacatgacggaagtgaatttccgcgacatcccgctgccgcgctacccggaagacgaacttgccagcgaaccgtggtacagcgtctcgccgggtgatgttttcccggaagagttccgtcactggttatgtgccgacccgcgtattggtccgctatttgaagagatgcacgccgacttgttccgcgctgattactggcgcgcactacaaaaccgcatacgtgaagggcatgtggaagatgtttatgcgtatcggcgcaggcagcggtttagcgtccgattcgtataa

SEQ ID NO: 20935 - DNA, 1305 bp, Escherichia coli
atgaaaacccgtacacaacaaattgaagaattacagaaagagtggactcaaccgcgttgggaaggcattactcgcccgtacagcgcggaagatgtggtgaaattacgcggttcagtcaatccggaatgcaccctggcgcaactgggcgcggcgaaaatgtggcgtctgctgcacggcgagtcgaaaaaaggctacatcaacagcctcggtgcactgactggtggtcaggcgctgcaacaggcgaaagcgggtattgaagcagtctatctgtcgggatggcaggtagcggcggacgctaacctggcggccagcatgtatccggatcagtcgctctatccggcaaactcggtgccagcggtggtggagcggatcaacaatactttccgccgtgcggatcagatccaatggtccgcgggcattgagccgggcgatccgcgctatgtcgattacttcctgccgatcgtcgccgatgcggaggccggttttggcggtgtactgaatgcctttgaactgatgaaagcgatgattgaagccggtgcagcggcagttcacttcgaagatcagctggcatcagtgaagaaatgtggtcacatgggcggcaaagttttggtgccaactcaggaagctattcagaaactggtcgcggcgcgtctggcagctgatgtgacgggcgttccaaccctgctggttgctcgtaccgatgccgatgcggcggatctgattacctccgattgcgacccatatgacagcgaatttattactggcgagcgtaccagtgaaggcttcttccgtactcatgcgggtattgagcaagcgatcagccgtggcctggcgtatgcgccatatgctgacctggtatggtgtgaaacctccacgccggatctggaactggcgcgtcgctttgcacaagccatccacgcgaaatatccgggcaaactgctggcttataactgctcgccttcgttcaactggcagaaaaacctcgacgacaaaactattgccagcttccagcagcagctgtcggatatgggctacaagttccagttcatcaccctggcaggtatccacagcatgtggttcaacatgtttgacctggcaaacgcctatgcccagggcgagggtatgaagcactatgttgagaaagtgcagcagccggaatttgccgccgcgaaagatggctataccttcgtatctcatcagcaggaagtgggtacaggttacttcgataaagtgacgaccattattcagggcggcacgtcgtcggttaccgcactgactggctccactgaagaatcgcagttctaa

SEQ ID NO: 20936 - DNA, 411 bp, Escherichia coli; identical to SEQ ID NO: 7149

SEQ ID NO: 20937 - DNA, 1491 bp, Escherichia coli; identical to SEQ ID NO: 8027

SEQ ID NO: 20938 - DNA, 483 bp, Escherichia coli
atgggggctccgcatcttcatggttatcaccgcctgaccctggcccacttttttctgccagaaaaaggcaccatcatctcagtggcaccacagggactctatcaggtcgtcaacccgggaacaccaccgttcattcctgccattcaggaagggttaatgaccagcattcagacccatgaaatcatgctgcttacacattttaatctgggcggcgttttactcagtgagctacatcgtctgggtgaaaaccggctggcaaacaggctgaacagcctgctccggcgtttcgacgatcgtgatctctaccacacgctgatatggctgtgctggtatgatctgatgtgtgcccactccatgcagccctggactgaagagttaaagcataaatcacatgcagagcttgaaaactgggctgtggcgcgcaaacgggaaaagcgcgagctggaactgatgattgacgagtacctgttatacgcctgttga

SEQ ID NO: 20939 - DNA, 735 bp, Escherichia coli
atgacaatacaagaagtaaaaaaaccaagagttagaacaaaaacagaaaatgataaattaacagaatataagatgaatccttttgtttttgacaaagaactaaaaattgaaacaaaaacaagaaatttaactgttagaaaaggtactgaattagtaaataaagataatgctgacgaatcagaatcctatttttctaatattgttcaaaagaaagaagtagataaagaagaatttataaaattatttacatctcaaataaaagtatattttgatctaacaaaaacagctcataaaattttccttataattttagctttatatcaaaaagaaatcggtaaagattatgttttattgacatgtaagaaagctcagaatgttgctaaaacattagattttgagctttcagcaccaattttttatcgcggtataaaagaactggtagagaaaaaaattattgctaaatctgtagataaaattgttttttatataaaccctgcagttttctttaatggtgatagagcaagatttgtaactgaagttatcaagaaaaaagaagagatagagaaaaaacaatttctcgaagagttagaaactacatcaaaaaataaagattttgaaactgatgatagtgttgaaaatttagacctgatgattgcaagattacaaaagaaaaaagaagaattagagcgaaaagaaaaattcgggcaatggcaggatctggaagatgcatcataa

SEQ ID NO: 20940 - DNA, 1107 bp, Escherichia coli
atgtattcaataatcagaaaacaatcacacaaaaaaacagctatacaagctgtacataatcataatatgagaatagttatagaagagaatgtaaattctaaaaaatcaaatttgaatgaaatattaattggtacggaaaatactagatctgacataatgagttatattaaaaataatgatattgtcattagaaataaagacacagtaatttttaacgaattcgttttaactgcatcaccagaatttttctttaacaataaagatggttcaaaaaaaaccaaatctgaatataatgacaatttaaacgaatgggttaaaacccaaattgagtttttagaaaaagaaaattacgggaaatgtgttaatgcagttttgcatcttgatgaatcaacacctcatattcatgcattaattttacctgtccgtgataacaaattaaacaataaatctttttggcgaggtaaaaattcttatggaagattacaagatttatataatgcatcaaatagtaaatttggtttaaaacgtggtgaagaaaaaagtaaaactttagttgatcatacaacactaaaagattacagagaattaatcaaacaagatttagaagaagaaaaagaattttataacgagttatcgaaaaatatattagatattccaccaagaaaaaattttattggtatggagaaaaaatactcatctgatgaagttaaagaaattgctacagctacttttaaaaaactaaatagacaaagaagaagagcaaaatttagggctaaaaaatctgatgaaaaagctgaagctgctacaagtgaattttataaaaaaaagaaagagacatcgaaaattgagtttttttataatcaaaatatgcagcaattggaaaaaacctctgtggaaaattccacacttaaaacccagaacttggagcttaagcaatcacaaagtgacctagatctggtgagaaaatttttacctatggagctgcaaagccttgtcgtcagagccagagaactggcctctggcggcgattctggcggtacaaagcatactgcagaacctacaccaactgcagatctaactacctataaaagacctaaatacaaataa

SEQ ID NO: 20941 - DNA, 147 bp, Escherichia coli; identical to SEQ ID NO: 6018

SEQ ID NO: 20942 - DNA, 534 bp, Escherichia coli
atgaacaccaaaatcaaatacggcctgtcggctgccgttctggcgctgattgccgctggtgcgcctgcgcctgacattctcgaccagtttctggatgaaaaggaaggcaaccacaccacagcataccgtgatggtgcaggtatctggaccatctgccgtggtgccatcatggtggatggcaaacctgtcgttccgggcatgaagttgtcgaaggaaaaatgcgaccgggttaacgccattgagcgtgataaggcgctggcatgggtggagaaaaacatcagagtgccattgagtgaaccccagaaagcggggatcgcgtcattctgtccgtacaacattggccccggtaagtgttttccgtcgacgttttataaacgaattaatgcaggtgatcgcaggggagcgtgtgaggcgattcgctggtggattaaggacggtggcagagactgccgtattcgttcaaacaactgctacggtcaggtatcccgtcgtgaccaggagagcgcgctggcgtgctggggtatcgacagataa

SEQ ID NO: 20943 - DNA, 780 bp, Escherichia coli
gtggcgattagtcttgaccgtactgaaggtgccacgctggagttttacgaagctgaggcgaaaaagcaggcgaagcagtttttcatggatgttgctgccgggttatgtgaatggaacgaaccgttgccggaaaagcgccccgtaattttagaggcgcaggatgtgttgataacctacaaaggaaagctaccgggaagaattacttgttctctgaagatgccgccgtcaacactgcggtcagaaaaagatgatgttgaatcacgtattgaaaaactggagagctacgtcgttgagctgaataagaaatggtcgatattggtgccttctggcgatgaaaagcagtttgctgcgtttgacgattattgtcggaaagtgatgagcagaaatctcgcagagtgtttcagtattcataatgataatttcagtgagctggaatgggagtgtaaccggccatcctttgttgtatccggtgatgctgggaaaataaccatctcagaaaatgggaaagtaacacctccatcgcaccagcacagtgaggagctcattgaatttgccattgattacctgaagaacaataaaaagcaggggctgatgaagcgcgttggccgttgcatgggatatcttcaggtagccgctgagattgaagcgctggccagtggtgctgataaggatgcaattgtgcgggaggctcttcttcgtgattttaatactccaccctttaaaaaagtgccggcttactggcttcatccggggctgacttatcttaaagtgcgtatttag

SEQ ID NO: 20944 - DNA, 678 bp, Escherichia coli; identical to SEQ ID NO: 10810

SEQ ID NO: 20945 - DNA, 534 bp, Escherichia coli
atgaacgcaaaaatcagatacggcctgtcggctgccgttctggcgctgattgccgctggtgcgcctgcgcctgacattctcgaccagtttctggatgaaaaggaaggtaaccacaccacggcataccgtgatggtgcggggatctggaccatctgccgtggtgccatcatggtggatggtaaacctgttgttccaggcatgaagttgtcgaaggcaaaatgcgaccgggttaacgccattgagcgtgataaggcgctggcatgggtggagaaaaacatcagagtgccactgaccgaaccccagaaagcggggatcgcgtcattctgtccgtacaacattggtcccggtaagtgtttcccgtcgacgttttacagacgaattaatgcaggtgatcgaaaaggtgcctgcgaagcgattcgctggtggattaaggacggaggcagagactgccgtattcgttcaaacaactgttacggtcaggtatcccgtcgcgaccaggagagtgcgctggcgtgctggggtatcgacagataa

SEQ ID NO: 20946 - DNA, 351 bp, Escherichia coli
atgaagaaaaaatacgaactggttgttaaagggataaataattacccggataagattactgttactgtggcactggaagttggtgggtatccgtcactgttgttgccagatgtggcgattagtcttgaccgtactgaaggtgccacgctggagttttacgaagctgaggcgaaaaagcaggcgaagcagtttttcatggatgttgctgccgggttatgtgaagggaacgaaccgttgccggaaaagcgccccgtgattttagaggcgcagaatgtatggataacctacaaaggaaatctaccgggaagaattactggttctctgaagactccaccggaatcacaaccttaa

SEQ ID NO: 20947 - DNA, 645 bp, Escherichia coli; identical to SEQ ID NO: 8435

SEQ ID NO: 20948 - DNA, 162 bp, Escherichia coli
atgagcgacaataaaccgggttacacttgccatccatttctgatgctggatgagcagcagctcacaccggttttcaagtttttgcataatattctctcctttagcacgcagcaaaatgcctccggaggccggatagtgtattcgctgcggttgaacgggtaa

SEQ ID NO: 20949 - DNA, 207 bp, Escherichia coli; identical to SEQ ID NO: 13738

SEQ ID NO: 20950 - DNA, 159 bp, Escherichia coli; identical to SEQ ID NO: 5044

SEQ ID NO: 20951 - DNA, 174 bp, Escherichia coli
atggcattgacacgttcttactatgtgtcgatgaaattcgcttttttaaacatgtcttctggatatgtttaccgcatcgacacattccagccatatgtcgataaagccttattttttaaacatgttgccgggatatgcttatggcatcgacactttctggctatgtgtcgatag

SEQ ID NO: 20952 - DNA, 672 bp, Escherichia coli
atggctttcagagcggaagaagcagcagcatcgaatttcgaaaatgcttacagatatctagttccacaaggttcaaatcaggagatgcgttcgaaagttagggcgaagctcaaagaaattgttgaagaatgtgggccagtagtggatgggtatccagcatggcatccttttttgctggaaagagataaagctatttgggcgcctatgactcccaataatactcccagctttaaatacctggaccacacggtctatttcaggaacggcattcttacctgtccttatggtcatggggttgatgaatttatagctggtataaaacgtctaaagcacacggatgcccatttctctattgagaagattgatgacgttgtgctttataatgacaacgccgtcccgttgttaataaaatgccattggcttatttcggaagatatggaagaggatggcaccattccagcaaaagcagcaattggattgatgcttgaaagcgaggttcctaactggcggcatgcagtttattgtgaaagttgggaagatatgcgcgggcagttgatgggatatccgcacggtgccagatcatctctatttgttaatcagcagacaggacagaaaatgaaaaacttctggaatcagctgattaagaccggaattcttggggaagagcgataa

SEQ ID NO: 20953 - DNA, 720 bp, Escherichia coli
atgacaactattaacaagcatgggttatctagaacaattcctgaacctgtaaaactggaggtaaggcagcgctgtggcttcggttgcgttgtttgtgcttctcccattgttgagtatgagcatgtaattcccacatacgctgatgcaaaggagcactctccaaatgcaatagcactactttgtcctacgtgccatgcgaaagtaacgaaacgtctttactctaaagagaaaataattaaagcaatggaatctcctgcagccttacaaaaagggaatgtggccgatatattggacttttctgataggcatccaacaataatatttggtggtgcgacgtttgaatcctgtactgtaccaataatgtttcaaaatgagccattgttaactattgaaaaagaaaataatgcttttcttatttcgggtaaattttacgatagtcaaggtattgttaatcttgaattaattaagaatgagtgggtttgtagtgcaaggcattgggatgttcaggttgtcggtcctagaataactattatagaaaaaaggaaaggtcctcgtttaattattaaagttgatgcgcctgaaagattgattgtggaaagattagatatgttggttaaggggactcggattgtaggagacgaacacaagctaagagtaggtccacatcaatttcacaactgtggagtttcaaattgcaatattggtttctgctttggctaa

SEQ ID NO: 20954 - DNA, 1206 bp, Escherichia coli
atgcatattcaacaagaactcgatgaagaacttaataatctttttgacactattagaaaaaaatcaagtattcgaccaccaattgagattgaaaaaaaccttactttgatagatgacttcgctctaaaatgcagtaaattccggggttgtttagtagattacatccaggaaaatgataacaggttaagtttacgcttgcgcaatagacttagagctgtagatatcatgcagaaagaaatcgtctcgtgtttagagtgttttttatcaggggatattaagtcggcatatgactcatttgaaagtatgctagagccacgaactatatctcgtcatattgaaaatatatgcatacctctttctgacttatgtaatgaagataaaccattattccgcgttagaaaatctgatacgccacttacatcaagaagagatatgtttcatattccgttcagtcagcgtcactttgttagagcacagagattttcagttgctggtctaccctgtttatatttaggaacatctctttatatatgctggagagaaatggataagccagattttgataagctatatatatctgcctacaagatcgataaaaataatgactcaaaggtactaaatataggacctgattttttatataaacagagatctatattagagtcaaaaagaaagaacaaatatgatttcaataccaaactctcatatttagcactttggcctttgataattgcatgcaattatttaaaaaaatatgacaatgcttcctttgtacaagaatatattatccccaatcttttgatgcaatggatcagtcggaacagcaatgagaatgttgttggtatagcctaccgctcaacaaaattacctgctaatgccttaggtagcagaggaataaatgtggtacttcctccaaaagtgcgttacgaggagatggccaataatgaattttgtccaaatctagcgaaaattttcaaattcacattgcctgtatcttggcaggtcctaaaaacagttgagtacgtgcctgaatcagttgcacaatccgatcgagagaatctcagcagaaggctacgaagaagaaaaaatcgtgagctaacaggaagcatagatgatgaaattttgaacatctataatttaactgacttttataaactcgaaacttgtatggatgaaattcaagtatatgcccatattaaaccatga

SEQ ID NO: 20955 - DNA, 1890 bp, Escherichia coli; identical to SEQ ID NO: 5127

SEQ ID NO: 20956 - DNA, 888 bp, Escherichia coli
atgagcgcaccatcatttatttttgcaatattacccgttatactgacaatgtgtatcattacgtctttattctggatttttatttatactcgaggcaaatggacattttcttcaggcatcactgtttcccggtatcttcaacagtatcgctggtttcatttcgggaatatatccttactaatcctgtcagttatattaacagcccgggtatacgatactgagtaccctttgcaggtatatatctgcatatatataccacccgttatgattctcacctccctgctgacaattttaacgattaaagaagcaacgagaacgtataaaacatataaatcaaacagactgacgccggttttcattatagcttatgtcggactgggatatctgttctgttttacaaccggcatttatgaattatcttcaacacgatttaatcctgttgtcagtgaaatgctgatgtcattcctgtcacgtctttccattatgctgcctgtcacactggctgaaatagcagttatttatcttctgcttctggcgctgcatttcccggatggcgtgtccgccagggggctctccgttacccggtatctgcgccataacgactggttttattatataaatacaggaaatgctgttctggcactgatactctccacatggatatatcattccagcatttctcttaccgctgctttatttacaggcgcgttaagtattttttttaacacgaccattccggccagtttatcggtcattgaacacacgccatctgataccgattcaaagaaatgggatacgctaaaaacatccccggcaacagtcctttattgctcgggaatcggttacgttattggctttatcgtgaatccctctactgctattggctga

SEQ ID NO: 20957 - DNA, 429 bp, Escherichia coli
atgaaaaataaaatattctggctccggaaatataaagagaataatagcttgcttcaaatgatagcttccagaaaacaagtggagctgttacgaaatattatgactgactctttattattttgctctgtaggttttgtgttcctgaatatgtgtgattcaaaatatacgttgatttctggtgagggtggtttaggtgctgattgtgccgattatttattatttttcgtatatgcgattgcgttgctgatgataattttatggatgacagtttcagttctttattccattgcggaatatacgagtcaggaaaaacaggggaaaagtaaagtccgtagctacctctggttttttatctggttttttgtttttaactgtgccgtatattcttctctgaagacaatagatataaaatatttattcagccaatag

SEQ ID NO: 20958 - DNA, 438 bp, Escherichia coli
atgggctggttcatcgtgttcatcatggtcatcacgaccacaggcaatttctggttcaccagtcagctctcccgcagcgaacaccgttaccaggccgcagaaaacacacaacaggcagcaacgttcattcgttatatgaacgccatcaatgattatctgcatcaacatccggaacgacggacagccggcggtcggctgacatccgcccagctcgggcttcccgggacggataccgtcagtcatatcatcagccagcaacgtgtttttgtctgggccacagaaactccggggctgatggccgcactcagggaacagagtaatgactctgccctgctcggcagggtggaaaacggccgactgctggacaccgccggcagagcgctttccgtcacacttccgtcggtgatccccgatcacgtcatcctctggatgaattag

SEQ ID NO: 20959 - DNA, 1620 bp, Escherichia coli
atgaataaaaaaattcttgtcattatgattgccgccgctctgttacagggctgtgccagtttcagacagcttgagagcacaagaaaagaagccgtcgcggaacaacaacgggcacgggaaatgatgtctgatctgcgaacccggatgccggttgttaaggagtcctcacgacaatggatcaatccccgtccggtcatggataaaaacaccggcaaaaccgttcccggctgccccattgtcattcatacccgtcagagcatcactcttcagcaggtggttcagcggatcacggaaagctgccatattccggtacggatcacaccggatgtactgacatacctgaatacatccacaaccggcagcacacaacaaatccagggcgcgttaccaccgccggatgcgagcggaatggttccccttgccgccattggcgcatctgacacgccacaatcccgtttgccgggaaatgcctcatcactgtctgaactgaatgcctccggcctgacgtccctgctgaatgcagtctcttcccgtctcggtatatcctggcgttatgacggctcgcatatcaccttctattatctcgagacacggaccttccccatcacctatatggacagtcaggtggcctataacgccactgtggtcagcggcaccatgtcctcaaacggttcatcgggaggagatgcatcagatgccatttccggtgatgccagcaatacccagaccaccaccgtggatatgaagtctgcgctgtatcaggatgtgaaaaatgccgtcacatcaatgctgaccccgggtgtcggacgcatgttcatgtccacgggctttatcaccgtcacggacaatccacaggttctggaaacggtccgggcgttcattgaaaaacgcaatgaagaaatgaagcgccaggtggtgctgaatgtggaaattctgagtatccggaaaacccgtaatgagcaggccggtatcgactggaacgcggtcttcagcgacagaacgctgggactgagcctcggcagcacattcaccggtgctgccagcgatgccatcaccggcggtgtatccattgtggatggtaaactcaccggttcaaaagccttcctgaaagcattgtcttcccagggggatgtcagtgtggtgacccagaactctgccgtcaccaaaaacctgacgccggtgccgatgcagatcgccaatcagcagagttacatcgagagtgtgacaacggataccaccgccaatgtcggctcatccacctccctgaatgcggccaccatcaccaccggttttaacatgacccttctgccgttcattctgccggactcacagacactgcagttactctattcaatgagtctctccgacaaaccggttattgagaattatgagagcggtggaagtaaagcccagttgccgaatgtggatctgaaaaccatcaatcagaccgtggacctgaaatccgggcagacggtcattatcagtggcttccagcagtcaggacgtcgcagcggaaaacagggggtaggcacgccgggattcttcggtcttggcggtgggatcaacagtgaaaacgacgacaccattctcgtggtgctgatcacgcccaatatcatctga

SEQ ID NO: 20960 - DNA, 1296 bp, Escherichia coli
gtgacggatatttcaccgacagagcggcagatgtttccgctgacagcaggacgaaatgtgtttctggccggcctggaatggaaaacactgccctcacagtaccggcatgtccgcgactttgcccgggcacagaaagctgaccttttcctggcctgtcagtatctcagtaatgacgatgccgacacccacaccatggtggccaccgccagtcgccgcatactgcccggaaaaacccgtcagtgcttctccctcgccctgctgatcctgccactgcttgaacagggcggctatgccatcacggaactgacgttacccggagaaacaccgcgctacagctttgtttccgctgtcgacggtgttctcgtcagtgacctggtgggaagcggggaagaggtccgggaagcccgggatacctttctttccatcaacaccgaaccggtgcagggctggacacgctatgaaccggtggcattttcagcaggcgatcagaatcagcccctgccgctgtccaccctgaccggctcaggtaaacatccggctaccgcgcgcctgaatccggtatcccggggagcgcagttcatcactgtctcgctgatcatcacccttctcggcgctgcatggtacggctggcagtattatgaacgatggcagactgaaaaagccgcgcaggcagctgctgcccgacaggtcacagaggaacgaatcagtcccccctggcccggactccccgaaaccgacgcgtttatccggggatgtgctgacatatgggcgtcactgccactgtcagccgccggatggcgttattcgctggctgaatgctcgactgaaggcgacaacggcaatctgcgcgcgtcatacaccaatacagcgggcacaacagtgactgacttcatccggcgcatcagtgatatgacgggcacccgaccatttattgtgatgccggaaggaaagaacggcggcattggactgccggtcaccttccgcctgtctgaacatcccgtcgaagttgatgctctgccggaaaccagtgtcctgcaggaacaactgaccacgcttgctcagtcaatgcaactgacgctggactggcaggaagtcagtaacagcgtcaccgatgaaaacggaaacatcatccagcccccgtggaaagagtatgaccttcagatacagacggcactcccggtacaccagctggctgaacgcctgaaggcgccttctgtccgttttatctctgtcacacgacaactggagaacggtcgtttccactatcaatttacaggtaaatattatgctcgctaa

SEQ ID NO: 20961 - DNA, 453 bp, Escherichia coli
atgctcgctaaaacaaaagcccttctggtttcagttctgctgttgccgaccacagtcatggccacagacggaaatgcccctccacagaacagacagcagctgcagattgaacagatacaggacgaaacagccctgtatgaagccatgctggcaagagaaaaaatccgtcatgagctgcgtacactggagctgggggttcccgcagaggccagaggtcagccggaaagcacttccgcagtcacaacaaatacacaggcattaccatccccccgcctgacagaaatatttggtgtacagcctcacctgagcgcccgaatagaacttccggggggaaacatcaccgatgtgaaagcaggccagaatctccccggaaccccttatctggtggagaaaatcacgccggacagtgtggtactggagcagtccggcatcagaaaaaccctgcgaccatga

SEQ ID NO: 20962 - DNA, 282 bp, Escherichia coli
atgacttatgaactggaatttgagcgcagggccctgaaagaatggcataagctcggtcatacagtccgtgagcagttcaaaaagaaactgtcagaacgcctgaaaaatccaagggtccctgctgccaggctacatggtcatactgaccgttataaaatcaagcttcgtgcatctggttacaggctcgtctatcaggtgattgatgagaaaattgttttgctcgttattgctgtaggaaaaagggaaagcagtgaggtctaccagatggctgatattcgctga

SEQ ID NO: 20963 - DNA, 1509 bp, Escherichia coli
atgctggatcctgcagacctgccaccggatgacattctggattatgtggccatcgacaccgataacaccggtcagttgcgggtcagggtcgtgaagggaaaaaaacatctgcgtgccgtccaggaatatctgacccgcctgcgcgcacgccatcaggggcgagtgggagactttgagttcaccaccctggatgtgatagcccgcctcagacaggacaccacaaccgccggtgatgaaagcgtcattaacccggtacagcagaaaatgctcggctatatccgccattctgcctctcttggtgcctcagaccttcatatgaccccgggacgagacaacacggacttcacctatgtggaagcccgggttcacggcgaactggaagtgctcgatatcctccggaaagaagaaggcctcgaattactgggggccacctattccggcatgaccgatgttatcaaaggcacacagtttgatcccggggtgcctcaggatgcacgtctttcagagcagtatctgaaactggccggtctgtttggtgcacgctactcccactacccctgtgtgggcggcctctatgctgtgctccgtctgatcaaggatgacagtcagcaaatcccgaccttcagtatgctgggctatcaccctgaccaggagcgcactcttcgccgcattctgcagcgccctgaaggcattatcacgctctcaggccccaccggctcaggaaaatccaccacgctgagaaccgcctctgcggcgtaccttgaacagtacggcttcaacaacaccggcggtattcttcttccccgtcgcaggctgttcaccatcgaatccccgccggaagggcgtattcccggtgccattcagaccgccgtcatggataccgcgcagggctgggtggactccatcaaatcggcactgcgtcttgaccccgacgggatcctgaacggtgaaatccgcgaccacgattccgccattacggcaataaaagccgccatgaccggccatctgatgctgaccaccatccatgcgaacgacccgattaacatcctcgaacgtcttgagatggagggggtacaggccaggatgattgccgacccgcaactgttcattggcctgctgagccagcgtctggttcagctgatatgtccgcactgccgtcgcccctggcatgaggtggcgaccgagcgcacggatgatgaacggcgcctggtggaaagcgtctgcaacccggaccaggtatatctgcgaaatcatgaaggctgcccgcactgctggcgtggcgtgacaggacgaacggtgatcgcagaagtcatctccccggatgcccgttttttccagttgtaccgggaaaaggggcgtattgaggccagaacatactggcaccgggagctgggcggcatgacacgaaatcagcatctgctgggaaaaatcaacagcgggcaggttgatccgctggcggcccattacatctctcccatcgacgaggacagctatacgctgctgcactga

SEQ ID NO: 20964 - DNA, 1101 bp, Escherichia coli
atgagatttctggaaaaactcaacaacaccgacattgagctgacagcactgactgtctggatagccagaaaaacctttgccctgaaccgggtggagttctacgaagccctgggcggcatgatacgtgacggaacgccgtccctgcgtgcactcgaatttctctgcgagatcgaaaccgattttggtgaaaagaaaggcacatccggcatgtattttctggcaaaagaatgcatcgattccatcaaagccagcggcatgttatccggtgccctgttaacctgggtgccaccggaggaagccacgttaatcagaaacggggaagagcgcggaaatattgccgacgcccttttccaggtggccagaaccgttaaagcccggcgggaaatgacatccagcctcattgccgtctgcctctacccccttctgctgctttcgctctgtgtggtgaatatgtacaacgcccatacccgtatcatccccatcgtcagtgcgtttgcttcagaagataaatggtcattccagatgaaattgcttgccggcatgtcggaatttttcatcgggtacggattctggctctgtgggaccattttcgccctgacgcttctgatccgtttttcattcagccggtataccggccccggccggaggatgctggacaaggctcccccctggtcactgtatcagaccttacacggggtgaattatctgttcagtatttcatccatgctgcagattaatattcctctttcgcaggcgctgctccgaatggaaaaaggtgcagaaaagaataaatggttaaaggagagaattcaggcaatacgaaaacatgtattatccggtcagaatctggccacagcaatgcgaaattccggttatgattttccgtccagaatatgcatcaataaactgctcctgaactccgaaagggaggacagtgtggcaaccatggcactctatgccgatcagtggctggaggaagcaaaaaaacgggtaaaacgaattggattaattattaccggtatatcaggaggttttgtcttcttttttattcttaacatgatatctgccatctacagtatcagcgacatgctgaaacaataa

SEQ ID NO: 20965 - DNA, 537 bp, Escherichia coli
atgaacttcagatcatgtctttattcttattttgctttaaaaaaagagaaagaggaggataaaggtttaacattactggaaattgccggtgcactgattatcatcggtattgtggtagctctcgcaatgagtcagatgtccagcacaatgtcatccagtgataaccagcgtgaactgaaaaacctgcagactattgcaacaaaaatgaagcagtacaagttccagggcagatataccggcacagattatatcaaaaccctgacagaaagcggttccctgccagctgatatgatcgccggaagtaacaaggccaaaaatgcatggggaggcgatgtcaccattgcagcaacaagtaataaatacggttataccataaccagtaaagccgtaccgaaagaaaactgtgttgagctgattaacagtctgcgcagttcatccatgttcacaaaaatcaaaggtcagacacctgccagtgtggatccggtaacggtatgctctgccgccacaaacgatatcacgctcgaaaccagcagttaa

SEQ ID NO: 20966 - DNA, 483 bp, Escherichia coli
atgaagtggttatttttttctgccgtgatttgtccgttatttttcgctcttcccgctaaggctgccgccacaaacacatcactgaatagctgctttattcaggccgggaaacgctaccttattgcccctgagcttctgaaaaccattgcacagcaggaaagcagtctggtcgccactgcgataaatcacaataaaaacaaatccgggaaaattatcagtacggattacgggattatgcagattaattctgcgcatattcctgaactgaaaaagcttggagtcattaaagacaaaaatgacctgcttaataatccctgcctgaatattcagaccggggcctggatactggcccgccattttcaacgctgcggcgttaactgggaatgcctgggcagctataacgccggtttcagcaaaaataacacagcccggcgcatgatatatgcccgaaaaatccacaaccggtatttcagacaatattaa

SEQ ID NO: 20967 - DNA, 651 bp, Escherichia coli
gtgagcgcattactgagcatgacaataataatcatcatcctggcggttattctttatcttgcatacagcaccgccgctctctacctgtcagcagtacacgacacccggccgcccaggccggtggtgtacgtgtgttgccttctggccatagtgagtgtcagcctcaacggcgcatatggtgttgaagccacggggctgttattcctttccattctgacgggattattaactgtaatgacgctgacggacatcgccgtctgtcggcttccccggatattcacgctttcactgattgttctgggggcagcgttcaggtacagcctggaggagctcacatacagcctcctcaacgcatcactctggttcggcatgacatacctgctacggcagtttttcataacggcaaaaggaacagaagcactcggccttggtgatgtattcctgatagcaggaattgcaatgtggacacagccacaacacacgccgctgctaatcaccgccgcagcttccggggcatttctgtttatcctcctcttctgccgtcgcagacgtcagcaggcactgccgttcgccccgtttctctgcgcatcactgtatgcactaaccctcctccctgattccgttttccgcacttcggagatattcacgtga

SEQ ID NO: 20968 - DNA, 1374 bp, Escherichia coli
gtgaaaaagttcagacacgatgacgacaaaggttttattctgcttgaaatactggcgggactgatagtgattggtatcgccacgccgctgatttattccgaaatagaaaactggctgaatgaacagctttaccagagtgctgcttcccatgcagatgcctacaataccgcagccagaaattacattgccgataacaatgccactctgcacaacggcagccttccggcaaactttacagccgatgatttgattcgcaagggatacctgaaacagggatttaatcgttctccgtttgggcagagttatatcacgggtatccgccgtaaccagactacaggacgtcttgaagccctgacctgctcaacaggggggcagaatatcaaagaagatggtctgcgcagtgtggcaggacagcttcccgggctgggtggttatattggtaaaaacggaacagcaaccggcgcattcggcgcctggacagacaaaccgggggattacggactcacctgttcggcaggtcacatcgccatcgtaatgatgggtgatgacctgcaggaaagcgatcgcctgtatcgctttcaggtaccgggacgaccggagctgaaccagatgaacacggccatcaatatgggagggaacaacctgaacaatgcaggaaacgtcaatggacaaagtgcaacactgaaaggtgatgttacaagcgaaaacggctggttaatcaccaaaaatgataaaggctggaagaacatcacctatggtggcggttttacgatgacagacagccagtggatacgcgcagtcggtggtaaaggaattataaccacaggggaaatcaaaggaggaaaagtcagtggggggacagtccggtctgacggtcgcctttccacaggtgagtatttacagctggataaaacagccgtagcaaatacaaagtgttcaccagatggacttgtaggccgcaccagtacaggggccatactttcgtgccaatccggtatgtgggcaggttttgaatcctaccctgtcggaagccctataccgtggccatcagccacccctccacaaggctacctggtgatgaacgggcagtcattttcatgttcccggtatcctcagcttgcccgtgcttatcccgggtgtaagctgccggatttgcgcggtgtttttatccgtggttgggacaacggacgtggactggatggagatcggaacagacatctcctgagttatcaggccgatcaatccggtgtctatcatgagcgtgggggatggctgaaagggcatcacagcggtatgccttactgggcccagggaagcacaacggaaatgcgccccaaaaacattgcctttaactacatcgtcaaagcaagctga

SEQ ID NO: 20969 - DNA, 282 bp, Escherichia coli
atgaaaataaactataaattccggattaacttaatcacagtccttctgtctcagctcctgatacagatatatatgtggcataacattccggtatccgaacatatccctccacccattatattccttatatccatatttttatcaggtctggccatctgtactgcattctggctggcatatgacagtgacagatttaagcaactctcactgccaaagcaaattattctgttagtactatatactggcggattcaattttttaatattatacgacttcatgtaa

SEQ ID NO: 20970 - DNA, 339 bp, Escherichia coli
atgaaaataaaacagcataaggaaaaactggaaattataaggaatattattcgtgaaactctgttaggtaatgcagctattgtggtgctggtatcaatgattattgtcctgtgtcggcaggaatggacctttataagtatgttatttacaggtgcattatgtctttcatttgtttttgtcttcttctggtttattgcgattatacaagtttatataaatgagttaacagaaagcaaaagaataaagtggccgtttgttttgttgtgggggattagcattgaaggtacccttgtttataatgtcataaggttgtttccagaactgttgcgtattacatga

SEQ ID NO: 20971 - DNA, 150 bp, Escherichia coli
atgggcaccacgattcaatacgtcaaggaaaacagaatacagcaatgcacttgtactgtttctattattctggctatttcaataaaggcacttgctcgcgatctgtcattttctgaaactcttcatgctgcatttcgattttccttctaa

SEQ ID NO: 20972 - DNA, 168 bp, Escherichia coli
atgtcagtgcatctttttgagtttttgttgtttcttattatgtctcattttgagtctatgtcaagcagcgctgctcttttagagtctctttatgctcttgttgtgactcgttttgagttcttattggtttctcattttgcgtcacgaactgagacggaaactacttaa

SEQ ID NO: 20973 - DNA, 678 bp, Escherichia coli
atgaataccagaactctttttcccctgcttttcactgttgcatccttctccgcctccgccggtaactgggctgtcaaaaacggctggtgccagaccatgacggaagatggtcaggcgctggtaatgctgaaaaatggcacgattggtattaccggcctgatgcagggatgcccgaatggcgtacagacgctcctgggcagccgtatcagtattaacggtaacctgatccccacatcacaaatgtgtaatcagcagacgggattcagggctgttgaggtggaagccgaacaggcgtcggaaatggtcaaaaaagccgttcactccatagcagagcgtgatgtgtccgttttacaggcatttggtgtacgaatggaattcacccgcggtgatatgctgaaggtctgtccgaaatttgtcacatcacttgccgttttttccccgaaacagacgaccactattaataaagactccgtactgcaggctgcccgacaggcatacgcccggaaatacgacgaggaaacaacagaaaccgctgattttggctcttacgaagtaaaaggcaataaggttgagtttgaagtattcaatcctgaagaccgtgcgtacgacaaagtgaccgtcacggttggtgctgacggtaatgccaccggcgccagcgttgaatttatcggaaaatag

SEQ ID NO: 20974 - DNA, 234 bp, Escherichia coli
atgttggactgccaccctgttttattgcccgaaggccctttctcacgcgaacaggcggttgtcatcacaacagcttaccgcaatgtgcttattgaagatgaccagggaacgcatttccggctggttatccgcaatgccgaagggcagctacgctggcggtgctggaattttgaacctgatgccggaaaacagctaaattcgtatctcgccagtgagggaattctcaggcaataa

SEQ ID NO: 20975 - DNA, 771 bp, Escherichia coli
atgaacgaaacgctgaatgcactgatttgtcgccacgcccgtaacctgctgctggcgcagggctggccggaagagacggatgttgaccagcgtaacccgaagtatccgggctggatcagcatttatgttctgctggatgcgccccggctggcgacgttacttatcaaccgtcacggcggcgtactgccgccgctcctggcctctgccattcagaaactgaccggaaccggggcggaacttgttctgtccggcagtcagtggcagtcgctgccggtacttccggcagacggaacgcaggtgtctttcccgtatgccggagaatggctgaccgaagacgaaatcagggcagttcttgatgcggtgcacgatgcggtacgcagtgtcagttgccgggtggcagaagatgcgcggcgtatcagggcggcgctgaccacaaccggtcagacgttgctgacccgccagacgcgccgctttcgtctggttgtgaaggaaagcgatcacccctgctggctcgatgaagacgacgaaaacctgcccgtggtgctcgatgccatcctgaaccggggcgctcgtttttcgtcggtggaaatgtatctggtcagtgagtgtgtggagcatatcctgtccagtgggctggcctgcgatgtgctgcgtatacctgatgaaccgtcccgtcgctggtttgaccgggatattctgcgggaggtggtcctggaagcccggactgaaatccgcagcatggcggatgcactggcgaaaatccggaaatga

SEQ ID NO: 20976 - DNA, 528 bp, Escherichia coli
atgagtgcacgtggtatcaacaaggtcatcctcgtcgggcgtctgggcaatgatccggaagtccgttacatccccaacgggggcgcagtggcaaacctgcaggtggctacgtcagaaagctggcgcgacaaacagacgggggaggtgcgggagcagacggaatggcaccgcgtggtgctgttcggcaagctcgcggaagtggcaggtgaatatctgcgcaagggtgcgcaggtctacatcgaaggtcagcttcgcacccgtagctgggaagataacggtatcacccgttacgtcactgaaattcttgttaagaccacgggcaccgtgcagatgctgggacgtgcaccacagcagaacgctcaggcgcaaccgaagcctcagcagaatgggcagccacagagtgctgacgcgacgaaaaaaggtggcgcgaaaacgaaaggccgtggacgtaaggccgcgcagccagagcctcagccgcaaccgccggagggggaggattacgggttttcagacgacatcccgttctga

SEQ ID NO: 20977 - DNA, 192 bp, Escherichia coli
atgaatatcagcacagaaacccgcgaaattctgcgtaattacagggccgtgattaatgcgcggcgtcgtgaattggggcagaaaccgctcaccaccgcgcagattgttgatgaaatctgcgattttgtggcgaatcagcaggcggttttcctcggtggtcactacatccttcagggcagcagaaacaggtga

SEQ ID NO: 20978 - DNA, 273 bp, Escherichia coli
atgcagcgactggacgatgcttttgtatatggcgcatgtgacagagttgtttccgatattgtcaatgaactgatggaagaaaagcgcgccagccgtcatgtgacagtcccggcggtgatgctggaaaaagtgatggcgctggcaggcagtgaaatgaagcgcctgtatgccgtcgggagtgagaacgggggcgacggtgacgcattcgtcagggaggaactcgaagcaatggacgttgtgttgcaggcgctggacggggagacgatgtcatga

SEQ ID NO: 20979 - DNA, 222 bp, Escherichia coli
atgaactatgccggacacgaaaaactgcgcgccgaagtggcggaggtggccaataccatgtgtgaccttcgggccaggctgaacgatatggagcatcgctgtcgctttgattccgatgtgcttgttgaacgcctgacacgtcagacgctgtatcgcgccaatcgcctgttcatggaggcgtataccgaaattctggaactggatgcgtgcttcaaagattga

SEQ ID NO: 20980 - DNA, 222 bp, Escherichia coli
atgaaaatcatcacccgtggtgaagccatgcgtattcaccaacaacatccggcatcccgtctttttccgttctgtaccggtaaataccgctggcacggcagcactgaagcgtataccggtcgtgaagtgcaggatattcccggtgtgctggctgtgtttgcagaacgccgtaaagacagttttggcccgtatgtccggctgatgagcgtcaccctgaactga

SEQ ID NO: 20981 - DNA, 330 bp, Escherichia coli
atgcgtcggatcaaacgtatcacggtcctgctcagaccattttttaccgtcagcctgctcaatgttatttccttcagagcgcccgaaatccacctcgacagtatcaaactgatccccttccatggtgtatttgccatacagcacggcattcaccgcctgcatttcttccacctggacaatggcgtgctcttcctgtttgaggttatcggtaatgatacgcagacgacggtaggccgggtcgttcagctgagccggatcttcaccaggaaggcgctcaaccgcctgctggtaattaaattcgtgtttcggcttgacgtagcccggacgtaa

SEQ ID NO: 20982 - DNA, 339 bp, Escherichia coli
gtgctcttcctgtttgaggttatcggtaatgatacgcagacggcggtaagccggatcattcagttgagatggatcttcaccaggaaggcgctcaaccgcctgctggtaattaaattcgtgtttcggcttgacgtagcccggacgcaacacgcgggtttcaccaccacgatgacgcagcacttttccttcaacaaccggggagacataggccgccaccggcgtttttccggtaattttgtccagcatcacctcttcggtatggaaattcaccgtacggcggaaaaacagctccagaaacagcgcacgaaatttaactttttgttcggtataaccgagtaa

SEQ ID NO: 20983 - DNA, 576 bp, Escherichia coli
gtgtttggcagcggagcgtacagtaaaccagcacaaatcagcctggaatgtaaacattattcgctgaccagcgatgcgccatcggggaaggacggtgccgcattcctggcgctgatggcagaaaaagcccgtcttgcagccctgttaccggagggatggtcacgggatatgacgacgttcctgtcactcagccaggaggtactgttatccctgctcagtttctgcaccgcgtgcagcatccacggcgttcagacccgcgagcatggtcacacgtcacgcagtccgctggactcgctggagagcgctatcggattccacatgcgcgactggtggcagccgacgaaagcaaacttcttcggacacctgcaaaagccgcagattatcgatgccctgaatgatgccggactgtccggtgctgcgcgggacgcggagaaaatgaagaaaggcgatgccgctgaacatgcagagttccacatgaaagacaaccgctgggtgcctggctggatgtgtacaccacgtccacaggcagagacggaaaccacggagtaccgtgacgaccaggcagaagccgcctga

SEQ ID NO: 20984 - DNA, 465 bp, Escherichia coli
atggcgctgatggcagaacactctcgttttgctgccctgctgccggaaggatgggaacgggatatgacgacgttcctgtcactcagccaggaggtgctgttatccctgctcagcttctgtaccgcgtgcagtcttaacggtgtccagacccgagagtgtggtcacacgtcacgcagtccgcttgacacgctggaaaccgccatcggctttcacatgcgcgactggtggcagccgacaaaagcaaacttcttcggacacctgaaaaagccgcagattatcgcagctctgaatgaggcaggactgtccggtgccgcacgggatgcggagaagatgaagaaaggcgatgcggctgaacatgcagagttccatatgaaagacaactgctgggtgcctggctggatgtgtgcaccacgtccacagacggataccactgaacgcaccgataacctggctgatgccgcctga

SEQ ID NO: 20985 - DNA, 315 bp, Escherichia coli
atgcagtcgctggtcctgccgccaccggcacgccaggcgctggcacaggcggcactgacttaccgttatggtgacgaacatcagcccgtcaccaccgccgacattctgacgccacgacgccgggaggattacggtaaggacctgtggagcgcatatcagaccatccaggagaatatgctgaaaggcgggatttccggtcgcagcgctaaaggaaaacgtatccacacccgtgccattcacagcatcgacacggacattaagctcaatcgcgcattgtgggtaatgacagaaacgctgctggagaacatgcgctga

SEQ ID NO: 20986 - DNA, 279 bp, Escherichia coli
gtggtggcgaaaacgtcttatatagcagaagacggtatcgaaaaacgttatcttccagatggcatgctggttctggggaatactgctgcagatgggatccgttgttacggtgccattcaggatgctcaggcgttgtccgaaggtgtggtggcctcttcccgttatccgaaacactggctgacggtaggggatcccgcccgtgaatttaccatgacgcagtccgcgccgctgatggtgttgccggacccggatgagtttgtggtggtacaggtgaaataa

SEQ ID NO: 20987 - DNA, 174 bp, Escherichia coli
gtgctggttctggtgaatgccggtggtgagccgtttgcggtggttcaggtgcagcggcggtttgcaccggaagctgtcagccattcactggcactggcggcgtcactggatgcgcaggggtacagcgttaacgacatcattcatatcctgatggcggaaggaggtcaggcatga

SEQ ID NO: 20988 - DNA, 918 bp, Escherichia coli
atgaaattaccaaaatttcgtaacgcaattgtgtaccgagcaacattacctagtatacaggctattgaagggcatcttctcgaactcccttattctgaaatcggggaaacagaattttcacggtcctcttttgtagagaatcctgtcactggtgaactggtaactccgatatctggtgggtacgcaatggtaatccgtcatgatcagaaaataattccccgacatgtcgtcatgaaagaagctaattctcgaatccaaacaatcgaaaatatgtccgggaataaattaaagcgtgccgaacgactggccattattgataacgtacgagtagatctatgcaaacaggcatttgttaagtctacgctgattcttgtattgtacagcactgatgagaaattattggtaatcaacacaaccaataaaataatagccggtatggtatgcgcaatgctgattaaggttgtcggttcagtaaaaacagaaacaatcaacatcagtgatatcaagaatggactgactacacgcctgaagaactacatcaatggtgcagccaatgcatttgaaggattcactgtcgggaattatattcagctatcacgctacgcagatcaaaaggaaattattcgctactcagctgagcatgagtcaattcaaagcgaactggccgatagccttagtagtagtttcactgctgataaaatggagttatccggttgcggtgtgaccttcattcttaccgaaaatttccatttttcgcgcatcaatactcaatctcagacatttaatgatgaagatgataaagcattccagtggcgtcatcagactggcactgaccttttccaattcagcaaggtagttaatttgatgtgtgaccttctttcttacaaagaagataaaagccaaaatccaacaacttaa

SEQ ID NO: 20989 - DNA, 831 bp, Escherichia coli
atggatttgctaaacaaacatatagctagtattttaagagcaaaagatgaggagtctttagctatttttgtaggggctggtgtttcaaaatcctctgaaacaaaaactatcaaaatgccttcatggggggacttaattgacgctctcatttcagatctcaatatcaaagatgaatcagattatttaaaaatagcacagctttattacctcacatttggtgaacatctttactacaaaagaatcaaagatttctttcctgaaaatgttccccattcaaagattcacgatctaatatttaaactgaatcctcactctgttatcacaacgaattgggacactttgcttgaagcagctataaatgccaaatcttacttttataatataataagcagtgacaaagatttgatgaaatcttaccttggcaaaaaattgataaaaatgcatggtgattttaaaaatcacaacatcgtctttaaagaagatgattacttaaattatagcttcaatttccccttaattgaaaattatgttaaaagtgttatttccacccatactgtgctatttttgggatattcatataatgatatagatctaaagcaaataattaaatggactcagaatcattcatctgttagaccccctatgtatttagtagtattcgaagatattcctgctcaaagaaaatatcttgaaagtcatggtataaccactattattttaaccgatgaaacaatcaaacctttcaataacaattcatattcaaacaagttatatactttcctgcatagcctaaatagcctagaactatgtgcagacttagatgatatctaa

SEQ ID NO: 20990 - DNA, 1794 bp, Escherichia coli
atgtatattgatgacaatggaccaaaagctttattgcacttttatgacaccgaagtaacctctaatgataataatatagagctaagaggattttataagaagtttttgagtatactcagtaatgataaaaaagttaaagactataagccgcatctccaaaaattattttttatattaaaaaaagcaagtatatatggtattgttttaaacgataaacatgatgaagcgctactgattactgaagtgctaccaaatgattcattaattaaaatagataaggaaattaatttcaactataacgaaatagttacctatacacgcccccataaggttgcaaatagtatagacaagactaagaaatataattgcttccagttaaataaatacgatgaggcttacagtattatagaggaggaattatcagaagagatcagacaaaaggattatgcaaatattctcatctcgcttttcaatcaaaatattattttaaatagattgaagtatgatttttcaagtaatagagaaagatactcaactcttgaggagaataaaattcatgaattatatgataacttaccgagaaatataaaaaaaaccgtctccgtaatctatgatttagtaacctttaattatttattaaatcttcactacaccgttagctcattattaacaaagtatagcgatataagaaaaagaaatacaaagttattagttgacggggatcttcataaaacggaatttcttttcgaaaaccttataatttttgttgtaaaaaatggatgtttaattgatgtttataaagaattcaaggatgtgattcgcaaattcattgaaataaaaataatcaaggattctgataaagacgagatttctctaacaagattagaattatattcatgcattaaatacattgataataaaaccctatctcttatcctaaggaaagaagataaaaaactattatcgctgtctgttcaacccaaagaattagattggttaataaatactgtactgcaaaacctagcgaagtcatatagcaagttcgctacgtttctcaaccctatagaaggaaagttaatcaacgcattaaaactactatctttaatgaaaataaccacagagcaagacgcggtagtattaaaaacattaaacgacattttaaagtcctcataccacaacctagcattctatgatgctatttccgaatatgtcgttttaaggtacaacacccaaagtgaaactttatccactgacagcataaaaactttaatatacacgattctcgataagttaataagtagaaaccttggtgggtatgaggtgatagctatagtcaacagaggccttgctaatattttttcagtagccaaaaaactgggcgttaatatagaagacgacagcaaggtcgataagttacttcatgaaattagttcttatccgaatacagataaagcaagagctgctgaaacaatactatatgatctgtacagaatatcaacggaaaagaatagagataaaataaaatcatttatcaaaaatatttctacaactgatttcaatgaagaaagaaagattaaatttgaattatttttattagcatcagaaatttcagacaactatgacaatcttcctgagaaagtatccaagcttgttgaaaactataaaggatttagatttaactcagaagcagagacaatcagaaatttattacgctatatagtcaacacacggaaattaagtgatttctcacaagcacttttgaagattgaagagataataaataattacaaataa

SEQ ID NO: 20991 - DNA, 126 bp, Escherichia coli
atggtacaaaacttccgactggtgctgttcaaggccgaaatgattttggttatgcaggatttggtggagcatgtcctcccaaaggagataaaccccatcattaccagtttaaagtatgggctctaa

SEQ ID NO: 20992 - DNA, 519 bp, Escherichia coli
ttgtttcgtgaaaaatacagagttggtataggtagggataaaaacgaaaacgttggtttgggggaaggctctgcattgcctgttggtgtaccggttccgtggcccaccgccacaccgccagaaggctggttaaagtgcgacgggcgcgcctttacaaaagaacaatatcctgttctggccagagcctacccgaccctccgtcttcccgatttacgcggtgaatttattcgtggctgggatgacggacgtggtgtggatgccgggcgacaattattatcttcacagggggatgcaataagaaatattgagggattcgcagatggcgggatcggtatgtcttttgatgcaatcagaggggctttttacgatgcaggaacacgatcagcgagaatgccgaataacacaactactatagacaaaaccgatgaccttggattcgacgcctctcgtgtcgtgccaacagctaatgaaaaccgtcctcgtaatattgcctttaattatatcgtaagggcggcataa

SEQ ID NO: 20993 - DNA, 909 bp, Escherichia coli
ttgaatgaagatggtcaaaccgacgatagcatttatctcagcttcacgattccaatagaaaatttactgggtacggaacaccgcagctccggcttccagagtattgatacacaattaaacagcgactttaagggtaataaccaactcaatatcagcagtagtggttacagcgataccaatcgcatcagctacagcgtaaacacgggttatatgatgaataaatccagtgatgatttgagttatatcggcggttatgccagttatgaatcgccgtggggaacgctgtcaggttcagcctcagcaagcagtgataatagtcgccaattctcactcaatactgatggtggatttgtgttacatagcggcgggctgacgttcagtaatgacagttttagtgattccgacactctggctgtcattcaggcgccaggagcaaaaggcgctcgtattaactacggaaacagcaccgtagaccgctggggttatggtgtgaccagcgccctttcgccataccatgaaaatcgtatcgcactggacattaacgatctggaaaacgatgttgaattgaaaagcaccagtactgtcgccgtcccgcgccagggagccgtcgtctttgctgattttgaaacagttcagggacaatcggcaattatgaacatcgtgcgaagcgatggtaaaaatattccatttgcagcggatatttatgatgaacaaaacaatatcatcggcaacgtaggtcagggtggtcaggcctttgttcgcggtatcgggcaggaaggaaatatacgaattacctggattgaagagggcaaaccggtcagttgttttgctcattatcaacaaaacacgacatcagaaaaaatagcacaatctattattctgaacggacttcgttgtcagatacagtaa

SEQ ID NO: 20994 - DNA, 264 bp, Escherichia coli
atgcacgctaccgcccctggctttacagctaccagagcactgcatgcatgcctacgatgtgacgagcgttacccactcgcgctaaacccgaaaaattcaaacgctaattgtcttaccaatccgctctggaaacaaggaaaatcctggaaaactttgactaaaatcctattgctaactcgttgttattctgattgtttatataaaataacggcaggaaaattcgcaacaaattactttcgccacgaatcttcactgccgttataa

SEQ ID NO: 20995 - DNA, 2280 bp, Escherichia coli
atgagcgagccgttaattgtcggcatccgacatcatagtccggcctgcgcccggctggttaaatcgttaatcgaaagccagcggccacgatacgtgttgattgaaggcccggctgattttaatgaccgggtagacgaactgtttttagcccaccagcttccggtagctatttacagttattgccagtatcaggacggtacggcccccgggcgcggtgcctggacgccatttgctgaattttcgccggagtggcaggcgctacaagccgctcgtcgtattcaggcacaaacttacttcatcgatttgccttgctgggcgcagagtgaagaagaggacgattcgcctgatacgcaagaggaaagccagaccttgctgctgcgtgccacccgcatggataacagcgacaccctgtgggatcacttgttcgaagatgaaagccagcaaactgcattaccctctgcactggcgcactattttgcccaactgcggggcgactcccccggagatgctctcaatcgtcagcgcgaagcctttatggcccgctggattggatgggcgatgcagcaaaataatggcgacgtgttagttgtctgcggtggctggcacgctccggcactggcaaaaatgtggcgcgaatgtccgcaggtaattaacacgccagaattgccgtcgctggcagatgccgttacaggttgttatctcaccccctacagtgaaaagcgccttgatgtgctggcaggatacctttcaggaatgcctgccccggtctggcaaaactggtgctggcagtggggcctacagcaggccggtgaacaactgctaaaaactatccttacccgtttgcgccagcacaaattgcccgcttctaccgctgatatggctgccgcccatctgcatgcgatggcgctggcacagttgcgcggtcatacactaccgttacgcactgactggctggatgccatagcaggctcgctgattaaagaagccttgaacgcgccgttgccgtggagctatcgcggcgttattcatcccgataccgatccgattctgctaacgttgatagacacattagcgggtgacggattcggtaaacttgccccctctacgccacagccgcctctgccaaaagatgtcacctgcgaactggaacgtacaggaatctcttttccggcggagcttaccttaaatcgctttacccccaatggactggcgcaaagccaggtgctgcatcggttggcaatattggagattcccggcattgtgcgccagcagggaagtacactgacacttgcaggcaacggtgaagaacagtggaaattaacccggccacttagccagcatgcggcattgattgaagccgcatgctttggcgccacactccaggaagccgcacgccataaattagaagccgatatgctggacgcgggtggaatcagcatcatcactgcatgtcttagccaggcagcgttagcgggtctggcgtctttcagtcaacaattactggaacaactcacattattaatcgcccaggaaaatcaattcgccgaaatgggccaggcgctggaagtgctatatgccttatggcggctggatgaaattagcggtatgcaaggcgcgcagatattacagacgacgttatgcgcggctatcgatcgcacactctggctgtgtgaatccaacggcagaccggaggaaaaggagtttcacgctcacctgcatggctggcaggcgctttgccatatcctgcgcgatctacatagcggcgttaatttacccggcgtttcgctttctgcggcagtagccttactggagcgccgcagtcaggcgattcatgccccggcgctggatcgcggcgcgactcttggcgcactgatgcgtctggaacatcccaacgccagtgccgaagcggcgctgacaatgctgacgcagttatccccggcacaatccggcgaggcgctgcacggtttgctggcgctggcccgccatcaactgacctgccagccggcatttatcgccggtttcagcagtcatttaaatcaactgagtgatgccgattttatcaatgccctgcccgatttacgcgcggcgatggcctggctaccgccacgagaacgcgggacgctggcgcataaggtgcttgagcattatcaactggcgcaacttcccgtttcggcgctgcaaatgccgttgcattgtccaccacaagccattgcatatcatcaacaactcgaacagcaggcactggcatcgctgcaacactggggagttttccatgtctga

SEQ ID NO: 20996 - DNA, 1137 bp, Escherichia coli
atgtctgaactgaacgatcttctgaccacccgtgagctacaacgctggcgattaattcttggcgaagcggcagaaacgaccctttgtgggctggatgacaatgcccggcagatagaccacgcgctggagtggctgtatgggagcgatcctgaacggctccagcgtggtgaacgctccggtggattaggtgactcaaatctcaccacccctgagtggatcaacagtattcacacgctgtttccgcaacgggtgatcgagcgactggaaagcgatgccgtactgcgctacggcattgaagatgtggtgacgaatctcgacgtgctggaacgtatgcagccttctgaaagcctgctacgcaccgttttgcacaccaaacatctgatgaatcccgaagtgctggctgccgcccgccgaatagtgcgccaggttgttgaagaaattatggcgcgactggcaaaggaagttcgtcaggctttttctggtgtccgcgatcgccgccgtcgctcatttattccactggcgcgtaatttcgatttcaaaagtacgctgcgtgccaacctgcaacactggcatccgcaacacggcaagttgtatatcgaatccccccgctttaacagccgcattaagcgccatagcgatcaatggcaactggtcttactggttgatcaaagcggatcgatggttgactcggtgatccactcagcggtgatggcggcctgtttatggcagttacccggcattcgtacccatctggtggcgtttgacaccagcgtcgtcgatctcaccgccgacgttgccgatccggtagagctattaatgaaagtgcaattaggcggcggaaccaatatcgccagtgccgtggagtatggtcggcaacttattgaacaaccagcaaaaagcgtcattatcctcgtgagcgatttctatgaaggtggttcatcatcattgctgacgcatcaggtgaaaaagtgtgtccagagcggcatcaaagtgctgggactggcagcgctcgacagcaccgcaacaccttgctatgaccgcgatatggcccaggcgctggttaatgtcggcgcacaaatagctgccatgacaccgggcgaactggcgacctggcttgcggagaatcttcagtcatga

SEQ ID NO: 20997 - DNA, 264 bp, Escherichia coli
gtgacagatacagcgttatctcctgaagagcagttaatcgaggatattgcagggttcactcacgatccgcttggctatgccctctatgcgttcccgtggggggaagagggtactgaactggcacatgccaccggtccacgtcagtggcaggccgatgcgttccgagagatacgtgatcacctgcagaatccagagacgcgatatcagccgcttatgctggcacgtgcttctggtcacggtattggtaatgtcaacgacggatga

SEQ ID NO: 20998 - DNA, 516 bp, Escherichia coli
atgcgtagcctccagacagaaaaaaccctcgctacaacgttgcatggaggcaaccagcgagggcattccttatgtctgaacaacaagaggatagccgcaagcagttgctgttgcaagtatgcggagcttcgtaatgactcttcaaaaagcttgcaagtggattgtgaccaacatcattgttcctgtcatcatcggagcttcaagttctgtgttggcatcagtgattgcctcacttctccacattgcataacaacattgaagggcgttagttcgcagtgtaacagcagcgcgttgcgcccgaacaggccacagggtaaaacctgtggcctttttcgttttatccagccacaaatccacattgaaaaacgccttatacaaaaaaacctgccagcaaactggcaggtttctgagcagatcgaccaacccgatctggatcgagtcagaaaaatttgctctaataaattttgttttctaagtgcaaagaatcaccattccgagctggtgattgaaggttga

SEQ ID NO: 20999 - DNA, 726 bp, Escherichia coli
atgaaaggcgaagtgaaagagcgcggcatgattttcaacgatgagatggtccgggccatcctcgaaggaaggaaaacgcagacgcggcggataatgaaaaatcagcctgcggaagttggtccagaagcaccagtgatggttagaaaaattggtgcaggttttcagtggtacggggctgatggtgtaagcagtgttttcaattgcccctttggtatcgtcggcgatcgaatttgggttcgtgaaacatgggcgatattaggcaatgaggatggttgcagtgtggactggaacgacaacctttgtcgtggcgatgagaagaacgcagcaaggatttatcgggccagttgcgagcaaaaacctggtgattgcggcttatggtcgatacccgatgatgccgactggaaacctcacactgtgaatgaaaagtttgatggtgggtggcgtccatcaattcacatgccgcgatgggcatcacgcatcctgttggaaattaccaacgtgcgcgttgagcggttgaacgatatcagcgaatgcgatgcaagggatgagggcgttccgcctgctggaagtttgcttcctgatcacccgggaacattccttactcccaagggggatttcgcaatggccaaggttgcgttccagcgcctgtgggaatccatctacggcgaagaaagctggagtgctaatccctgggtttgggtaatcgagtttgagcgtattcagtag

SEQ ID NO: 21000 - DNA, 222 bp, Escherichia coli
atgcaatcagttatttgtgaggaagtcggcatgaataaagcatccccagcagagttaagagcaagtctcgaaatggcgcatagccttgctcaaattggtgtcaggtttgtaccaattccagttgaaacagatgaagagtttcacaggttagcggcatcggcagcacaaaagctggaaatcatggcagcgaaagtagagaaagctgaaggagcgacaaaatga

SEQ ID NO: 21001 - DNA, 216 bp, Escherichia coli
atgagcaagccaaccgacgaagaaatagttcgggtgttggaagaacacgggcgctgtatgacttacgtcgtgaccaactggcttagggataaatatcgcacactcaaaacggcatacgttttgcgtcgtctaaaaaaactggagttcgacgggaaagtaaagcgcgttaacagttcttatataagacaaatttgctgggaggcatccagtgagtaa

SEQ ID NO: 21002 - DNA, 651 bp, Escherichia coli
atggcgcaaaaagaaatgactactctaacgacagcatacttacagcaattggtattttttgcaggcgaggctacttgtcatcctgacgcaaactatttattggaatttgagaggttagcgtcacccggtatcgttctggaactggcccaacaggtgctggccttaagacaaaaagagcaacatgaaagtaatacgtgtagattgaactttgagcagtggctggaacagcaacgcggaaaaatcgatgtggactgtggttgtgtgtctactgaaacattcatgcactggctgcgggtagcttacgaggctggcaactatccggatagttcggtgccagggccaggaaagggcgtcaccggtgaacgtatccgcattaagccgcatgtttatcgcgaactggttaaccgtctccacgatacagcgatcaagtgtgctggcacccagcaattacgagaaagaattagccgtgttttgggcgacgttattaagccagaccatcataaacaagccgagaaaagtggcctggaaaggtgtcaccttgaggcggcattaaacattaacccggggcatacgcttggcattattgatgcactattggttcataagatggccagggctttattgccgctggtagggggcaatgacaactag

SEQ ID NO: 21003 - DNA, 465 bp, Escherichia coli
atgtttcttcatatcaatcccgattgggcatcagctattgcggcatttgggtcagcaatagctgcttttattagtttgcgcacaagtaaaaatcttggattattcgataaggaaaaattttatagtgaagcattgataaactttgctgatagggcaaataaaatagcaacaggaaaagctggatcagactgggatgttaatgacgcaagtaatataattctttcactaaatgccgcaaaagaaactattgaaagtgcgccaaaacctattcgagagaaactaaaacaatattacaaacataatctttgccatgagatcataactgaattagaggctcactctcccccagattcagtaattgtaagagaaccatcagagtatgaaggcaagatcatgggattgtgggatgagattaaaatatttctgggttatacagtggtatcagaagcagaccttgaagattaa

SEQ ID NO: 21004 - DNA, 1116 bp, Escherichia coli
atgagaacgtcattagtcacccgtgaagaaatgattaaggcaattgaacagcacacatcctgtatcagtaccagggatataccgggcgttattgccaactacttcatgatcaccaaacaactttaccggagaaaggacaagaacgctgttcaccgcattctgttgtctgatatccgcgaatacctgctcgaacaggggcatctgaattacgcaaccgtcgcagccgaaacacgcaaggaggcacacagaatgaaagcaactaacgttaaatcagaaaaaattcatgcaccttcagttcaggaatcggagctggtggttgttcaaagtcagccggatgaaattcccgttctagagtggcagggaatgcgtgtagtgacaactaagatccttgctaaggggtatgggacagatgcggataacatcaagaagaacttttcccgtaatgctgaacgtttttgtgaaggcaagcatttctataaagttattggagatgatttgaacaatttgcgggtgactttaagtaactcacaaaatactatctctcctaaagcccgctcactcatcctctggacggaacgcggcgcagcccgccacgctaaaatgctcgaaaccgatcaggcatgggcattctttgaaaaactggaagacagctacttccggcaaaaagaacagcaaccggttgcaatccccaagacgcttccagaagctctgcgcctggctgccgaactggctgaacaaaagcagcttctggaacagaaagcccaccagctaaatcagcagctggtggccgccgctcctaaagtcgattttgccgaccgggtatcagtagctaaagggatcctgattgggaattttgcaaaggttgttggacttaagcaaaacgcgctgtttgcctggttacgggagaacggcatcctgattgcgtccggcggacgtaaaaatgtgccgttccagcagtacatcaccgcggggtatttcacggtgaaagaagtggtgctggatgatgaagatggctaccagatacggttgacgcctcaattaacgggtaaaggccagcagtggttgacgcgtaaactgctcgatgctggcttgttaaaaccggtggcggctgaatga

SEQ ID NO: 21005 - DNA, 222 bp, Escherichia coli
atggttaatgccaatccttgcgcacgccctgaatttatctggcgcttttactcctgccagaaacgtcactatcacttcgttattgcaccgacagaagatgaggcccgttctcagcttcctgacgctccctgcattttctctgcccgcttttccactgattcgcgcaactctctcagttactggtgcctccctgttaacgcttctgctcaggagggactatga

SEQ ID NO: 21006 - DNA, 645 bp, Escherichia coli
atggataagaaaatatgcgttgtttcgatgagcgtcggcaaaccggcgtcaatgactgctgcatggatcaataacgagctgataatggctgagcggaccagctaccctgaacgccgccgcgacatggaactccagttgctgcgcgaattgcgagaaaaagaggaaaagggttttatcgtgctggtggaagaggaaaacagctttattaccggtcgagttggtcagcgtgtaaggttgcgcgatcccttcatgaacggcaggccggtactaattgaagcaatgcagatttacaaggaactggaacgccagaaagcgattaagttaccgcgcaaggaatccggcaaatacatcctccaccaaagcatcttcgattccgaacatgacaaaaaaggcgatgaatttttcaacatcaactggagtgaaataacgacagagcatgttctgacgttactatgttgctttgcgacggaatacaacaacgtggcaagcgcagacttcatcaggacaatgacaaacaccattactgaacaagacaacagatattcaccatatgaaccatttgtaaatatgataagagcattttatcggatggagctcgctaaagttcctcaaggtaaattaacaggtaaggataacatcttttaa

SEQ ID NO: 21007 - DNA, 690 bp, Escherichia coli
atggaagttatctacattgcagaaccaatcatttctacgagcacgaacaagttgattgcagtagaagtgttaagcagatttcgctccaaagatggtgtcgctcttcctactcaaagagtattgggtatgtttaccaataagatgaagattaatttacttaaatcacaacttaacacaataatgaaatacaagtgtttttttgaacgccataatatactatgttctattaatgtagattatgatacatgtatatatatatacagtaataaacaaactcaagagttaattaaaaacaataaatttatagttcttgagatatcagaaaactaccctgatttaagcgatgaggattacgttataccctttctcctgactttgacagactatgtttggcttgatgattttggaagtggtaacgccaccatgaaagcattaattaaaaataaataccatgcaataaaacttgataagtcattttttcaagagcatatgattaagcctcattttgatgtcattattagcaatttaaaaaagttatgtccgaatatcatcgctgaaggcgtcgaaaacattgattgtcataagttatcaaaagggatagggctatggggcgcccagggatatttttttccatcaattcctctggtggagattgagtccatagatagtaagtggctatcagatttatga

SEQ ID NO: 21008 - DNA, 723 bp, Escherichia coli
atgtcagcagtttgttacttcatactcataaagaaacctataagctttcaatttcttaaggatttcttaatattaaattatggtgatgtgttgttgcttaagcattctgagcatgaatgcttaaaaatctattcagacaaatatatagaattcgaactcaatgataataccgtaagaaactatttatcatgcaacaacaaccatggaaaccaatcgctggataagtgtccgcatttgctaaaaaagtcttttgcctatcctgatttattaatcaggatgatcgataatataagcgatcaaaatcatatccattctgattttagggaggcagtaactttttcattactctcaatttttaatgatgttgataactttagagcatttcttacgtctggtatgcccactttctcagggaaagtgcgcagcatatttctttcagatgtatctaaacactggaaactaagagacctaaccgattatctctacatgagtgaaagcttaataaagaaaaaactattattggaaaacacctccttcagtaagttattacttgatacacggatggcttttgctattaaattactaaagcaaaatcatccagtcaaacaagtatcagaaagctgtggctttagtagtacatcgtactttgtgtgcctgttcaggcaatattataattgcacgccacgtgaatatgcaaaacatcaattattatctggaaaataa

SEQ ID NO: 21009 - DNA, 780 bp, Escherichia coli
gtgaaattattgaatgtaataacattttgttgtgctatttttgctggaagcgcgatagctgataataaattgccagattggctttctacttcaaaaaaagattatgatttagtaagggtattctatttgtctggatttgcctcgaaagcaatgaataatcaatttggttatcattttccatctgagttggttaatgattttaaagataatgaatttgctgctcaggaaaaatggaatgcaatttcaattgtatatggtgaaataaaatccataagaatggtgaataatgaaccaattgtagagttatttactccaggggaaaatgcaacgccactaaattatatcaaattgaaagtgttggattcaaaacaaaactctctgttaaaactaaaaaaaggggatgatatatatgcagtgtgctccggtgctaattttaggttagtgccaattctgagcaactgcactccagcaactgacgtcattgatgctgcactctctttttctggtgaatatatgttccctgcttttgattctttttcacctactaagcaaaacgtcaaatatatattcacaaatcaagatcctgttcagatgatgaattttatagggtacctatccttagtcgatacaacgaaggataagaataaaatggatatggttcgtaagtgtacgccttggaagccggaatgttcacaacaattcgttgatgtaatggaaggatttgataacatcatgtataaatatgagagggaatttaaaaattacatagaaataaaatag

SEQ ID NO: 21010 - DNA, 318 bp, Escherichia coli
atgttaattcgttatttgttagtgctttcctttttaacatttaatgtttttgctgatgagattgatttttcgacggtagattgcaattcagtggaaacaagaaaagctcttattgaagaatataacgaaatattatcgtcatatggaataacagtggttgattcttataatcaaaaaaccattcagaaaggaataaataaactagtctgttatggggtttaccaatattcagatggatcttctgcgtatgttatttataaagcatacccaaatagccttggcgaattaattagtgaatttaaaccgattaatgagtga

SEQ ID NO: 21011 - DNA, 348 bp, Escherichia coli
atgtttgtgtttttgggtgaaagtatggcagttaaaatagtaatggaaaaccctagaacgggggaaattacaaatggcttttatggattctcctggaccactttattatttggtcctttgccggcgctgtttcgtaaagactggttggtgttccttattgtcgcaatattgaacttcgcaacttttggacttactggaataatttgggcttttctctacaataaaaactatacgcaaagattgcttcggcaaggtttttcattttctggaagtaatgcagaaaacgagatggcggcaagaaagttaggtgttaaattaactaaagataatagcacgaactttaaataa

SEQ ID NO: 21012 - DNA, 222 bp, Escherichia coli
atgaatttattgtttctaacctctggttctccacataacttacgtgcctcattgaccatcttcaacaatgtttggctgtcgattgtgtctccggtgttggggatgacattcacggctggtgctggcgtagctgacgtaacaggtgctgttttttcaacattcaaattattaccggtcattctatgtgcctcctttctcatttctgctgccactgttgcgtaa

SEQ ID NO: 21013 - DNA, 1023 bp, Escherichia coli
atgattgtaaaggtgatagaccttttttgtggtgctggcggattaactcatggtttgcaactcgcaggtcttgatgtcgttgctggtattgaccttgagggggaatgtcgatttccctatgaaaaaaacaataaatcaaagtttattgagaaagatatcgctaaagtaaccaaagaggaattactgaagctatatggtgatgcgtctataaaagtattggctggatgtgcaccttgccaacctttttcaaaatatactcaaggaaaagataaagcggaagataaaaaatggcctcttctttatgagttcgagcgtttaattcgcgaggtatctccagaaattgtaacaatggagaacgtgcctgatgtaactaaacataaagtttataatgacttttattgttcgttgttagaactgggatattatgtttgggcatcaaaggttgattgtgtcgaatatggaattccacagaaccgttctcgtcatgtattgttagcctcaaagttgggggagattgagttagtaaaacgtaatgatgttattttgaaaactgttagggatgcaataggtggccttccaccattagaagatggtcaaacagatccaaatgatatattgcatagagccagtaaattaaactcgattaataaaaaaagaattatacactctattccaggtggtacatggaaggactggccggaagaacttattgctgcttgtcatatgaagtctagcggtaaagggtatgctagcgtatatgggaggatgtcttgggataagccaagcccgacaattacaactctttgttatggttttgggaatggtcgttttggccacccagaacagaacagagctatttctcttagagaagcggctttgttgcaaacatttcctatggattatgtttttgttgaagaacaagaaaagtttgttataagaagtattggaaaaatgataggtaatgctgtgccagttgagttaggaaaagtcattgggcaatcaataaaaaatcatttgaaataa

SEQ ID NO: 21014 - DNA, 681 bp, Escherichia coli
atggatcgttttcgtgaggattttgacgaaaggtcaggagaaatcttggcctatttagatcttttaaaatttattgagcatgctggtgcggaattaatatcatccgataataaagaacataagttcaccattacatctcaatcacgaaaaactctaaagggtgcagtatatatactattatacaaccttattgaatcaacaatgagagaggctatctgccttatacatgagactatttatgatagaaacatagagtttgataaacttaaaaaaaacctaaaatcagaaattttaaaaagattaaaaaatgaatctgttaacatcgataatttaatcaacggacttactaaaggcatatcctgtggtatttcttatggtacattcaacaaaaagaaaatattttcaggcaatattgatagagaggaaataaaagaaaaatcgaaaatatatggattttcaacccattctgattacactcacactaaacatggtgaaaagttagccactgttaaacaacatcgcaatgatttatctcatggaaatgtatcatttgctgagattgggaaaaatgtttcatatcaggatttagagaatatttcattagaagtaatagcctatcttgatgcaatcgcgaataatatagaacattatataaataataatgaatacttagagaaataa

SEQ ID NO: 21015 - DNA, 1143 bp, Escherichia coli
atggatattattgggttaaaatctcaactagaacatgaagataatgccaaaaaaagggcagaactcctagctcagctagaagttataaaacaagaggctgaagagcaaattcgcgcagagcaaaaggatgttgactttgagaccaaagaatttactgttgagttattagttaataagtatcataacgggttagaggatgataccaacgaactctttgttcctgattatcaaagggactttgtttggaatgaaaagagacaatcaagattaatagagtctttaattttgggcttccctataccatatatatttacagctgatgtcttttcagaagatcccgatttagatggacggattgaaattgttgatggctcacagcgtgttagaaccatacatgcgtttatccacaatgaattagttttacaagatctgaaatctttaagttctcttaatggtttcagattccaagatttaccattatcacgccaacgccgtttcatgagaattcctgtgcgtgttatagagttgagttctaaatgcaatgaagaaacccgcagggatctttttgagcgaattaactctggtagtgacatattgaaagatatggaagttcgtaaaggttcagaacttggctcaacaaatttatatacgcaggttattaagccatgctcgacaatatctaaatttaaggagttagcacctttatctgaggctaaagaaaaacgagatgaacggttagaatttacattgagattctttgcctacttagataaatataagaaatttgatcattccgtgcgtgattttctgaatgattacatgaaggaaaagagtaatatagatgaagctgaacaaaactcaatgaaagaagagttttcgaatgttctgtctttcgttgaaaaccatttcccagcaggctttaagaaaactatcactgcaaaatctacacctcgagttagatttgaatctctcgctgttggtactgcactcgcattacgtctagagcctaaccttgtccccaaaaacttagattggctaagctcagaagaattcaaacaattaaccacctccgacggagcaaatagtcgcgtgaaggtaattgaacgaattgaatatgtgcgagacaaactattagaggattaa

SEQ ID NO: 21016 - DNA, 750 bp, Escherichia coli
atgtcaaaaaaatatcagccattgcttataactcattatatgtcaacatgggtcactataacggaagcagttgagatcactaccaaagccataaaacaaaaaattactcctagcgatatttatcgtcatgccttgagtggcaacatcctactatcggtctatttccagtctcctgtgatacttaagaagatacaaacttttaatggaaaaataaaattcaggcagtttgtgggagacctacttgataaactatgcatgcttgacagggacggttttatttatggtcaaaatttaagactctgtacagaagccagatatatttgtcctgtgcaacaaattatagatacccccctgttacgcaaactcaaccagtttcgtacgtttgttcgtaatgtccgcccgggtgatgaactggatgtcccggcacaagttagtgaaaaaaatttaaccccgccgccgggtaacagcagtggcaaccttgagcaacagatagccagtacttcacagctaattggatctctgctcgccgaagatatgaacagcgagcaagcggcaaacatagcacgtggatgggcctcttctcaggcttcaggggtaatgacagactggttaagccgcttcggtaccgcaagaatcacgctgggcgtggatgaagatttcagcctgaagaactcccgtgacggcaaccctcgaaaatggcgattcgatgcaacaaacagtgaactatgtgccgaacgtcacgaatgctga

SEQ ID NO: 21017 - DNA, 819 bp, Escherichia coli
gtggtcaacgggcatacggaagttatctgctcaaccagtatccaccacattctggctgtacgaaaaagtacactgctgcaaatcgacacacttatccggcaactggctgaaatctcagttctgacggaaagcattggaggtaaaaccacccgggactgggccatgaaacaggattttcgctgcggctgctggctcatggagaaacctgaaacggcaatgaaagccatcacccgcaaccttgaccgtgaaatctggcgtgacctgatgcaacgttccaggatgctttccttaatggatgcgcaggcccgtgatacatggtaccggtcactggagtacgataattttccggaaatcagcgaagcgaacattctgagcacatttaaacaactgcaccagaacaaggatgaggtgtttgagcggggagtgatcaacgtcttcaggggactgagctggaattataaaaccaactctccctgtaaatttggaagtaaaatcattatcaacaatctggtgaaatgggaccggtggagatttcatcttatcaccggacaacagactgaccgactcgccgatctggaaagaatgctacatctgttcagcgacaaaccgattcccgacaaccgggaaaatatcatcattcggctggatgatcacatccgctccgttcagggcaaagtgtgctatgaagatgagatgttcaacatcagatactttaagaagggctccgcacacatcacgttcaggaaaccagaactggttgatcggctaaatgatattattgcgaaacattatgcgggaaaagtatcttcttcagtatag

SEQ ID NO: 21018 - DNA, 273 bp, Escherichia coli
atgtggttatctgtcctggcgtttggcagacaagccgacacgctggcaaagcatcacaaaggcgaactcctgagcgtggcgggtaacatgcaggtgagccagtggactggacagaacggtgaaacgcggcagcgctggcaggttatcgcagacagcgtaatcagtgcgcgaacggtgcgacctggcgggaacagacgtaaaaccacaggcacacagggcaacacaccaccagcgggaggggatgatctctacggtgacaatattccattctga

SEQ ID NO: 21019 - DNA, 1041 bp, Escherichia coli
atgagtggtttatattcgccagcggagttaatacagactgttaatgccgaagatattcaatggcagattaactctttatttataaacctgttttttaagcgagtcgttacatttgagacgcgggatattgcgcttgatattattgacgatccagacatcccgatggctgcattttgttcccctatggttggtagtaaagtatcacgcgatgaaggctacgaatcaaaagtaattcgccctggctacatgaagccaaaaagtagtatagacccaaataaaatagccgttcgtcaactaggcgtatcaccggaacaattcaatgcatattcatcacgcaatttcaaaataaagcgagcgatggtaagacaagcgcaggccattcgcgcacgtattgaatggcttgctgttcaggcaatcacaacggggaaaaatatcattgagggcgatggcattgaacgttatgaactggactggaatataaaaccacaaaatattatcacgcagtccggcggcacggagtggagcggtagagatttatcaacatttgatccaaatgatgacatcgaagagtacgcagaaatcagcgaagggactacaaatatcatcgtaatgggacgcaacgtatggaaaaaataccgcgcctttaaagcagtaaaagattgccttgatactcgacggggatctaattccgttcttgaaacggccctgaaaaatcttggggattccgtcagttttaagggttacgtaggcgatgtggctattgttgtgtatagcggacgttataccgacgaggacggaacagaaaaatatttccttgatcctgatttgatggttcttggcaatacatcacttcagggcatcgttgcatacggtggcattcaggatccggagctaatccgaatggggctgactaaagccgaactcgcaccgaaaaactacattgtgcctggagatccggctattgagtacgtacaaacgcactctgcaccacagccaataccggcccgcatcaatcgttttgttaccgttcgcattggttaa

SEQ ID NO: 21020 - DNA, 345 bp, Escherichia coli
atgattgaaagagatagtcagctacgagagctattagatatcgatgacaaaatgcgcttaagcgagcgtcttgtcgatatgaatcaggtgatggaacttacaaccctgagtcgccgtacactgctaaaccttgaggctcgtggagagttccctgagcgtgtgcaggttacggaagggcgtaaggcttggtatttaagcgaggttgttgagtggattaacaatatcccgcgagcatcaaactattgcctcgtacccacaccggaaaaacctgatgcggcgttatgcctcaagattgaacgcgccaggcgtaatgccctgaaagggcgcaataagttgattggttga

SEQ ID NO: 21021 - DNA, 543 bp, Escherichia coli; identical to SEQ ID NO: 13838

SEQ ID NO: 21022 - DNA, 222 bp, Escherichia coli
atgaagaatgaaatactggaatttctgaacaggcatgatggagggaaaacggcagaaattgcggaggcgctggcggtaacggattaccaggcccgctattacctgttattactggaaaaagcaggtatggttcagcgctcaccattaagacggggcatggcaacatactggtttctgaaaggagagaagcaggcggggcagagctgttcttccacaacttaa

SEQ ID NO: 21023 - DNA, 327 bp, Escherichia coli
atgcttaatcctcacgagcatcctgttctgcactctgaccagagatggcagtatcgtatgagaagatatcaaaatatccttaaagaacatggtattaaacaaagcatgtccagaaaaggcaattgtctggataatgctgtggtggagtgtttctttggaaccttaaagtcggagtgtttttatcttgatgagttcagtaatataagcgaactgaaggatgctgttacggaatatattgaatactacaacagcagaagaattagcctgaaattaaaaggtctgactccaattgaatatcggaatcagacctatatgcctcgtgtttaa

SEQ ID NO: 21024 - DNA, 957 bp, Escherichia coli
atgtatgcccgcgagtatcgctcaacacgcccgcataaagcgattttctttcatctttcttgcctcacccttatctgtagtgcgcaagtttatgcgaagccggatatgcggccactggggccgaatatagccgataaaggctccgtgttttaccatttcagcaccacctctttcgactctgtcgatggcacacgccattatcgggtatggacggccgtgccgaatacaaccgcaccggcatcgggttacccgattttatatatgcttgacggtaacgcagctatggaccgcctggatgacgaactgctcaaacaattgtcagaaaaaacaccgccagtgatcgtggctgtcgggtatcagaccaacctccctttcgatctcaacagcagggcttacgactatacgccagcagcagaaagcagaaaaacagatctccactcagggcgttttagccgtaagagtggtggcagcaacaacttccgccagttactggaaacgcgtattgccccaaaagtggaacagggactgaatatcgatcggcaacgccgcggcttatgggggcactcctacggcggcctcttcgtgctggattcctggctgtcctcctcttacttccggtcgtactacagcgccagcccgtcgttgggcagaggttatgatgctttgctaagccgcgttacggcggttgagcctctgcaattctgcgccaaacacctggcgataatggaaggctcggcgacacagggtgataaccgggaaacgcatgctgtcggggtgctgtcgaaaatttatccccccctcactatactgaaagataaaggcgtcaatgccgtattttgggatttccccaacctgggacacgggccaatgtttaatgcctcctttcgccaggtactgttagatatcagtggtgaaaacgcaaattacacagcaggttgtcatgagttaagccactaa

SEQ ID NO: 21025 - DNA, 1068 bp, Escherichia coli
atgcacaggcacgggcaaagtcaacaagcaccctgcaggagaaagtctccggcctgcgcgtcgtgcaatcgcataatcagcaggaactggagggcgtcccgctgcgcgcgttatcggagcgcttccgcgcaactgcgtattccgctctattcgatcgaggattggcagcagttatcaaggattgtcaacgcctggcagcaggcgacagccagcggcaaacatattgatgaactactggcgacagaaggcactgaggacctcgggtcctcttcgctcctccctgtcaccggtgcactgcatcttgatgaggtcacgttcagttatcccgacagtcacgagccagctctgaacaaacttaccctgacgatcccagagggaatggttgtcgcggtcgtcggtcgcagcggtgcgggtaagtcgacgctgattaagctgattgccgggttgtatttccccacgcacggcaacatcagaatcggtgtgcaaatgctcgatgatgcctcgctcactgagtatcgtcgccagattgggcttgtcgatcaggatgtagcactgtttagtagtgatattgcagaaaacattcgttattcacggccatccgccaccaatgaagacgttgaaattgcctcacagcgggcagggctgtatgagatggtgtgcaatctgccgcagggattccggacaccagtgaataacggcggagccgatctgtccgcaggtcagcgccagttgattgcgctggcccgcgcgcaactggcgaatgctcacatcctgctgctcgacgaagccacgtcatgtctggatcgcacatccgaagaacgactgatgtcatcgttaacagatgtcgtgcatgccgggaagcactcggcgctgattgttgcacatcgtctgaccaccgcgcaacgctgcgatctgattgccgttattgataaggggttacttgcggaatacggaacccacgaactgctgttatctgcgggcggcctctatacccgcttatggcatgacagcgtcagcagtactgcgctccatcgccagcacaacatgaaggaggaaaccccgggatag

SEQ ID NO: 21026 - DNA, 1239 bp, Escherichia coli
gtgaaatacatatcacatgcttttgttttatttactggtttattctcatcggcacaatcttttgcaaccaattgtattattgatgctgtttttcaaaagaatgaaaaatggaattcatattccattgacataaaagaattagaaaacagcaggcaggctaacataaaaagaatgttgcctagtattaacatcggtgtaggccaatacatacaaaataatcaatggcttacagatatttcagagagtaacttacatttgtcactatcttacgattttttatcaggttttgagacaataaaacaaaatgacaggttagatgttgttaagcgtttaaaatatattgaattgctttatgctcgtaatgattatataattaacctgttctcgaaaatagttgattacaaagcaaagaaatcacaaatcaagttaatgagagaacagtataagaaactagaaaaagaatatgagtcgacaaaagaacaggcgtttttaggaattgtatcaactttagatgttgatatacgctctaacgtcttgaatagaatgaaactcgatattgaaactctggaggaagaattaaacatttcgtttaaaaaaatatttgcagagtatcatattccaaaagagatgcttttaaatatcacctacgataaactaaaagcatgtaaaatatatgatttccagtcattattaaaagaaaacaataaatggagattactcgcaaatacaattgattatgatataaaaaaaatttctgattatccatccttttatttatcactgggaatgatgcctaaaaaaggcggagctttaaaagattttagctttaaagaaatggattataatgcaagtttaggaataacattccctttgatgagaatatttgacacatcagaaaatcaaaagacacaagcgatgcatatatctcaaatccacaatgagtatattagagagtctattaaactagatatattacataaagaaatctttacaaagctaacattattgaaaaaacgcatccccattttagaagatgagttgaatttaaaaaaaagagaagttgagtatatacatgaacgaattaagagtaaacaagatactattttaaattatttatcatctataaatagcttatatgaaacagaaaccacgatccaaagagtcgaatatgatattgaatattatagtctatacctttattttcttcgtcagtgtgatacctataaaaggcatgtgtaa

SEQ ID NO: 21027 - DNA, 858 bp, Escherichia coli
atgaaaaaatggcctttatttaatggcccgcaccgtctgagaaacgggttactgctggctgcgttgatagcaataaccggatggctggcactcaaacccggcagctatcattattcattaagtgacagggagaaagagatggtcacctcgttattgcaacaccccgaaacgcggtattttggcttctattccgtggcgcttccggctgaatttacgccaacgggaatggtgatgtttatacagggctcagagatgaccccggtggaaacaaagctgcaatattaccctccgtttcagcagtttctgacgcgctatgaacagaaactcagggatatactcgtcgtcgatccacaggatgccccctatctgaaggggatttatccactgaccccaccaatgagtgggatcatatttgaacggatgaaagcggaatatacgccagattttgcacgaatattagatgcttggaaatgggcagagggcgtcacattttcagtaaaaatgaaggccaatgatggccgtgctacacgctatgatggagaacggaaggttgcaaaatacagctttggatatgatgtcccgcagaaaaaagcacaattgctggctatcctgtcaggattacagccccgcaaagacaaccagcgcccgtcagaaaataagttagccattcagtacggacaggttgatgcttcactgctcgggcagtatgaagcctccgtaagttatcaaaacagcaaagaaatcactataacattaaagacggataaccacagttatattggtacaccgttactggataaagatgcccgtgtaatggtggatttgcccctatatttccagacacctgttatcacttaa

SEQ ID NO: 21028 - DNA, 483 bp, Escherichia coli
atgacacaaaaaaaatcttttaaatcaaaattatgggagtttttacaaagtctggggaaaacctttatgttcccggtttcgcttcttgcctttatgggattgctgctgggtatcggtagttcagtcaccagcccttccaccattactagttttccctttctgggcggcgaatttacccagttgacctttggctttatcgctatggtcggtggctttgcttttacctatctgccgctgatgtttgccatggcgatccccatggggcttgccaagcgcaacaaagcggtcgctgcctttgccgggttcgttggctacatgctgatgaacatgagcattaattattacctgacggctacccaccagcttgccgaccccgccaccatgaaacaggtaggacatatcgatcgtgctgggcattcaaaccctggagatgggggtattaggtggcattgtggttggggttatcacctattttctgcatga

SEQ ID NO: 21029 - DNA, 321 bp, Escherichia coli
atgcctaaatcttacacaccaaactggttttttaccgctttacttgacaatcacatcaatcaaatgatggcacgctattcctgcctgcgggccttacgcatggatttcttctacaggaaagatacgcctgatttcttacaacctgatcatcgctggcttgaattgcagttgcgtatgctgctggagcaggtagaacaatttgaaaatatcgttggcttcttctgggtgattgaatggacggttgatcatggttttcatgcgcatgcggttttctggatcgatcgtcagagggttaaaaaaatatatccctttgcggagtaa

SEQ ID NO: 21030 - DNA, 180 bp, Escherichia coli
atggcccttcgctgggatggtaatcagagacaggctaaaatgttgtcagcgcgtttccggtgcattttttgggataatggttggttcggggcaccgggaacgcgcttcagtcataccttgctgaaaacacaggaacgcgttaaaacgcatacgggcgcgattctggtgtgtctttcatag

SEQ ID NO: 21031 - DNA, 951 bp, Escherichia coli
atgaataattttataaatgaatgtatttccgctccgagaataaacggcatggcagaatttttctcatcaactgcatcaggggaaaaacacaaaccttttagactagtagaaatagatgatcggctttttcattcttatgattacattaagtttgccaaacacctcacaaaaaacagcggccctttcgttaatcattatttttgcagtataccatacagcaaggaagaagagtgcagattaggaacaacagtaataaaatacgcaatcacgctaaacaaaaaattaaacacatggtgtcttggtatggctgagggcgcaatggcaagaaccatttcagaattatcaaaaggaaacatacaaacattaacaaccagtccaacaaaagaaaatgaacatgcattttttaagtatggctcaagtgaaaacgcttattttatttgcactccatttttcctgttagaggaaagactaaaaaattcaaatcttaaacaatttaatcaaggattcgatattataatagaagacaccacatttcaaatgtactcacctaacagatctgggcaaataaaccacgtaaaaaggctattaaataatgatggtattttcatatttacagaaaaacatagttcagaacatgatgaatatcaaaaaagagaaatccaaaaagattattcattcaaacaaaggtatttctcgaaagatgagattaacaccaaaaaggaaatcgtactaaacacaatgaatttgaatgaagttagtgttgacgatatgctttccgcaattaaacaacattttaaatacgcatcaatatattggaatagcggaaatttttactcaatcgccgccagcaattcactaaaacacatatcaacatttataaatttattaccgaaagctgcaattcctatggaatatgtatatgaaaagctcccacgaaatatatcatggtaa

SEQ ID NO: 21032 - DNA, 1545 bp, Escherichia coli
atgacagtgaaatactacgccattctgactaatcagggcgcggcacgactggctaacgcgacgatgctcggcagtaagctgaatctgacgcgaatggccgttggtgatgcaaatggtgtgttaccaacaccagaccctgcacaaacaaaactgattaaccagaaacgcattgcaccgctgaatcttctgagtgttgaccctaacaatcagagccagattattgcggagcaaatcatccctgaaagcgagggtggattctggatccgtgagattggtctttatgatgataaaggtgtactcattgcggtggcaaactgcccggaaacgtacaaaccgcagttgcaggaaggcagtggacgcacccagactatccgcatgattctggttgtcacgaacaccgaagccatcacgctgaaaatcgacccgtctgtggttctggcaacccgcaaatatgtggatgataaaatatcagagcacgagcagtcacgacgtcacccggacgcctcgctgaccgcaaaaggctttgttcaacttagcagtgccacggacagtcaatcagaaactgaggctgccacgccgaaggctgtgaaaatcgcgtatgatctggcctggggaaaatacacagcccaggatgcaacaacgacccgtaaagggatcgtacaactgagcagtgccaccaacagcacctctgaaacgctggccgccacaccaaaagccgtcaaggcggcatacgaccttgcagccggcaaggcccccgtcagccacactcacccatggagtcagataacgggagtgcctgctgcctcgctgacggcaaaaggcaccgtacaactgagcagtgccatcaacagcacgtctgaaatactggccgccacaccgaaagcggtcaaggatgcatacgatctggcaaacggaaaacaaccggcagatgccacgctcactgctctggcaggacttgccactgcagcagatcggttgccttattttaccggagcagaccgcgcagcgctggcaacccttacagctattggtcgcgctattatcgctaagggcagtataaaagatgtcctcaattaccttggtttgggggaaggctctgcattgcctgttggtgtaccggttccgtggcccaccgccacaccgccagaaggctggttaaagtgcgacgggcgcgcctttacaaaagaacaatatcctgttctggccagagcctacccgaccctccgtcttcccgatttacgcggtgaatttattcgtggctgggatgacggacgtggtgtggatgccgggcgacaattattatcttcacagggggatgcaataagaaatattgagggattcgcagatggcgggatcggtatgtcttttgatgcaatcagaggggctttttacgatgcaggaacacgatcagcgagaatgccgaataacacaactactatagacaaaaccgatgaccttggattcgacgcctctcgtgtcgtgccaacagctaatgaaaaccgtcctcgtaatattgcctttaattatatcgtaagggcggcataa

SEQ ID NO: 21033 - DNA, 963 bp, Escherichia coli; identical to SEQ ID NO: 7055

SEQ ID NO: 21034 - DNA, 747 bp, Escherichia coli; identical to SEQ ID NO: 7054

SEQ ID NO: 21035 - DNA, 2064 bp, Escherichia coli
atgaaattaaatatatttactaaatctatgattggtatggggctggtgtgttccgctctgccagcattggcaatggaagcatggaataaccaacaaggtggtaataaatatcaggttattttcgatggcaaaatttatgaaaatgcctggtgggtttcttctacaaattgcccgggaaaagcgaaagcaaatgatgcaactaacccgtggcgtttaaagcgtaccgcaacagctgctgaaattagtcagtttggcaatacactttcctgcgaaaagagcggcagctcatcttcttcaaattcaaatacgccagcatctaatacgcctgctaatggcggttcggctacaccagcacagggcactgttccgtctaattcttctgtagttgcctggaataaacagcagggcggtcaaacctggtatgtcgtctttaatggtgcggtatataaaaatgcctggtgggtagcctcttctaactgcccgggtgatgcgaaaggcaatgatgccagcaacccatggcgttatgttcgtgccgctacggcaatggaaatctcagaaaccagtaatccacagtcttgtacttcagcaccactgcctgcaccggatgtgaaaccggcaccggacgttaaaccggctcctgatgttcagccagccccagctgataagtcaaacgacaactatgctgtcgtagcctggaaaggtcaggaaggttcttctacatggtacgttatctacaacggcggcatttataagaatgcctggtgggtgggcgcggcaaattgcccaggcgatgcgaaagaaaacgatgccagcaacccatggcgttatgttcgcgcggcaacggcaacagaaatcactcagtatggtaacccaggctcctgttccgttaagccggataataatggcggtgctgtgactccggttgatccaactccggaaacaccggaaactccagttactccaactccggataacaacgagccatcaacaccagcggatagcagtaacgattactcactacaggcgtggagtggccaggaaggcagcgaaatttaccatgttatcttcaatggtaatgtttatcagaatgcctggtgggttggttctgaagattgcccgcgtggcaccagtgtagaaaactccaataacccatggcgcctcgtgcgtacagctaccgctgcggaaatgagtcagtacggtaacccgactacctgtgaaattgataatggcggcgtcattattgcggatggtttccaggccagcaaagcgtacagcgcgaacagcatcgtagattataacgatgcacattataaaacctctgtcgatcaagacgcatggggctttgtccccggcggcgataacccgtggaagaaatacgaaccggcgaaagcatggtccgcttccaccgtgtacgtgaaaggtgatcgcgttgttgttgatgggcaggcttatgaagcgctgttctggacgcaaagtgacaaccctgctctgattgcgaaccaaaacgccaccggtagcaatagtcgcccgtggaagccgttaggtaagactcagagctatagcaacgaagagctgaataatgcgccgcagtttaatccagaaacgctttatgccagtgatacgctgattcgctttaacggtgagaactacatttctcagagtaaagtgcagaaagtttctccttctgacagcaacccgtggcgtgtttttgttgactggaccggaaccaaagagcgcgtaggtacgccgaagaaagcgtggccgaaacacgtttatgcaccgtatgtcgactttacgctgaatacgatcccggatttggctgcgctggctaagaatcataacgtcaaccacttcacgctggcgtttgtggtgagtaaagatgcgaacacctgtctaccgacatggggtaccgcttacggtatgcagaattacgctcagtacagcaaaatcaaagctctgcgtgaggctggcggtgatgtgatgctgtctatcggtggtgctaataatgccccgctggcagcttcctgtaagaacgttgacgatctaattgtcaacgacggatga

SEQ ID NO: 21036 - DNA, 519 bp, Escherichia coli
atgagcaatcttttacagacgggcgcggagttcgagaaaaagctgaaagagagagccgaatctacagagacaatgctgaacgacgagttcaggaagctcgaaaaatctgtaagcaaggctgtgacatcaaacgagacgaaaatcaaagacgctatagccctgttcacagcttcgacagaggaatcactgaaaaaacaccgggaaggggtgaaagaggcgatgatgcagcacaggaaggacgtgttaaagctggcagggaatacgggcatgatgttactggggatggtcattttcctgtttaccgtgagttgcgggacgctctggtatcttggagggatgatacaggcgaacctggaagatatcaggaagcaggaagagacattgcagaaactgaacgcgaagacatggggcgtggagttcgtacaggacgggaacaggaaatttctggtccttccgtacgggaaatcagcagaggtgattccccatcaggggaaggactgggtacaactgatggagtga

SEQ ID NO: 21037 - DNA, 891 bp, Escherichia coli
atgaataaaaaatatgaactggttgttaaggggataaataattacggggataaggttactgttactgtgaagccggaaggtgacgggcaagcgtcgctgttgttgccagatgtggcgattagtcttgaccgtactgaaggtgccacgctggagttttacgaagctgaggcgaaaaagcaggcgaagcagtttttcatggatgttgctgccgggttatgtgaatggaacgaaccgttgccggaaaagcgccccgtaattttagaggcgcaggatgtgttgataacctacaaaggaaagctaccgggaagaattacttgttctctgaagatgccgccgtcaacactgcggtcagaaaaagatgatgttgaatcacgtattgaaaaactggagagctacgtcgttgagctgaataagaaatggtcgatattggtgccttctggcgatgaaaagcagtttgctgcgtttgacgattattgtcggaaagtgatgagcagaaatctcgcagagtgtttcagtattcataatgataatttcagtgagctggaatgggagtgtaaccggccatcctttgttgtatccggtgatgctgggaaaataaccatctcagaaaatgggaaagtaacacctccatcgcaccagcacagtgaggagctcattgaatttgccattgattacctgaagaacaataaaaagcaggggctgatgaagcgcgttggccgttgcatgggatatcttcaggtagccgctgagattgaagcgctggccagtggtgctgataaggatgcaattgtgcgggaggctcttcttcgtgattttaatactccaccctttaaaaaagtgccggcttactggcttcatccggggctgacttatcttaaagtgcgtatttag

SEQ ID NO: 21038 - DNA, 531 bp, Escherichia coli
atgagcaatcttttacagacgggcgcggagttcgagaaaaagctgaaagagagagccgaatctacagagacaatgctgaacgacgagttcaggaagctcgaaaaatctgtaagcaaggctgtgacatcaaacgagacgaaaatcaaagacgctatagccctgttcacagcttcgacagaggaatcactgaaaaaacaccgggaaggggtgaaagaggcgatgatgcagcacaggaaggacgtgttaaagctggcagggaatacgggcatgatgttactggggatggtcattttcctgtttaccgtgagtggcgggacgctctggtatcttggcgggatgatacaggcgaacctggaagaaatcaggaagcagaacgagaatctggagaagctgaacgcgaagacatggggcgtgcgttatcacgaggggagcaacggacgttttctggtgttgcccgaggggatgaaagccgaaacgaactggacgatggaaaacgggaaacagaatgccgtaaggctggtacaggagtaa

SEQ ID NO: 21039 - DNA, 357 bp, Escherichia coli
atgggggtaatgataccgatgaaacgcgagaggatgctcacgatacgggttactgatgatgaacatgcccggttactggaacgctgtgagggtaaacaactggcggtatggatgcggcgggtctgcctgggtgagccggttgcccgttccgggaggctgccgacactggcaccgccgttactgcgtcagctggccgccatcgggaataacctgaatcagacagcgaggaaggtgaacagcgggcagtggtcttccggtgaccgggttcaggtggtggccgcactgatggccatcggggatgagctgcgccggctgcgtctggcggtcagggaacaggggacgcgggatgatagttaa

SEQ ID NO: 21040 - DNA, 312 bp, Escherichia coli
gtgtgtcaggttcatatatccgcccaggctgccggcatcatcccggaccgtgccggcacgggagccgtcatcatccttaacatcaacggaagaatggcctgcagcaccatatatccctgcggtcacagacataccggcaacctctgttctcagcaggtcaccctccaggcggacgaagccatagctgccgctgctttccggcgtggccccacgggcaatatcgccgttgttatcgtgaccgagatggccgccctgaatgctgagacggacgctgttattttcaccgtttacaccggtctgatggctgcgtga

SEQ ID NO: 21041 - DNA, 273 bp, Escherichia coli
atgaatctgtccggcatggctgaggtcatccaccaccgactgaaccgtggcgttatcggggatattccaggtggcaccggatgtcagggtgacattcgtggggtcaatggcaccgttcagcactgtgctgccggtcagcttcagggccgtgccgcgctgagcgatgacatccgtggtgacggtactgtcgttcagcgtcagcgtgccttcattcaggttgacggctttctgggtgagtgtggtgttgctgacagtgagtgtgccacttcctga

SEQ ID NO: 21042 - DNA, 666 bp, Escherichia coli; identical to SEQ ID NO: 8112

SEQ ID NO: 21043 - DNA, 927 bp, Escherichia coli
atgagcgccgcgcttcaatacttcgaagaaaatttaccccaccgtccctatcacacggatgatctcgctttcggccttcgtatctccggcaaagggcgcgcgcttcttgcacggtatatccagcagaaccagcctcatgcacagttctggctggtttttgacgttgaccgcgagggggctgcgattgactggagcgaccggaacgctcccgcgccgaacatcaccgttaaaaatcctgtgaacggacacgctcacctgctctacgcactcaacatcgccgtgagaaccgcgcctgatgcctcggttaaggcgctgaaatatgccgcagcggttgaacgttcgctgtgtgagaaactttgtgcggatgtgaactacagcggcctgatttgcaaaaatccgttccacctggaatggctggtgatggagtggcgcgaggaagcctataccctcgatgaactggctgattatctcgatttgagcgcctcagagcgtcgtagcatcgataaacattacgggatggggcgaaactgccacctgttcgaaatgacgcgcaaatgggcttacagggcgattcgtcagggctggccagcgttctcacagtggcttgaagcggtgatccagcgtgtcgaaatgtacaatgcatcgcttcccgttccgctttcactggctgaatgtcgggctattggcaagagcattgcgaaatacacgcacaggaacttcacgccggaaactttcgcacagtatgtggctgatacgcacacgccagaaattcaggctgcacgcggtcgcaagggcgggaaaattggaggtgctaagtctaagcgtggtgctgttgccacatctgcacgcacgctgaaaccgtgggagactcttgggatcagtcgcgcctggtattaccaactgaaaaaacgaggtctcgtagagtag

SEQ ID NO: 21044 - DNA, 489 bp, Escherichia coli
atgaagaaaaaatacgaactggttgttaaagggataaataattacccggataagattactgttactgtggtactggaaattggtgggtatccgtcactgttgttgccaaatgtggcgattagtcttgaccgtactgaaggtgccacgctggagttttacgaagctgaggcgaaaaagcaggcgaagcagtttttcatggatgttgctgccgggttatgtgaagggaacgaaccgttgccggaaaagcgccccataattttagaggcgcaggatgtgttgataacctacaaaggaaagctaccgggaagaattactgatgctctgaagatgccgccgtcaacactgcggtcagaaaaagatgatgttgaatcacgtattgaaaaactggagcgctatatcgctgaattgaaaaaaagcgccccaacaaaaaatgaggtgcttgcagcagatgaaatgaaagaagctattcttgatcgcgcgggcatctaa

SEQ ID NO: 21045 - DNA, 396 bp, Escherichia coli; identical to SEQ ID NO: 5305

SEQ ID NO: 21046 - DNA, 357 bp, Escherichia coli
atgggggtaatgataccgatgaaacgcgagaggatgctcacgatacgggttactgatgatgaacatgcccggttactggaacgctgtgagggtaaacaactggcggtatggatgcggcgggtctgcctgggtgagccggttgcccgttccgggaggctgccgacactggcaccgccgttactgcgtcagctggccgccatcgggaataacctgaatcagacagcgaggaaggtgaacagcgggcagtggtcttccggtgaccgggttcaggtggtggccgcactgatggccatcggggatgagctgcgccggctgcgtctggcggtcagggaacagggggcgcgggatgatagttaa

SEQ ID NO: 21047 - DNA, 564 bp, Escherichia coli
atgtggggacggatgcgcccggttatgcggcgattccttagagaaaatcctaacgttgaagttctgtttcgcgaaaagatgcctgcgatgcaaatggccttgctggaacgccgcgaacttgatgccgggatctggcgaatggcgacagaaccaccgactggttttaccagcttacggttgcatgaatcggcgtttctggtggcgatgcctgaagagcatcatctctcatcattttccaccgtcccgctggaagcgctacgtgacgagtatttcgttacaatgccgcccgtgtacactgactgggattttttgcagcgagtttgccagcaggtgggattttcaccggttgttattcgcgaagttaatgaaccgcaaacggtactcgccatggtcagtatgggtattggtatcacattgatagcggacagctacgcgcagatgaactggcccggtgtcatattccgtccgctcaaagaacgcatcccggcagacttatatattgtttatgaaacgcagcaggtgacgcccgcgctggttaaactgctggcggcgttggcgcagtag

SEQ ID NO: 21048 - DNA, 543 bp, Escherichia coli
gtgaaagaaagtaatcagcgatggtgctctgacgggttcgagttccgctgtgataacggagaaaaactgcgagtcacgttcgcgctggactgctgtgaccgtgaggcactgcactgggcggtcactacgggcggcttcaacagtgaaacagtacaggacgtcatgctgggagcggtggaacgccgcttcggcaacgagcttccggcgtctccagtagagtggctgacggataatggttcatgctaccgggctaatgaaacacggcagtttgcccggatgttggggcttgaaccgaagagcacggcggtgcggagtccggagagtaacggcatagcagagagcttcgtgaaaacgataaagcgtgactacatcagtgtcatgcccaaaccagacgggttaacggcagcaaagaaccttgcagaggcgttcgagcattataacgaatggcatccgcatagtgcactgggttatcgctcgccacgggaatatctacggcagcaagccagtaatgggttaagtgataacaggtgtctggaaatatag

SEQ ID NO: 21049 - DNA, 207 bp, Escherichia coli
atggagcgcttcttcaggagtctgaagaacgaatgggtgccagcgacgggctatgtaagcttcagcgatgcagctcacgcaataacggactatatcgttggatattacagcgcactaagaccgcacgaatataatggtgggttaccaccaaacgaatcagaaaaccgatactggaaaaactctaacgcggaggccagttttagttga

SEQ ID NO: 21050 - DNA, 300 bp, Escherichia coli
atgtcggggagtgctgcggatatcgcacagcgtgtggcagagtgggaagaggaggtttgcgcctcggaaaatgaaatcgcagatgttgatgataccgttcatgagcaggcatgcaggcacaccggtgaggatgacgttggtattctggaacgtatcaggcttctgaagtgtttttacctgtgcggtgttgacgatgaaacaggtgggcctgttgagcatgttgatgctggcagagtaattctgatgcccccctcagtggcaaaagacatggtcaggagcggagtggccgtttatgcgtga

SEQ ID NO: 21051 - DNA, 171 bp, Escherichia coli
atggatattaacgcaggcactatcgctaccggcgaagaaaccattgaagaggtgggctggaagttgttccactttattctcgacgtcgccagcgggaagaagaaaaccctctcggatcaatggggattgcataaccaactggcagtgtttaacccggcaccggtggcctga

SEQ ID NO: 21052 - DNA, 696 bp, Escherichia coli
atgatgacaatcttaaccgctcgaccggaagccattaccttcgatccgcagcaaagtgcgctgatcgtggtggatatgcaaaacgcttatgccacgccaggcggctacttagatctcgccgggtttgatgtctcaaccactcgcccggtcattgccaacattcaaaccgccgtgaccgcggcacgagcagcagggatgctgatcatctggtttcaaaatggctgggatgcacagtatgtcgaggctggcggccccggctcaccaaattttcataaatcgaacgccctgaaaaccatgcgtaagcagccgcagctacaggggaaattgctggcgaaaggctcctgggattatcaactggtggatgaactggtgccgcagcctggcgatattgtgctgccgaagccacgctacagcggtttcttcaatacgccgctggacagcattttgcgcagccgtggaatacgccatctggttttcactggcatcgctaccaacgtctgcgtcgaatcgacgctacgcgatggcttttttctggagtatttcggcgtggtgctggaagacgcaacacaccaggcggggccggaatttgcacagaaagccgcgttgttcaatatcgaaaccttttttggctgggtaagcgacgtcgaaacgttctgcgacgcgctttctcccacgtcctttgctcgtatcgcttaa

SEQ ID NO: 21053 - DNA, 993 bp, Escherichia coli
atgttaacagctataattccgatagatctgaagcgtagacctaaagatataattagaaaagcaataaatattgctgaggcaacaaaaaataataatataaaagttatatttggtcatgggaatcgtttcactacatatgatcgcacctttacaagattgttaaatgggtatgagaatgtccatgtaaaatcatgcgataatttttctaaggccataaatgcatctctattaagaaatcaggcgtttaaatcagttgaaagtgaatatgttatattactggatgtggatatataccctgattttaatttatttgagaagtataaagagaaaataaaatctggcataaagccgttttatattttgccatgcctatatttaacaaaatacgggacaagtatattaaatgatagaaaggcttcaattgaatcattaaaaaaaaagtactttgcgttttctaggaaagagtttttgcatttagccagtccttcttctattacaatattaaaatcagctgattatgaaacacttcatggttttgatgagagttttcgaggtcatggctatgaagattttgatttcttggtgcgcttgtataaccattattttatacctaaagtaaaggctgattttttggccgataggccatgtcattctccattgtttgtcacagggtttagacgatacttaggcgaatactgtttagatattttattgcataaagactttgcgtttcatttataccataataaaaacaggaatgaagattattatatagctagaactgaaaattatcatatattcaaacagaagcacaaaaaaaatataagcaatgaacgatattacgattcaacgttgcttatgttatttattaaacactgcattgataagggggaggacattcgaaattatagcatatatttcgataataaacctggacatatagaccgttacgatacgttacgacgaagaattaaatttttgctaaatcaataa

SEQ ID NO: 21054 - DNA, 450 bp, Escherichia coli
atgcaacgtcaatataaaaaatacattcttcttttttggggtgtcatggatgttatcgcgatagccacatatctgttctactcggttggtagtggtcgtatccctttttattccgatatagttcattcactttctttacttaaggctatcggcgtcgaaggtggtttttacgcttatgcagtcgccactgttacgctacaaatagtattattgttctctttattcttttctgcgcaatgttttttaagacaaaaattatttagtttctcttttttggcgattcaggaatttatgcgttttgctaccgtaagctgttcaatctccgtaataccgttgttacttaactattttcattcacagaatctggtcttaaatatttcgttgtttatcttctcagaagtcacaaaagtgacaacgattatctggtgtaaacgacaggggaaagtgtga

SEQ ID NO: 21055 - DNA, 1059 bp, Escherichia coli
atgagtttcctttctgaacaagacgtacaaaatttagtcattaataaaatgatctttcacgttgtaggtaagaatcttgaagcaccgacacttctcaaagaaataaaaccagttcagcatgtggatttttttcttgaacgtatcaaatcttcactgaaaggaaatcttttcacttttctggagaattcaaataccgaaagaatcctgcgtatcattagagataaagcagatgctgaagctaattgttttacagaacaatcgaagctactggccagtgattttcagtcacaccattctagcggtaacacgagtatgggatgctttttcttatttgaattggtttcagataaggaaaaattctatgcaattataaaatacgataatgaagatgtggttcgttatgttcttgacgaaaagttatctgaagaacaaatgcctactttagaaagatttcatgaaactttcgtaaaaaaagctgaggcaatgcaaaaaatagcgttaattcaacttgatccaagtgggaaaggcgggaaagttattgtaaaagacaggagtaaaagaaccaatatttcaggatattttaaaggcttcttaaatgttaaaagagtcaactctgaaattgaactttgcaataagcttattgatgcgctgaaaataaccttcaaaaggcataaagaattattgccagagtcaattcaaaaaagcggcgtaaataaaatatatgaagttttaagcagagctgatttcgaatataatcctgaagatgcttctccgttattgaccagcatttttgggccgttagatgaaaaatcaccaattctcaacacattcaaaactcaaacaaaaaatgctggtattgaaggcgaatcctttactataaaagcagatggcattcataaaccaccaagacgaaaaattgaaactgcagaaagtgtagtaattagttataatgaagatgaccgtccagaaataagaaacttagatgatgggcgaaaacaaattattgttactactgcgaggattattactgatgacatcgatacttcaaaaaatcgatga

SEQ ID NO: 21056 - DNA, 1434 bp, Escherichia coli
atgacatcgatacttcaaaaaatcgatgagtctatacaggcgtcaaggaaagaccctgaatttttggcatcagaatcaataaaaaatgattctgcgcgcgttctaatttctgccaaaatggacaaagatgcactcattctttggcagtacgtttacgaaaacgtaccaaattggattgaaattactgttaaagatgactgtaatgatgaagtaaaaccatcgtcatgcagtgaaggtgataaacttaacattacgctaaaatgcattgcattcgaaaataacaggtatatttttacgctcgaagggtggaatgtttttctacacaatgatgatttagtatcaataaccaataaagtgaatattctcggtttgaaacatggatttgaaactttaggatattctgttgagccatggaaccatgctccagaaaaaattgaatctaatgaaaccgtacgaacttcaatcaatttacagagctacgttaaattctattctagtgagttcatgcctgcatctgatatagctccttgggtactttataaaatgcctgaggcagaggacaactttttcaaaaaatggttacaagtttcctgcaatatgctttgtcgcactctcgttaatgaattattagcagatgaaaagaaatcaatttgtttaactggaaagccaccaaaaaaattaatttatggagatccagacattctgctttccgactattcagttttacaaactgtaataaactggatctttattgagggcaatgagattgaactcaaacatactttcttcacaagtgagttagcacgagaatggccagagtatgtatccttctgtgagggtttaccaaaaaaactccctatggcctttgagtcagcaaaattactatataaggcccacattcgcgctagcagcagagagactattaaatctctgtccgatctaaggaaaaccttagctgaagacacgcaaaaaataataagtcagtctaaagacatcacatccgctctttggaaagatctggctctggttataagtctatttgcaataaaatatgcgctagacgcatcaaagattaatataaccaataacatattcccatatatgttcttcgcgttatctatatatatttttatatctcaggttacaactctcttcataaataaaaattactttaagatacttgataatactaggctagtctggagagataaactatatggttttcttgatgatactgactatgagaatcttgcagtcacaccattaagagaagcatacaaagcttatcagattatagccacattcgttgtgattctgactttgctgatttcatttataatgatcatattaggattctcaatgcttgatgaacatgctacgaatgcaattacctcttggctcagttctcacttaatcaatagttactgtagttaa

SEQ ID NO: 21057 - DNA, 519 bp, Escherichia coli
atggaaataactaaagaacgattattggaaatagcaaatcttagtgatggggcattaagtgatgggagaattatttctcctgatgcttatgaatcagttacaagtatagaaataataacgatggctaggatgcttcttgcgcgattcaaaaaagaatataaaaaacaggtagatagcaatgctaatatatatgatattttggacggttggggagcctgggctgtagctgaaaatagttctattgattggcaggaaatagctgataaatataaaaatgttgttcctcatggtaaaaaatcacgtcgtcagtgcagcaatgatgaagggggtataattgatacctgcatgttgaggcttaaacaatataggatagatgactatgagttaattatcgctcattttgttatgggagtttcattgcgttgtttagctaagataaacgaatgttcagatggtaaaataaggaaaaaaatgcaaatggcaatgggatttattgcaggttgtatctattaccgttga

SEQ ID NO: 21058 - DNA, 423 bp, Escherichia coli
atggcaaaagtattaacacaggaagagcgcgaaaaaattaaagggcagattgttgatctcgtacgccagagtgagcgagagacgttacgacaactggaagctaaaacaggggcaaccagatatctgataagtattctcgccaaagagctggtttcgagtggttacgtatacaactctggctacgggttattcccgtctgagcaggcacgtaaagactggcaaaacgccagcaaaaaactctcgagtgcaaagtcgaaggaaccggttatggttgatcctgaccttatctgctcgttatctgacggagaaatacgtcgttacgacaggcgtcataatataatttgtagtgagtgccgtaaaagagaagttatgcagcgtgtactggcgttttatcggggaaactttcaagaggtgctgttgtga

SEQ ID NO: 21059 - DNA, 726 bp, Escherichia coli
atggagaccgtttttgacgcactgaaagcaatgggaaaagcctcttcccaggaagtggcagcacgtctgggaatgacccgggatgaggcgattaacgagctgtggaaactgaagcgtcgtggggaagctgataacaagggcccgatgtggtggttgactcaaaccgacgaaaacgcatctgtagcacaggcttctaaagtgacagcgcaaatgctgatcgaggcgattgaacagcatggccctaaagcggctgatgaacttgcactgatattcagaattacttcccgcagggtgaactcatcgctggctatggccatcagcaaaggtcgtctgattcgcgtaaatcagaacggtaaatttcgttactgcctgccggacggtaatttaccagcagagccgaaagttgtatcggtagtgaaaacacctggtaaaggctttcctcagccagccggtgttgcgttaccagtacaggaagcggcaacacaggaagaaattaaaacagatactgtgggggacattgtgcagtcactaccatcgttcactgaaacgcgagccaatgacctgattataccatcgctgcaaatggcaaaccgcgaactgcgccgggcgaaaagttatgtccagaagtgggagcgagtctgcgccgcgctgcgtgagctgaacaagcaccaggatattgtccgtcagattgtcgattcctccagtcgtattgtgtcggaaaagtga

SEQ ID NO: 21060 - DNA, 156 bp, Escherichia coli
atgcaaaaaatcgacctcggcaacaacgaatccctggtgtgcggcgtgttccccaaccaggatggaacgttcactgccatgacgtataccaaaagcaaaacatttaaaaccgaaactggtgcgcgccgatggttggagaagcacacagtaagctaa

SEQ ID NO: 21061 - DNA, 579 bp, Escherichia coli
atggtaaatcagcaacagcaacagattaacgaaaatctaaaaattgaggcaatccgttggtatcagaagctgcaggagattacttatcttgaagcaggacaacacatgcgggctttaaatcagctcatgtggcaaatccctagtttcgtaattgctgtcaatggtgggttgtggtatgcaacaacactggcaaatgaaagttccctatggattatctttgcagtgttagcattgtttgatttcacaacaatgattacactttatcgcttaaggtctttaattggttcgaaaatagcactacaaaaaaacattgaagatccttcaaaaaactatattttaaatgaaattactagagacgctggatttaaattgccctctagctatgataataaggaaactggttacatagtagtgtcgtgctgggcagtaatgcttattgtttgcttctttgttaatattgctggggtatatcatccaaacttgttttcaaaagacatttcacataatacatacaaagcaacaattaaaaatattgagtcaggattatttatcgaagcaaaatcaggattatcaaagtga

SEQ ID NO: 21062 - DNA, 603 bp, Escherichia coli
gtgacttcgtggaagttttatgacaataatgctgatcgcttatttgccgattatatatcacttgatttttactctatctttcaggatgttgaagagtttattttacaatctaagggtgtctctttggatgtcggttcaggttccggccgtgatgctgctgcgttagatgaattaggttataaagtaatagctgttgaaccaagtgaaaagatgcgaaatttggcatcttcatattataaatctaaccatattatatggttagatgattcattgccttttcttcatagtgttaaagcaatgaatctaaagttcgaccttattttagtcagtgctgtatggatgcatctttcaaaaaaagagcaaaaaatctcactagagacgctaactgatcttttaacattgaatgggagaatgataattacattgcgcttaggacctcccgaaccagatagaaacattaacgttgttaatactgaggaacttcttgagttagcgtctcagttaggtctgaaaacattgcgagttacgtcaataaataaagatagttttcaacgtaaccagataacttggcagaaagttgtattatcaaaaaataatgagtaa

SEQ ID NO: 21063 - DNA, 1245 bp, Escherichia coli
atgaacgaggcagcaataattattgtcccaacagacatcagcaagaaaattcgcgaaatagaagagtcctacaacagatatataaatgaatttcgcatccctaatgatcataagataatcgtgaattattcagcaggaaaagacagcactgccacactcgcagtggcgcacacattattcggcaaacaggtacatgctgttatggcagacacggataatgagcataatctaactgtcgaattcgccaggagcattcatgagcagatcggttgtagccctgtgcaggttgtgaagcggatttacactgaagaagattttgccaaacgacgaatttatctgcaaaaaaactggtctaaacgacagatgatccgcatgggagcataccgtggcatagtcatgccttccctcgcacgttctgacaccaaattcgggcaagcctggaagcgcacagcagaacgctggggaattgagttcgaaactgctcttgatgctgcgctttccgttatgcacccatccggtaatagctttttggattgctcccttctgcatggcaagttccctatgctgcgcgaccgattctgtacagacgaactgaaaattcagatagctttcgacgcagccataaagccgctccttgatgctggcgatgttatcgtacaatggtctggtgttcgcgcggatgagtcctctaagcgcgctggatatgagaggttttcccgcgatatgcgcgacgccgattttctctacaacttcctgccgctccacaaatggacggctgaggacgtattcgcagttcacaaatatttcggaattaagccaaatccactttatatgcaaggtgcgtctcgtgttggctgcatgaattgcgtgctatgcaacaaagaggaaattgcagagacggctgcgcgctggccagagcacatcaaaaagcacaaacaatgggagttgaaggtacgccttgctagtagatgggtacactggatgagcgtaggagagataagccaacgctggatgaaacagttcaatctgccacttggtcgaaatattcaactttttgggctaaaacctgatgtgcaacacatcgactggtcaggattttatggtcctcgtggagatcttaattctccgggtgtttatgaagtcgtagagtgggcaaaaacagggcgcggtggcaaggtctacgatcttgtaaaagcaagtctcgatatagaggtttgctcttcacgctacggtctgtgcgaataa

SEQ ID NO: 21064 - DNA, 351 bp, Escherichia coli
atgaaaccattcacttcccttatcgttgacgtacaaaaaacccgcctgcgtggatggcttgttgcggccgtgctgctgctcctcatcatcgcgctggtctcaccccagcagttgccggtggtggtgtacaagctctctctcatctccctcgccgccgtgctcggctactggctggaccgctcactcttcccgaaggcccgtccggggcagtacctgaagcatgacgagcgcctcatggctgaggggcgctggcccgtacagaccggccttcacctggtgttttctgctgcgttaatccgccgtgcactgattgttgcagctgtctgtctggctgttgcgatggggctttaa

SEQ ID NO: 21065 - DNA, 654 bp, Escherichia coli
gtgtggactaacctgctaaaaaatctgccgtggcgcagtctgctgctggcagtgctcataaatgcttttctgattggactttattacctgggctacaaaagcgggcatgaaaacgccacgcgcgacggcgataaggcgatcagtgagttgcagtcagcattcgacacatacaaaacggagcaggcaatgcttgagaacgctgcattgcgagcatgggcaaaacggtatcaggagcaggtggccgctgggcagcaggctgaggccggttatcttgagcagattgctcaactggagagtcagaacaaacaactacaggggcaaattaacgatgtcacacagcgctggattgatgaaaaaggtaagagccatcccattgagtgcgtgtttactcgcggtttcgtgcgccagtacaacgccgcactcgggtatgacaacgcatccgtcgacaccggtcattcagactcagttgccgccactggcacccgctctggcacagcgaccgggcaacctgaaaccactgacacccggttacgcgattcgggtgtctcccagcgtgacgttctcgccaacatcatcgacaacgcaggacaatgtcgtcgctggcggaaccagataaacgcgttgctggatgaacgggaaggattacagaaatga

SEQ ID NO: 21066 - DNA, 954 bp, Escherichia coli
atgtctgattacttaaaaaataaacgcgttgttgatcctgttatgaccagcatcgcgcgtggctacaggaatgcagccttcatcggagaacatatatttccggttgtgtatacggacagagaagcggtaacggtccccgttttcgggagatcagcgtttgtggaagttgataccgtccgtgctgtgggggcagacagtaatgttctgatcagggaaaagagcagtacgctggatctggtgttgcatgagcacgatcttgctgcacctgtggactaccgtgaacagacggagtcaatgttcaacgaagaggccaaggcaatccggcgggtgacaaatggcattcatcttcgccgtgagcttattgctgcccgtcttgcgcaggacaaaaaagtgtacccggcatcttcggtaaagacgatgacgtctgttgaacgctgggaaggaggccatggtgatcctgttgaggtcattgagggaggcattgaagctgtgcgaagtaagatcggggtcagacccaatctgatggtcatgggagccagtgtgatgcccctgctgagatatcatccagccatcaccactgctctgggacttaatgagagaaaacggatcaccccgcaaatcctcagggagctttttggtctggacaaggtcattgtgggtgagcctgtttccatggcatccatgactgatgcaggcaaccggaacaaatatccggtggacatctggggagataatctcatgctcttctatgtcactccaccgcgagaaggtgccgaaagtgccgacgaaaatgaaccatcgttcgggtataccctgcgacgtaaggggatgccggtggcagataaatacgatggagtgggcggaaaggtgaagtactgccgttataccgacatctataaggtggcggtcgtgggcggggatgccggttatctcgttacaaatatagtgaagtaa

SEQ ID NO: 21067 - DNA, 336 bp, Escherichia coli
atgactacacagcaggtcactctgaccatgacagtcacagccagtactgcacttactcagcagaggtttgtgggagcagataacggcgcatgtaagcagggtgccgttgccgtcggtgtcgcccaggtggatgcccgtgcaggtgatctgaccccggtgagtgtgaccgggatccttgcagttgaaacgggagcggcagtttccagaggggcactggtacagtctgatgccaaatcaagggctgttcctcaggctgacagtggtaaatcctgtggcattgcactggatgaggcaaaggccgaaggcgacatcatccgtatcctgcgcggggtgtga

SEQ ID NO: 21068 - DNA, 1311 bp, Escherichia coli
atgaaagtgatgaaaaaaagtatctcactggcgctcatcctgttggggtacacggtggcaattccggccgtccaggctgaagggtacgaatactactctaaccagggagccctggtttacggttcaaacttcgggggacaaaagaaaatcattgccaagtttacgggaattaacagacgcgatttgtaccctgtggaaaatatctctggcgagcaggaacgatatattatcgaagatgaagtcaccacaattaaagaggagtaccactggataacggacggtcacgtcattctctggcgagggaaaatcgtgagtaatcctcccggtacgccaatggtcgatgttgccagctttaaggctctgggccgcttcgccgtcgataaatacagtctctattttgacggtcagcgcaccgaaagcaatagcggtgcttcgaaggtggacctggcaaccctaaaagctatcgaagataacagcagcacgctggttgaccgacataacctttatttattgggacgcaggcaggccagtagcgacgatttcagcgtactacaaagtaaattgtggggggatatcgagcggttccgcccacgcaatgaaggggctacctcccgcgacctgcttattcgtcatcgccaggatgtgtttctcaatggtcagcgcattgcagacgttgatgctgacacctttcacatcattcgatggatccccaattcattattggtctaccgcgacaaacatggtgagcaccgttacgcctatggcaacccggccggaaaaatggcaacgaccgatgatgcgaattcgtttgaaatcggtgaaaaaaccgtccgctggcgcaggcaactcgcgcgggatgacgcctggcccacgcaactctcgtgggatgtcatatggggggcctggcaggatattcccaatgttgatccggaacagttccatctgatcactgaccgcatcgcgcagtatcaggatcgtctgtatatcatcaaactgtcgccagttggcgaagaccagcttaacgttatcaccctggatacccctgatttagtggttgatcacgtcttcaatggtgggaaaaagcacatttatattatcaaggacagagcgtgggtgcaggatgttcatgtgattgctacccacggtccactcaccatggctgagagtttcgcctgggacgatcgctatgtatatgcctggcggggccagcgaccttccagaactgaatcgccatgtccggagcaaaccgttgagcaggatgatggcatagtcattaagaccgaagcatcagagtgccaccgcacgccgtaa

SEQ ID NO: 21069 - DNA, 1443 bp, Escherichia coli
atgcactttcgcaatgtggtttgtttgttgtcttgttcgttgttcttatcgcctgcctggggatgtaagctttcatctgtggatcccaatgagtatcagcaacagggaaaaggcgtggtgtacctgcgccctaatcaaaacaccaatctttcgctaccgaacgtgaattacaagcgcctgcgtcggttggcgaatttgttaattgacccagcgacactggaagattgggaggaaataccgccgttaaccgatctgtctactgattatgatgtgaggggcgcaaatgcctggtatcctcattactcctggcatagcgatggtcgctatattatttacgctggcaagatagtgcaaaatcctgcgggtgcaccgccggttgacgtcacgtcattcaaggcttggggtgattttgccgctgataaaaatagcctctatttcagaggcgaacgcacggatgacaatggtggtgacaagcctttagatagcaaaacactgcatcagatgaatttaccgccgccatgggaacctgacgtcctcgggctgatattgcgtgatgctaacttcctgtatatcaacgggcatcgtattgctgagaccaatagtttccgcgtgctggcgcaaaagtcctgggataagcacggaaaattttccatgaagtttagctgcattcgcaaaccattcggcccctgggatacgctggctcgtacacagacgaagattatgctcaacggcgaacaactggatgccgacccggataccttcaccgttgtgcgctggatacctgaagcattaataagctggcgagataaaaacggctttcaccgaaaggtactggatcaatatgccctggacagcaatgaggaatatagctgcggtagtttcaatgtaaaggaacaccgcgtcacctggcgtagtagcttcccgggtaagggagcagaatgccaacaagaagagattcccggcctcgatcctgaacagtttcacccaattagcgatgctgtcgcgcagtatcaggacaagctgtacgtcatcgaaacaacgccatttgacgagctcaagctgaatattgttacgcttgatgacccgaaactgattattaataagcgcttcaacgccgggaagcgtcacggttacttgctcacaagaaagggagacgagtttggggattctggtttacaggtgtttgaatccgccgggccgctcattttatttgataaccacatccccagcgaacgggaagcgcatcaggttagcagcaacccttatatccaaaaatggttagcccgcgacgacaaatatgtttatcgcttcgatggcatgcagctctggcgctatcacaccgcagatccccgagccgtgcgcgtcgtgaacgatcaactcgatggcaaaattaacggtgatggcgagtttatacccactccgcgcgatgaggctaaaaaatga

SEQ ID NO: 21070 - DNA, 366 bp, Escherichia coli
atgacgtatggcgatgcatatctggcagggtggaaaaatatctttaattataatggcgttgctacccgatttgagttctggtcgtttatcatcggtagcgcaataatttgcctgctaccgcttttaagttggttgtttgcaataaccattgacgatgattatggcgctttcattttttttgcgctgcccacatcatttattttaacgttgatttttgccgtgccgggaatggcgttaggcttcagaaggatgcacgatatcggacgttcaggatggtggtttgccatcggcgtgttgatcccttatgcaggcgtaattctgtttatactgtgctgcctgccgtcaaaaccccaagagcaggcataa

SEQ ID NO: 21071 - DNA, 177 bp, Escherichia coli
gtgctggcacgtcgattcggtttgctggggtacgaagcggcaacactggaagatgtaggtcgtgaaattggcctcacccgtgaacgtgttcgccagattcaggttgaaggcctgcgccgtttgcgcgaaatcctgcaaacgcaggggctgaatatcgaagcgctgttccgcgagtaa

SEQ ID NO: 21072 - DNA, 909 bp, Escherichia coli
atgattggtaagttgtctgattctttgattgaaaataaatacaacgaatttagagaagaaatatctttactttttgactatttaaatcagataaatgatacaacaaagaaaaatataaaacgtcttctaaaagaagtggagtatgcacagaatccagatactattattaatattaatgaaactattaagattaagtgtggcacaacgttagctcgccatttatgttcaaacccatatacaggttcaacattagagataggtaacagcgccattgatttagaagaaaagataagattgtgtaatgttttgaaaaataaacaatatcagtgggttattactgaagcctatgagttactggaagactatattgaggcaatatatgtctatactgtatgtgttcgaaatgatttctggtcctcaagtaattttggtaaggttgaagatgatgacattgggaaaggggaagtttattacaaattattaaaagcaaaaagtaacccatcgaaaaaaataattaaaattttcagaaataaaatacctggcttcaaagagatagaaataaacaacaagattggtaaaaactatcgctttaacatcaagctaattgaactactaagacatacaatagtacacaatagtggacgattcaatgatacagaaaaatttataaataaggttttagatgaatctgaaataaacggtaagaaaagagttattggagaaagagctgttagaagttacattgctaaagtgcaagaagatgatattgtaatgctcttagaaagaccatctgaaatttttggttcttttggtggttattttaacagagcaaaatttttactaagtgatattttagaatactcactaatcattaaagaagaactaaaatcatatctaggcaatcattaa

SEQ ID NO: 21073 - DNA, 354 bp, Escherichia coli
atgaagaattttaagacggatatctatttcgtctccacattcgaaccgtcaacaaaatcggtcgatttgctcacagttgaaacttttgccggtacggtatgcaaacaaaccgattcagagatgtcgaaagagtggacaattaaccgaggactgtatgcctctttccgctatgaaggtgagtgggagcactaccctgaatgggcgcgaaacctctatctgatggaattacctgccagggggttagccagagtgaacggcagtgatattgagcgattttattacaatgaaaacttcgtcgaaattgatagcaataacattgtttgcgaaatttttatccccgttcgcccggtttag

SEQ ID NO: 21074 - DNA, 231 bp, Escherichia coli
atgtcatcaatttattctgaagaatatcaattagttataaagttactacgatctaccaggattgctaaaggcctgacccaggctcaactggctaaggcgctgggaaaaccccaatcattcattgcaaaagttgaaaatggagagcgtcgtctggatgtgattgaatttgcgcatatggcacggttgctttctcttgatccggccgatgctctgagaatagtcatgcggtga

SEQ ID NO: 21075 - DNA, 1650 bp, Escherichia coli
atgagcgcaatcacattacgtaaagcgttgggtgtacttgcgaagtcatcttcgttttccgtaaccacgatgacgcatcgtcaaaaggatgagttcgatcagttaaaagaacaactctttgtaaaacaagagattgaaactgagctgcaacgttatctggatgttgctaagcccggtgaaatcatctttttgtgcggcagtagtggtgatggaaagtccgaaattttgacccgttgtaagtcaaatcctcgttatcagcaacgctttagttttcatctggatgcgacacacagctttgccccccgacaatcagctattgatgctttaaatgatttatttagcaatcatcaccagcactcatatcctttgcttataggcatcaataccgggatgctcgccaactttgccagagaaggtgctgaatgccatctggcgatccgcactgcgatcgattctttcttgtcagcagatcaggaagaaagccgcccataccgcagtgggaattgttctttttttgactttgagcattaccctaaattccagtttaatgaaaaaaaacagtattcatcgtttattaaagcattactggataatttaacccgtgatgatgatagtaatttgtttcagtttatttttcgacatgatgagaccgttaaccctgagctgaaagaagttgctaactataaattactttgtctgccgggtgttcagaatgtcctcatcactcagctctttaaggcccgcctgattaaagatcagtttgtgacaacccgaactctactggattttctgcatcatttgcttatggggccggggtatttatttgataatcttttcactggggcagaaaacgacctgattaaaaaagtttctgattttgatcctgccaggctgcacacctatgaaatcgaccagtttattttgcgctacgaattgggcctggtagatcctgagctggatgattttttagctgcactcgcgccattacacattagatttgatcgccagtgcgttaatccaggtgatgcggcctcgttaatcaggctcttttggttgttgcaggatgaatctctggggaataattatcaccagaaattttccgtattctttaatgaatccttatttgagcattattcagaaatctggcatctgcacaaaaattacaccgctgactcagagcagaaaaaagcactgaaccggttttatacatcggaacttattgctggtattcagcgctatgcaaaccgcaaagcgccggaattaagtatgcaaaaagaagagttctttttgggtgaatatggcggggtaaaaataactgcgccagtcgaattgaaacctgactgggaggccatccgcaataaaaatacggcccaccctactggcttcgacgtgcatttaaaagttgggcaaaactctctgttacctgttcgtatcggacttaatttatttgaacttctgaacaaattaaacaatggctatcgccccaataaatacgataaaaatgccattgttctactggacgaaatcgttgagttgattactgaacaggccaaatccagcagcgaaatcaagttttatgctggtgggcagcgagtttatcgcgctaaagcggacgacgacatgattaccattagcggtatggagggttag

SEQ ID NO: 21076 - DNA, 1326 bp, Escherichia coli
atgtaccctatcgcaacgacgttaaaagtgggtaacaatcaactggatagttatctgccgatacgtaacaaaaacaatgatattaactggcaatttgtcaccggattggtgcttagctacgccctgaagcgtaaaattgatgcctatactcccagtcaatttcgcgatgattgcaaggctcatttgcaagaattgctcgatgaaccagcattctggactgtactggagcggatgtatttttccagtgaagatatctttcgtgtatctccgctttttttactatttcatgctcagtttgatggcgaaaaaataagtggcgcttcaatggccgataaacgccttggtacgctgtttgctaatctgatgggggatttcagtctggaatatcccatccaagataagctgaacttcattgagcagcaaatgctaaataagctcaatgaaaaaataaagttactgggaaaaggtccattcaccgaagaacaaccctatcttccctatctggtgacttgttttcagtctgatctggcatttttggcagaacaccctcaatatttgttacaagaattgaccaatactctgcgtttatatgcctttagctggtgtgcccaactggcgctcaatctggacaactggcaggacggcgagccacaaagtaagtcgcttttctttattctcgacactgaaaaagccagttctgaacgggatcaaataaaacgctttggttataagtggttcgctcgtcaaagtgaaaaacttttcccaatactctccgcgctagaagttctacaaataaaaggagataagaagcgtccgctctggcaggtctatcaggattgcttaaatttttccgataactcatctcgattgctgcaagatctcaataattatttgcaggaatttatcgaaaagcgcgagctttcggcatcgaagtatacgcaagccgttacgctggaagaagcttttaaacaattattaaccgttgctgttgaacagtttcaggataagaaatctgatcgtgcgacagttaaccggaaatacatcaacgagcttgaaacccagatctgcaccgatttcattcaggtgcgtggtcgggcgggaaaagtactggtactgaatcaggatcgtctgctgctgttgaccaatctcactgtgggtaaaaatgacaaactacgcctgcatgagttgttgcgcggttttgaacagcgcggattttatctggataaccagtcggcacaaacgctggtagcgttttatgaacgtatgggaaatgtggagcgaatgagtgacagtggagacgccgtgtatgtccgtaaaacagtatga

SEQ ID NO: 21077 - DNA, 5061 bp, Escherichia coli
atgtccgtaaaacagtatgaaacctatctggcggaaacctttattgaatgggtaagtggcattattcaacctggtgagcgttaccagtttaaatctcctgaccctgacaatgccctgcaactctggcaggcttttgttgatctggcaggtgacaatcaactggaaattgcgccagagcagcgccttgcctgtctctcctgtaatggtattcaacttattccggtgctgcacggagccgcagcgccagcattcacggaaaactacatatcccatttgcgcgatgaagttgctggccgcagcggggtgtttgccaaatctgcactgttgattattcataacagcatgctggacaccctgattaacagcacaaaagacgtcgcggcaccgggagctatctggcatcccgaaaccttcagtcatgaactggaaaagttgatcacgacggacaacaaccgttcagagttgtcgcgttgcttattaaaggatcaacgaacaacggtactggatgaaggtgcgaccgtatttggcttctcgtcgttgtatcgcctgctggacgacggcaatctggatttctccgagctatcgctgtttaaagatgatgaactactgaattttagccagaaacagctccatacccgactgaatgaaaacaggaagttatttcgtcaaatcgaggacagcgttgaacgctacagtgggcaactggagaacgtattaactgaattcagcgccaaatttattcaggaacatttcaacgataaagacgactggcgcgagcttgatttcgctgtttatctaaacgaaaaagaacagaaccgcgaacaaaaactggtactggatgatatcacggtcgaaaatggcgtgatttggcaacgggcgaaaagtgcaagtaaagctggcaagcgcgacatcagcctgctggtacaggtaccaccagaacaatcgcaaactgagctggagttttgctttcagggcaacgatcttcaggataatcagataaaaattgcgcatcatcgtcagttaaaaaaagagcgtttctggcgaattagtcgtgcagggggaaaaagctcccgtattatggcgtcggttcctttcgatgggaatccctgcttctttagcctcgaactgactaaccgcaataattctgccgaagaatacaagttccgcctgttgctggtcaggcagggacaattctggctagacgatattcagcattgtttccgtatcgagccaggtaaaccacaaatcacactccaacgtgaagacaacgaactacgaatcgctgagtcgggtagccaggtctgtatactggatgaagaaaatggtgatattgactgccagcattatgcattggtgaattttgaaacactggcaaatcaaagcgatctgatccaatttaagcttgtttcaggtgattcttgtctggcattcaatatcgaagggccgggagccgaagaagggttaaccttaccgctactttttgaccagagtcgtttcaataaactgttcaaagaagacgggaatgcgtcctggaaccggttgaagggccgtatcattcttgataataccgaacacaaggttgtcggtgttcgccagcagttactgacgctggaagcctcattagttgatcaacgtcttttggggacaggagatgatgatagcgcgtttgcgctggatgaactcgttgccagccaccccgatctttataacgcctacgaccaattattcctctactaccagcgctgcggtactttacctagcctggtatcgtggtcagcagaatactgcgcgctggtaagccatatagtgacgacctttgaacaggcgcttcaacaaatcgagttgagcagagcgttaacagcgcaggaaaagcgcctgctccatctgggtatttgtaacgtcgatagtcatgaacgtctctccccgttgcatcccctggtgttggcctaccatttacaactggtacaaactatctgcgcagagcaggaacaatacgactcagcgtcatttgccacactaccgaccattacgcttaatcgtctggtggtgtccggcttgatgccgttcgtttaccacagtgaacacgaatacgcacagttgcaaccggtggaagaaaatcgcttctggatcgatgtcgttccccagcgccaggtgagccacgattacgtaaaacgtttggtaaaagacaagctcaatgaatttaccgaagcctacgcccggctatttcagagtcccggaaacaatgcattgattattaatgctattaatcagggaacagcgaaagaactgtttctggggttagtggaatattttaagcaggaaaaagagcatgctatttcggtgcatgtaaattgctacgatgaacgcctgctgccaaatatgtttgatcgatttgccgagagtggcagctatgaacagcttaaaaacgaccttgacctgaacagcggcgcgtggcgagctgaggccgatatgctgattgacttgttgcgcagtcggttaacgtttagcaaatttgtcctgccgtcagaaaacgacaaattggcctatgcacatctggcgtttttcaccaatacagctccggtggattgccgccagatccgcattgaggatgcagccagcggtgtactgtgtcatgggttgattgccggagaaggagctgaaacacagggggatgcttactttaccgcgtttggcctgcggaatgttgatactgaatcttactgcgctctacgacttgccaggttagtgggctgcctgtggcagccagcgcgtcagagcaacagtcaataccacggacaagggattggactggccgtaagcggcaattttaaacagctactcaattattcttacaacagtgcgctctggaccaccattattgaccccaaagttactctcgacttctttactagccaaaaagatgttgtgctaatccactattccgatcagtacaccagttgtgcaggctacgatgcggtgacggtaacgaagcaggtcgatctgttcctccgcttgctccagaccgaaagccagtccgggcaatctgccgttgatagccagcatctacttgccgaatttaatgcttttaacggcgagtggttgctgaagatgttgcgctccagtgaaaaagaacgcaaagagaaatatggcatcattggcgcgtataaatttgtacagtccatgctgagtgagtctgatatctgctgggtaccgctatctgtagccgaaatgattcgcgtatctggtaacgtcgggctaaagatgaaggaaagcgatttatccagaaatctacaggggtaccgtaaaggcgcgatctctgatgatgtgctctttgttggttttaaagaaaaccgcctctatttactgccgctggaagtcaaaaccggcgctcgaccagattacaactatgcgggccagcaggcagctgagcttaaacgttatttacagcaggatattctggagccgcatacactggcatcgcaactttatcgagcgctctttattcgacaggtgctgatgcaggtagagaaacttcgtctgtacggtgtgctggacagtcataagctggctcccctgttggatcgccgcgaatggtggttgacgggtgactatcagttgggtgagttaaaagactatgctaatggctttgttgttgcacatgtagacagcggatcttgcttcgatctctcctataaagagacgacagggaatatcttacagatcgaaattccttattcattactaccctcgttaatcactacccgtgaaggtgaattgccattggctgaacgctaccgggtaccagataaataccgtcttaagccagagtgtgatgagcgcccatccccatctacatcgggtgtgcaggtaattacaccgccagacacacggcctgatactccaaagccgacacctgaggtcagcactgtacccttacaagtattatttggtcatgacgctacacggcaaaccccattgttctgggaaccgaccaacaccacgaagtttatgaataccaacactggcatcatcggtacgatgggaaccgggaaaacgcaatttaccaaatcgctggtgacacaattaatgcgtaaccaatcctgtaacattgatggaaaatcgattggtttactgatctttgattataaatctgactatgtggacgaggcttttctgaaggctactggcggtaagaaatatcaattatcgttactaccttataaccctttgtcactgtttggtgatatgcccatgttacccagacatacggcaatcgcattttctgaaacaatggggaaagcctataacctgggtgtgaaacagcgtatgaaactggttacgctaatcatggagtgctatgaattagcaggaatagtgcctcatgatcgctcaacctggaatcgtgtagcaccgaccatagaagatgtgtggcagcgatatctggctcaggaaaaagtagaagaagactcattgtacgccgcgctttataacttagctgggtttcagatatttgaaacagacccagagaaaatgaccagtctgtatgatctggtggatggtgtcactgttatcgaattggctggctactcatcagagattcaaaacctggtggttgcgctaactctggatctgttttatgcgcaaatgcaaaaacgcggcaagccagtgattcagggggattatcgtcagctcaccaagatgattctggtggatgaggcagataactttatgcgtcaggactttgccagtctgaggaagatccttaaagaaggtcgtgaatatggtgttggagcgatcctgtcaacgcaggagattacccacttcaaaactggagaaaataattacgcttcatatattctaacctgggttatccatcgtgtgtcagaaattaagaatgcggatatcaaagctgtattcaacgtggatgataagggcgaacaggaatcgttgatggggcagattcggcagcttgaaaaacattttagtctgtatattgatgggtataagcgggttaggaagatgagagacctagcgttttgggagttgctgacgaatgagtga

SEQ ID NO: 21078 - DNA, 540 bp, Escherichia coli
atgagtgaaaaaagacctgaaagtataatcgtgctaatttcagaagtttggcggcggatcaaattgatcagctcaaatcattttttttacatctattttatcttgattattgttctcgctggaacttttggaatttggtatgttattttctcttcaggagagtcattgtggacacgactgctaaataatatgaatacgataaatcttgtttcattttcggttccattattggctacaacaatattcgacaaactaatggtagagaaaaccagtgaggagcttgaggaggattgtatccctgtacagcgttggttaaaactaggttctctttttatgtttatcatcattactattttttatggaattggagctggtagtggttctgtattttcattttggtcattcgcagcttggtctctgtctctattgtattgggttttatctaatattgaaaatcctaattattcaatgaacattgatctaaaatcatcatcaggtggtaccaagatcggttctgttgacaatttaaggagagggtga

SEQ ID NO: 21079 - DNA, 1152 bp, Escherichia coli
atgagtttttatacaggtaaaacaataaaagttaggcagccatttggtgatttttatattgcatcaattcctgccaaactattaattcaggtatgttactcattcgcagcccagtatggtaatgaagtattaactggagtacagcggggaatcaacgaaaatagagtgaaggcaatagctcatttttgctccacaaatgacgcaatgtttccaacatccgttatattatctgctaatttagatgctaatggagaaacagtaagtaaaccttggtatatagatactgattctaatctagtaataccttcatcagaaataaatgcatcaattgtggatggtcagcatagaatagaaggattaaaaaaagcaatcgaaagcggtgaactcgctgctgatttcgatcttgtatgcgctatttactttgagctgccagcacctaagcaagcagaagtattcgccacaataaacttcaatcaacaaaaggttgataaaagtcttgcctatcaattatttggatatgacctagattctgttgatagtgagttttggtctcctgatacgttagctatttatttgacgagactgctagataaagaagacaattcacctttaaaagggagaattgattttggcatgaagaaattagaccttagccatcaaaacaaaaattttttcgataatgattggtatatttcaacatctaccatcgttcaaggtattacatctttaatatcaacaaatgcctcaaaagacagatattatttgcataaacgccgtttgtttaaaaaagatcgaagcattttaaaagatataccatcgaaagccccattaagagatgattatataaataataaagatgggcaattgtatgatcttatcagtgattattttaaatattgtaatgcatttttttggaattcagaaaacataaattttatgagaaaaaccattggcattcaggctttgtttgatttattaaaagcgattgtaagtgacatcaaaaataagaaaggtattatttcatttaatgaaatatgtacttacctacgtaacatagacatacaaaaacttaaagacctgaatgttaattattcaggaattggtcgttcgcaaattagagaccatcttaaaaaacaatgtggtatagtttaa

SEQ ID NO: 21080 - DNA, 354 bp, Escherichia coli
atgctcccgaatcgaatggtgctgagtcgtcagactgaagagcagcttaaaagattgaaagggtatacagggatcactcctaacgtcgctgcccgattggcattttttcgctcggtggagagtgagtttcgctattcaccggaacgggataatcggaaactggatggttcgctggtgttggataaaattacgtggctgggggagacattacagactacggaactggtattgaagatgctttatccgcagttagctcagaaggatatggttaaagcatgggctgcgcatgtggaggatgggattgcggcattaagaaattatagaagcttgaaggagctaagtttagcaatataa

SEQ ID NO: 21081 - DNA, 2001 bp, Escherichia coli
gtgctcattaaacaactggtattacataattttcgggtatttaacggtactcacacgattgatctggctccaagaaagcggccacatgaagtaaaccctcgtccgattgtgctgtttggcggtttaaatggtgcaggaaaaacgtctattctgtcggctatccgactggcattgtatgggcggctggcatttgggctcgcgactcagcaacaggattatattgagcatcttagttcgttgattcacaaaggtgcgtactatattgagcaaccggaagaggcggctgttgaactgacctttacctataataagggggggcaggaatcagagtttaccgttacgcgaacttggaaaaagggcaagaaagatcgcctttctttacaaaaggatggccaaccactcagtgaactggattatgatcagtgccaggggtttcttaatgaattaattcctcatggtattgctgatttgttcttttttgatggcgagaaaattgcagaactggcagaagatgaatctggcaatattttgcgcaccgctgtacgccgtttattgggcctggatctgatatccaaactgcgtaatgacttaatgattttcgttaagcgccaacaatccagccagttagcggaaactcagcaacagcagattgaagtgctggaaaaacaaagtagagacttagcttgtcagacagaagcattgctggaaaaagctgattttgccaaatctagaatcgagtttctgtctaaagacattattcgctatgaaggcttgttgaatgcgcagggcggtgcatttgcgcagacaaaagcgcaggaaaagcagaaagttgaaacactgctaaaagataaggagcgcctggaaaaagcactgcgtcaggaatgtgatggatcattaccttatgcactggctcccaatattttatccgagttgctggaaaaaattgctgatgaaacacagatcaaacaagctcaaagctttgaaaaagagttaaggctatttttggcccagctcagaaacgatattgcattacgctctagtactaccagtaaaattgcagccgaggcgattactgataatctgaaagaatatatggcaactaagccgaagggcgatttgttgtttgatatttctgaacgtgaagccggcatgctccagcaatcaatagagcaggacagtaaaaaggcatggcagcgcttcgatctttaccgtattcagttagcagaaattgaacagctactagagcaagccgctgccaatattgcccgtgctccggaagatgagcagttaatggatctttttgaaaagctgcgcgatctggataagcagcgtgaaaatcagcggcaaaaatatctttcattgctggaagacgctaaacgggttaagcaacagcaactggattgtgtccgtcaggtgcaaaaactgcatgatgcggcccgcagtcagcatggctttagtagcgcctttaaaaatgcgcaggaaacaatcaatttactcgatcggtatagcgacgtattaactcaggcgagagtaaagacgctatctgctaactttgaagttgcctatcgcaaactggctcgtaaagaagatatgcaactgagtgctcatattaacccagagacatttgatgttgagttaattgatgagaagggagctgtcattaatcgtaagctactatctgccggtgaaaagcaaatttatgccattgctattcttgaggcgctggcaaaaacttctggtcgtgatttgccggtgattattgatacgccattaggacgtctggattcacaacatcgggataaactaattaaccattatttcccatttgccagccatcaagtggtgctattgtctactgatacggaagtggatgaacgttattttgttgaccaattacgcgatgatatttctcatgcttacgagatagtatttaacacgcatactaaatcatcagcgttgaagcccggttatttctgggaattaactaaggaggctgtctga

SEQ ID NO: 21082 - DNA, 1635 bp, Escherichia coli
atgagtaaattagttcaggccttcgatctggccgagtacgaagattttattaatcaggagctattcgccgggcgtcctctggctgaatatgttgctgaagttcagcggatttattgtgctgataaacgtccgtgggtgattggctacagtggcgggaaagactcatcagcggttattacgctggtgtatctggctttgctgggcttgcctccggaaatgcgtagtaaagatgtttttgttgtgtcgtccgatacgctggtagaaacaccggtagtggtggatctcattaagaaaaccatgttgcagatcgaagccggcgctaaacgtaatggcttgccaattactcaacatgcggtaacgccgaaaaccaatgaaaccttttgggttaatttgctgggtaaaggctatcctgcccctacccgtagttttcgctggtgtaccgagcgtatgaaaatcaacccggttagcgactttattaaagataaagtcagccagttcgatgaagtgattgtggtgttgggatcgcgcagcagcgaaagtgcttctcgtgctcaggtgatcgcaaaacacaaaattgatgggtctcgacttgcccggcatactaccctggcgaatgcctttatttatacgcccattgatagctgggatgtcgaagatgtctggaagttgctgcgcggcgcattccgatatgctcctgaagatattgatgaatgggaaagtccgtgggggggcaataatcgccctctgtggacgttgtatatggactcttccgcacagggtgaatgcccattggtgattgatgaaagcacaccttcctgtggtaattctcgctttggttgctggacctgtaccgttgtcaccaaagataaagcgatggagagcctgattaaaaatggcgaagagtggatggctccgttgctgaaataccgcgacctgctagcattcactacagatcccgcaaataaggatacatttcgcaactataagcgtcgtactggcaaagtcagttatcaatatgcaaaagatggcgaagaaattagtgcagagcgtaagcatgttcccggtccttactggctcaaataccgtcagcagtggcttaaagagttgctggagattgagcgagatttgaatgctcagggccacaccatcacgttgattacgcatccggagcttcacgctatccgccaggagtggttgaaagatcctaatgaaccagactggtacgacacactaccaggtatttaccgtgaggtgtaccagcgggatctggattgggtcgtagatgatcaatcacgttttgacgccagcgatgccgatttgctggtgcagatagctcaggggtttgatgttgtgccagagatggtgatgaaattgattgagctggaagtttcaatggaaggattaagtcgccgtcaggggatttttgacaaacttggcaccattttaaaacaggattggggtagtctcgaagagattcagcaacagcaggcagcgctacaaaaacgtaacgaccgggatattcaccaggaagaaatcaccaagctggaggctgaacttcaggttttacagcgcagaattgtcgatgccagcgaatcctctgtattggtcggcgaggaaaacgaacgtgctcattaa

SEQ ID NO: 21083 - DNA, 1086 bp, Escherichia coli
atggctagtgttgatgcagattattgttactcgtttccagctatacgtggcatacaggctggtcgccccttctacatcgccacatgcccaatgaggattatccccaaaattttcagttttgatgaaaatgatgtccccccagaattacgcgctcaacgtacgctaaataaatcacgcatccccgaaatggtacgttatctgctggacaatcctaaagattatgtattttcagcgctaacggcgtccattgccgttgatgttcagtttgatgagtttcctggttctaacaaccttggtatgttatgtgtgccaatggatgcgcaaattctgatcaatgatggtcagcatcgccgtaaagcgattgaagacgctttagatgctcgcccggagttggggcaggataacattccggtgctgttttttgtcgatgagggattaaaacgcagccagcagatgttcgctgatctaaataaatacgccattcgccccagtccttcactggcatcgctgtacgatcatcgtgacgctagttcaaacctggcgcggtatctggcaatgtcagtagaaccatttatcgggatgacggagctggaaaaatcgggtatcagtcagcggtctaataaattatttacattaagtagcatcaagcaggctactcgtgcattgttgggtaaagatcccaaacagagcaattttgacgaatgtgttcagttagcaagtcgctactggcaggctatttttcatgtgatgccggattggcagctggcagctaaaaaggaagtttctcccgttcagttacgacaggactatatccatgctcacggcattgggttgcaggcgctcggccaactgggctgtaccttattaacggattatcctgaagagtggccggagaaaattactgcgctcaaaaccttcaactggcgcagaaataaccctgatctcatcaaacgagcaatgcagcacggtaaactaagcaagaccagtactgctattcagttaacctgcaatgcattgaaaatcgcactctctatccccctcactcctgaagaacaggagcttgaagctcaaatggttgtctcatga

SEQ ID NO: 21084 - DNA, 702 bp, Escherichia coli
atgggtatgctggaaagagagatgaaaaacctggcgcggcaggctggcgggtcgcacaagattgtccatgaccgtatcgccacggcaggacggttctgtggacgcctgatggaactgaacgttcagatacgctatgtccaccatttaaagacgaagcatattgaggcgtatattcagatgcggctggcgcaggggattcagaaacagacgctgcataatgaaacggcggccatccgtaaaatactgacgcaggccgggcgcgaaaagctggcgcagagtgagcggatatcgaataaatcgctggggctggctggcgtatcccgcaacggtacgcggaaagccattacgccggaatattatcaacagatggcagagactgcccggctgaaagacgcgggactggaggcagcgctggagctggcacggctgatggggttacgttcacaggaagcagtacgctgttccggttcactaaaaacctggcgcgaagcactggcgcacggcgacacccggctgaccgtggtactcggcaccaaaggcggacggccccgcggcacccttattcaggatactggcgcagttaaacgggcgcttgagactgccattgcggtgacagaacggcgtaacggcaggctgattgatacggcgagccttaaacaggcaataaaatactggcgcaaccacactttgcgtatgggctga

SEQ ID NO: 21085 - DNA, 645 bp, Escherichia coli
atgtcgtatggtgtgcggggaagtaacgcgcttattaagtttgataatacagactcattgcagatcaaatatgctaatcacgggtcgaccatgacactaaacacgcaaggtacggcgtattctggtgtgtcgacgttattatggggaaattccagccgtcctgttgtttatgaagtcggtgttgatggtggcgcttatatgttctatgcgcagaaaaataccgataacacctatatgttaagcgttaatggtgcatgtcatgccaccgcatttaaccagcattccgaccgggatctgaaagacaacattcaggtgatcgataatgcaaccgaccgcatccgtaaaatgaacggctatacatacacgcttaaagaaaacggtatgccctatgctggtgtcattgcacaggaagctctggaagcaatcccagaagttgtaggttccgcaatgaaatatcaggacggtgcaagcggatcggaaggtgaagaaggtgaacgttattacacagtagattattctggtgttactggcttgcttgttcaggtagccagagagtcagacgacagaataacagcactggaagaagaaaacgcagaattaagacaaagattatctgtaattgaggcggcgcttgcgtctaaataa

SEQ ID NO: 21086 - DNA, 195 bp, Escherichia coli
atgggaaataatttgttatcagcaaaagcgacactccctgtttatgatcgtaataacttggccccaagaattgttcatttaggctttggtgcatttcaccgtgcgcatcagggtgtgtatgccgatattcttgctacggaacatttcagtgactggggatattatgaggtcaatttaatcggcggcgaacagtaa

SEQ ID NO: 21087 - DNA, 1032 bp, Escherichia coli
atggaaaaaagcattagcacatttatgtacctatccgttttattaggttgtatattcttatttataaaatatcgactttatgttctcgatcatagaagcttgttccaacaacccttgttctgggctgcaataggcctacctttattcaccagcctttactttggttcttttgtctggatagataaaatacactcttttagtcttacaagtcacggttatgagagatttttagatatctcgaaattaccattactcatccttgcatctgcagtacctttagtttcaatagtaaacaacctacacagaaccaaacaaacagaaaaacagatctcagaggcagaaaggaaaaacagggtagatttatattacaaccacatgaaatttcatcttgatttatataaaaaaatcgaaggaaaaagaataggcagctactacccggttcaggaagctcaagctgaagcaatctaccaacattttataaaacatccacaagaactatatagaaaagcatacccacaatctacgcctgatgattctcaacaattagatattaatgagcaatttgttattgatttacacaaatgttgggtagaaatcaacgcaagactcaagcaattatccgagagtgaaaatcaaatacatcctacagaggaactttgcacaacaaagatgagaatatttgtaggagttatgattatttatgaaaaaacttgtaaactgttgtgtttaggtggatttcattataaaaagtcatttgtaataaatgatagttataataaataccaagtttattcaccattttatgattttggcactctgtacgaatcactgcaatccttagaagagataacctacgccttcttggatacttgcagaaatgaagtggtaaacttgtacttccctatagaagataaaattttgatatatggtgaagggattctagagaattggttcaagtattctcagttcttgatcactatagcttatcaacccgccaggatgtctcgcttaccccagctgagacgcgattga

SEQ ID NO: 21088 - DNA, 630 bp, Escherichia coli
ttgaagattaatacaggtgcaaatacgggaggaagagagaccatcaaaaggctgatgactgcctatggtttcaacactcagattgcgttggttgaacacctcgaagcatcaaaaagcactatggcaaacaggatgttacgtgatagcttccctgctgactgggttattcaatgtgcccttgaaacaggtatttctcttctttggctgacaacgggccaaggggaaatgtatcctcaaacagaagaaaaaaataagttcaaaaatgagagttcacctacagttcgccccctttcaaagatagttatcccatcagtaaggcaggcaaccattgagaacggaacgctcgaagagatgggggatgttttccttgatcagactttgatacccggaaaagccgaatattgtttgtatgtcaaagctaacgacggcaattacattgttgatacatcagcaaaacagcttagtaacggaatttggctcatagacatcgacggtatgaaaaacatcgtcaaaattgcgcgcatacccggaaacaaaatagtagttaaccaagatgacacttcatttgaatgttctgtagatgatgtggaagtcgtaggacgtgcagtcaaagtaatcaagaacctctaa

SEQ ID NO: 21089 - DNA, 1011 bp, Escherichia coli
atgaatgctatcgatccgcgttgctttgcctcaagcaccattaacatcatcactacttctggtggcaaagatagtctcgctcaatggctaagagccattgaaaacgatgttccgcatatttctgtatttgccgatacgggtcatgaacatccacagacaatagaatatctggattatctggaatcaaagctgggcaagattattcgcgtcaaagcggatttcacacgccagatagaagggaaacgtaaattcattgcggaaaagtggcccatttctctcgttgaggaatgtggtatgtcgacagatgaggctgaggaacgtatttaccgggcactggaaatccttaaaccaaccggcgttccgtttcttgatttgtgcatgtggaaaggtcgcttcccttcaacaaaagctcgtttctgcacttttgaactgaaacatgaaccaatacgtacacaggtaatcgatccggctctggatgaatacgatgaggtaattagctggcaaggagtccgggggcaggaatcaccggaacgtgcattgttgcctgagtgggaggacgatgcagataatactctgggcctgcatgtttatcgtccgatccttaattggctgcatgaggatgtgtttgctattgccaaacgtcatggcattaagcctaaccccctttatatgcagggatgcagtcgtgtcggttgtatgccatgtattcatgctcgcaagtcagaacttgctgagattttccaacgctggccagaagaaatccgccgagtggctgagtgggaaagactggttgcggaatgttcaagacgtggcaattcaacattctttccatccacgcatgattcgcgccgtgctgaaaaacggatcgaagtcataactgttgatgcttatggcattgaaacttatcgggactgggccttaacgactcggggcggtatgcagtttgacctgctggcaggcatgaatgataaagcggtgtgcagcagtgtatatgcaggagtctgtgagtga

SEQ ID NO: 21090 - DNA, 1653 bp, Escherichia coli
atgtcattagactatattaaagaacagttgtcagactttatttcatctgcagaacctgaggtaatggctattcagggtgagtgggggattgggaaaacctatacttggaatgctttcttaaaggaaaataaaaataagattgcatttaatagatatagttacgtctctctttttggtgttaattcattggacgcattaaaatactccatctttgaaaatacaattacgaaagatttcattggaaacaaacctaatttaaaaacagcaacacaaaatgcaaaggggcttcttgaatcctgcactagaaagaccgctcgtgtgttaaaagatacaccttttttgaaaaatttcactacgacacttgagtcaatgtcatttatgtcaattactaatgttattgtagtcatagatgacttagaaagacgtggtaaaaatttagaagtgaaagatgtcttagggttggtttctttattgaaagaacaaaaaaattgtaaggtggttcttttacttaataacgggacaagtggtatggatgactactccacttataaagaaaaggttattgatagagagattacctataatcctactccagaagaatgtgcagttatagcatataaaaataattctgatgttcataaattattaagcaaatactccatttccctgggtattaagaatattaggatactgaaaaaaatagagcggtttttgctagccttgttacctggcattaacgttaattttgaaaaaattgcaaatgaagtcgcacactccttaactttgtattgttggagtcattacgcatttactccagatggagatgtaccatcattggagtatattagaaatatgagaaatatctatatgcgtgatgaaaaagaggatggaaaagaaaaaaaatggcttaatactttgcttatatatgattataaaaaaacaaacgaacttgatgaagtccttatagacatggtaaggcatggatatattgatatgaacaatttccaaaggcaagtaagtctaaggaatgatgaacttatccgtgatagtaagcgaggttcactgtttgaagcatggaagcttttctataattcatttgaagataaccgaaatcaggttattgataatctatatcaagcggtggttggtgggatagagtatgtaactccaagtgacttggatagtgttgtcggactgtatagagatttaggtgaaaatattaaagcaagtgaattaataagtaaatttattaattacggcaatgatgctcttaaggaatatgttcaatctatttacatgaatgttcatcctataaaagatgctgagttaaagtcaaaaatccaagattattctactactttaaatctggatggttctataaaggatgttctaataaaattatcaagtcagaatggttggtctgataggcacgaggaaatattggatgctgcctcagaggatgactactatgatttatttaaaaaagtcattcttgatggtggtgattcaataatagctactgctcttaagtttggtgggtatagcaatggttcagaaagaatgaaacgcatcggagaaaaagcgagaaatgctttgataagaattggaaatgagtcgagcattaataaaatacgtgttagacggtatttgtaa

SEQ ID NO: 21091 - DNA, 1020 bp, Escherichia coli
atggattttaaagaatggttaagctcaaataaaaacagtcttcccgatgcaaccagagaaaattttgaaaagctatactgggagttcatagacttcaaagcaaatgaatacatgttggaatttaaagaaaaaaaagcagaattactggcccaaaatgaacaagaacatcaaaatttcataaaaagacatattaatatttggagagatggttttggattattagagttgttgttagaattatgtattaatcaaggttctaaatatagtacaagcttacaacaagataaagacaccgacacaaacaaccatttgcaattactaattagattacacgcaaaggcatgtgcaatttctaacgagattttatgtctattaaaaaatggatttcctgacgcagcccatgcaagatggagagcactgcatgaaacaaatgtaacactacatttcatcgacaagcatggtcctaaatgctcagaaatatttttagcacatgaaatttatgatagctattatctaatgatgtcacataaaaagtatgaaagcaggcttcaagagaaaggacccagtaatgaagaggccagagaattaacagacttgttcgataaagccattaaaacatatggcagaagttttgattcgcaatatggttgggccacaccatttttaactgataagaaacacaaagctagctttaaatcaattgaaaaagaagttaaattagatcacatgcgcccatattttaaatgggcatgccaaaacatccatgtaaatataaaaacaatcactaatagcttgtcactaccccatcacctgaagaacgtcatcaacataggtccaagtaatttcggattagttgaccctgcacatgctacagcccttagtcttactcaatcaacgtgctgtctactgaaaaatgactgcaacgaagagaatttaattttcatgaatttaattaaacaactatctatagaaataggtgacacattcctatctatatctaactcaattgaaaacaaataa

SEQ ID NO: 21092 - DNA, 174 bp, Escherichia coli
atggatacaaacgaacttggcttagttaaggcgcgtgttgaactgatcaccgctatgctcaaatgcgcaaccgcgtttgttggcttagttggtgcggtttacgccgttcttaacatggccttcaactacaacaatttaactcatgacaatagaagttcaaaggtgggaagataa

SEQ ID NO: 21093 - DNA, 774 bp, Escherichia coli
atgacaatagaagttcaaaggtgggaagataaatttgagattaagcccggggtttgggtttatgtcccaagcgttgaggcacgtaaagtcggagggaagatacttcaggctgtcagaaacaagtggattccgccactctatttttaccatctaagaactggtgggcatcttaaagctgccagattacacttaaaaagtgatttttttgccgttgttgatattaaacaattttttcagtcaacgagccgtagtcgtatcacccgtgatctaaagagctacttcacctattctcaagcgcgggaaatctcaacattttcaactgtaagaaacttgtcccatagtccacataagcatgtcctcccttttggttttgttcaatctccaatacttgcaaccctctgcttagataaaagttattttggtagcttactacgccgattgaacaaacatcatgatctcaagctaagtgtgtttatggatgatgtgatcatctcgtcaaacaatttggcccaattacaagcggcttacgacgaagcactagtggcaatgcgtaaatctggttatcaagccaacatgagtaaaactcaggcaccatcgtcaaagattagcgtgtttaatttaactttgagtaagggagttatgaaagtcacatctcagaaaatgagtgacttcctgattgatttctattcaagcaattatgagccgcacagaataggggtcaaaaactacgtcgaagctgttaatccagggcaagcgaaactctttaagttgtaa

SEQ ID NO: 21094 - DNA, 810 bp, Escherichia coli
gtgtattctctctgggttcaaatagttattttttttggtatgtatataagtccagagttaaaaagattgttatatactttctttggtatgtctgactctgttaatctttgggaacaaaatgctaaagtaagaggatttgggttgtcgggtgaaataaatttcatgacaccatttttgatgatctatatgtcattttttatgatgaaaaggcgttatgctttaattactttaatttgtctgactcaaatcgtaaattctaacatggctgtgattgcagccattattggtatcggttgctctagacttaatattaatataaaaattgcaacagtattgattttgggagttttagtttatagcttaggagcggtgttctttcctcgattttatgatgagttcgtttctggagatggcacaagaactctggatatcttattacagcaacatgtgtttgttgtaggtaatttagatttttttaatattatatttggattacagcaaaacatatcttcatcaatccccgatattaaacaaagttcggatatgggctgggttatactgtttaattacggtgggttaacatttattacactctttttatttttaatctttactatttctattgcgacatttggaatgacatatcaagcaattatatggatgttaattgggataattttcaataccaaaggtttagttttaggatctaacggctatttctttctatcttttatatatatgtttttgaatagagtaacacttagtggacagagttcaattactaataagttaggtcaagtaagtaaatag

SEQ ID NO: 21095 - DNA, 1131 bp, Escherichia coli
atgaaaaaattaaaagttatgtctgttgttggaacccgtcctgagattatccgtttgtcgagggttcttgctaagtttgatgaatactgcgagcatattattgtccatactggtcaaaattatgattacgaattaaatgaagtgttcttcaatgacttgggtgttcgaaaacctgattattttttaaatgcagcgggtaaaaatgcggcggaaaccattggtcaggttattattaaggtagatgaagtattagaaatcgaaaaacctgaagcaatactggtattgggcgatacgaattcatgtatttctgccattccggccaaacgccgtaaagtgcctatatttcatatggaagcaggtaaccgttgtttcgatcaacgcgtgcctgaagaaaccaacagacgtattgttgaccatacggctgatatcaatatgacctacagtgatattgctcgtgaatatctcttggctgaaggtatcccagctgatcggatcataaaaactggtagccctatgtttgaggttctttcatattatatgccccaaattgatggttcagatgtgctatcgcgtttgaatctacagtctggtgagttttttgtagtaagtgcgcatcgtgaagagaatgttgattctccaaaacagctcgtaaagcttgcgaacattctaaatactgttgctgaaaaatataatcttccagttattgtctccacacacccaaggacacgtaaccgaatccgtgagcaaggaattgaatttcattcaaatataaatctactgaaaccattgggtttccatgattataaccacttgcagaagaactcacgagctgtgctttcagatagcggtactatcactgaagagtcatccatcatgaatttcccagcggtaaacatccgggaagcgcatgagcgtccggaaggctttgaggaagcatccgtcatgatggtggggttagagtgtgaacgcgtattacaagcgctggatattctggcaacacaaccgcgaggtgaagtccgtcttttacgtcaggttagtgattacagcatgccaaatgtgtcggataaagttgtcagaattgttcactcttacacagattatgttaagagagtcgtctggaaagaatattga

SEQ ID NO: 21096 - DNA, 795 bp, Escherichia coli
atgaaacttgctttaatcatagatgattacctgcccaacagtactcgtgttggtgcaaaaatgtttcatgaacttgctcaagaatttatccagcgtgggcacgatgttacggtaattactcctggtacgggcatgcaagaagagatttcttttgatacctttcagggggtaaaaacatggcgttttaaaagcgggccgctcaaggatgtaagtaaaattcagcgagcggtcaatgaaacgcttttgtcctatcgggcgtggaaagccatcaaaaaatgggtaaaaaaagagacctttgagggggtgatttattattcaccttccatattctgggggcctttagttaaaaaaattaaagctcgttgccaatgtcctgcttatcttattttaagagatatgtttccacaatgggtaattgatgcaggaatgcttaatgctggttccccaatagaacgctactttcgtctttttgaaaaaatatcttatcgtcaggcaaatcgtattggacttatgtctgataagaatcttgatgtttttcggaaagataataaaggctatccgtgcgaagttttgcgtaattgggcatccctaacaccaacgatcatacccaaggattatataccactacgtaagcgacttggcctagaggataaaaccattttcttctatggtggaaacataggtcatgcacaggacatgacaaacttgatgcgacttgtgagaaacatggcagcatatcctcaagctcatttcctatttattggccagggggatgaagttgaattaattcattag

SEQ ID NO: 21097 - DNA, 3273 bp, Escherichia coli
atgttgagtttcagcgttgttaaatcggcaggcagtgccggaaactattacaccgacaaggataattactatgtgctgggcagcatgggagaacgctgggccggtcagggggctgaacagcttgggctgcagggcagcgtcgataaggatgtttttacccgtcttctggagggcaggctgccggacggggcggatttaagccgcatgcaggatggcagtaataagcatcgtcccggctacgacctgaccttctccgcccccaaaagtgtctccatgatggccatgctcgggggggataaacgtcttattgatgcacataaccaggctgtggattttgctgtccgtcaggtggaggcgctggcttccacacgggtgatgacggacggacagtcagaaacggtgctgaccggtaatctggtgatggcactgtttaaccatgacaccagtcgcgatcaggacccacagttacacacgcatgtggtggtggctaatgtcacgcagcataacggcgaatggaagacactgagcagtgacaaagtggggaaaaccggattttccgagaacgtgctcgcgaaccggattgcgttcgggaaaatatatcagagtgagttacgtcagcgcgttgaggcgctgggttatgaaaccgaagtggtcggtaagcacggtatgtgggagatgccgggcgtaccggtggaagccttctccggacgctcacaggctatccgggaggccgtcggtgaagacgcctcgctgaaatcccgggatgtggcggcactggatacgcgtaaatccaaacagcacgtcgatcctgaagtcagaatggctgaatggatgcagacgctgaaggaaaccgggttcgacatccgggcatatcgtgacgcggcggatcagcgtgcggagatccgcacgcaggcgcccgggcctgcttcacaggacgggccggatgtgcagcaggcggtgacacaggccattgccggattaagtgaacgaaaagtgcagttcacgtatacggacgtgctggccaggacggtcggcatactgccgccggaaaatggtgtgattgaacgggcacgcgccggtatcgatgaggccatcagccgtgagcagcttatccccctcgatcgtgagaaggggctgttcacgtccgggattcatgtgctcgatgagctgtcagtccgggcactcagtcgtgacatcatgaaacagaaccgggtgaccgtacatccggagaaaagtgtcccccggacggccggttacagcgatgccgtcagtgttctggcacaggatcgcccgtcgctggccattgtgtccgggcagggcggtgcagccgggcagcgtgagcgggtggctgaactggtcatgatggcccgggagcaggggcgggaggtgcagattatcgctgctgaccgtcgctcgcagatgaacctgaagcaggatgaacggctgtccggtgaactgataaccggacgtcgtcagttgctggaaggcatggccttcccgccgggcagtaccgttatcgtcgaccagggcgaaaaactctccctgaaagagacgttaaccctgctggatggtgccgcacgtcataacgtacaggtcctgataaccgacagcgggcagcgaaccggtacaggcagtgcactgatggccatgaaggatgccggggtgaacacatatcgctggcaggggggagaacagcgaccggccaccatcatcagtgaaccggaccgtaatgtccgctatgcccggctggccggagattttgcggccagcgtgaaagccggagaagagagcgtggcacaggtcagcggggtacgggaacaggccatactgacagaggccattcgcagtgagctgaaaacgcagggcgtgctcggacaccctgaggtgaccatgactgcactgtcaccggtctggctggacagccggagccgttatctgcgggatatgtaccgaccggggatggtgatggagcagtggaacccggagacacgcagtcatgaccgctatgtgatagaccgggtgacagcgcagagtcacagcctgaccctgcgggatgcgcagggcgaaacgcaggtggtgcgtatttcctccctggacagcagctggtcgctgttccggccggaaaaaatgccggtggcagacggcgagcgactgagggtgacagggaaaattcccggactccgcgtctccggcggtgaccgcctgcaggtggcatccgtcagtgaagatgcgatgacggttgttgtgccggggcgggctgaaccggccaccctgcctgtggctgattcaccattcacggcactgaagctggagaacggctgggtggaaacgcccgggcattccgtcagcgacagtgcgacggtttttgcctccgtcacacagatggcgatggacaacgcgaccctgaacggtctggcccgcagtggtcgtgatgtccggctgtattcctcgctggatgaaccccgtactgcggaaaaacttgcccgccagcgcagcggagaaacgccggatttcagcaacacgctgttcctgctcgatgagagctcaatggtgggcaataccgatatggcacgggcatacgccctgattgcggccggtggcggtcgtgccgtggccagtggtgacacggaccagctgcaggccatcgcgcccggtcagcctttccgtctgcagcagacgcgcagtgctgccgatgtggtcatcatgaaggagattgtgcgtcagacgccggaactgcgggaggcggtatacagcctgattaaccgggatgtggaaagggcactgtccgggcttgagagtgtgaaaccgtctcaggttccccgtcaggagggcgcatgggcaccggagcactccgtgacggagttcagtcacagccaggaagcgaaactggcagaagcgcagcagaaggcgatgctgaaaggcgaggctttcccggatatccccatgacactgtatgaggccattgtccgcgactataccggcaggacaccggaagcacgggagcagacgctgattgtcacgcacctgaatgaggaccggcgcgtactgaacagcatgattcatgatgcacgggaaaaggccggtgagctgggcaaagagcaggtcatggtgcctgtcctgaacacagcgaatatacgtgacggagaactgcgtcgtctctccacctgggagaataacccggatgcccttgccctggtggatagtgtgtatcaccggattgccggtatcagcaaggatgacgggctgatatctgaacctgcccacactggatga

SEQ ID NO: 21098 - DNA, 459 bp, Escherichia coli
atgtcccgttttgtccttggtaactgcatcgatgttatgacgcgtatccctgataacgccattgatttcatattaactgacccgccatatctcgtcggttttcgtgaccgttccgggcgcaccatcgccggcgataaaaccgatgaatggctgcaaccggcctgtaatgaaatgtaccgcgtactcaaaaaagacgcgctgatggtgagcttctacggctggaaccgcgtcgatcgctttatggccgcctggaaaaatgcgggattcagcgttgttggtcacctggtcttcaccaaaaactacacatcgaaggccgcatatgtgggctatcgccacgaatgcgcctacatcctggcaaaaggccgtccacgtctgccacaaaacccgctgccggacgtgctgggctggaaatattctggcaatcgtcatcacccgacggaaaagcccgttacagcgtaa

SEQ ID NO: 21099 - DNA, 186 bp, Escherichia coli
atgctgagtcagctgaccctgcgctttcacaaaaaactgatcgaggcactgaaaattcgtgccggccacgaaaatacctcagtcaacgccctcgccgcacgctttcttgatgatggtctgaaaacggccgctgccggcgacggttattttcagcttgtcgccgatccggaggccaccgtccggtaa

SEQ ID NO: 21100 - DNA, 657 bp, Escherichia coli
gtggaagaatttgaccgattcctagcagatctgcgtcctgttgtggatcagatgtatgccgagcacctgctgcgcccgctggagagcggctgctttgaacttacggagattccagacgcggtcctggcggaaatttttaccctgccgcggctgaataccatatttctcctggtcctgcgcgggctggactggactacagacaaagccacagccctcgcacaggatctgcgcccggtgatcccgaccgtgacggaaaccgtcgaagccggcacgcttcgcctcgagatccgcattgacggccagcatcccggcgagcgtccgggggcctggtacaatacaccccgtctgcacctgctcatcaccggccaggattttgtggtgccgtacggctgggaagtattctctgaactgctgggcctgttcacgctttatgcccgtcatcctgaagctctggcacacggccatcagggcgagcatgtaatgctctcaccccccggacacgtatcaaaagagggattcttcggtatcgacggactacggatttttatgccggcggaggcctttgagacgctggtccgtgagctcaccataggatgtgctcaaggctcgctggcggaggccctgactgggctacgcggcctttacggagatgtctga

SEQ ID NO: 21101 - DNA, 870 bp, Escherichia coli
atggtgagttttaccttactggaaaatgcgctggactctgtagagataggactagaatatttcagaaaatcccgggaaagccagaaccgacgtgattacaaacaatgcctgcttaatctcttccaagcagcagagttgttgctgaaggcagccgtttcgcgtcaggatgctggaaggattttcacgcaaaaatccttgaaaaagcattgtaaggatcctgcatgtcccacagaaagtgagctgcaccgatgccagtctgtgaagattagcgaattatgtgaacttataaaaactcatcaccggagtgaattttcggatcatgggctacagttgatgagagctgtagcacagatgagaaataatcttcagcattttgcgctggaaatcagcccacaaagcctggcgatgcagttgtctgaattgtacaaattgatctttcggcctgcgttcatcttgctacaggccgataaagagcataattcctggaactcagccgcgcgcagacaatttattgatctggaggctcattttatggagattacaaccccggatgaatatgtgcttgcactttgtcccgtctgcgaaagctggtcgcactttattgtctatgacggtgaaagttatccggtcagctctcattgtatctgttgtaatttccgtctgaataacctgcaaacatgggattttcaggagtgtccagagtgtaactggcattcagtaatctatgtacctcagtaccacgcgggagtatgcctttgtcatacctgttactacagcaaggaaggaggatttgttccaatggagccatgcaaatgcggtggattccggatggaagatcattgcagtaactgcgatccagaggaagagtaa

SEQ ID NO: 21102 - DNA, 1566 bp, Escherichia coli
atggcagctaggcaaaacattccagcacaattacgcttgaaggaaatacagattcagagcctcaaaggcatttcaaactgtacaatcacatttcctgctgaccgcaaagttactgccattatggggatgaacggctccggtaaatccacgattattcatgcccttgcctgttgttacaaaccccggaataaaacctcaaaggaaaacaacagattttcagatttctttactcctcacgatgataacaactggcgtgacagtggctttacagcccatttttacgcaggaaacctggacaatcagggcaacaaaatttcatttgtccccacagcagcaccgaatgatacctttacccaagtgtatgccaaagtcagtcgctggcagccagtatatgcacgacgtccagtcaaggagtcgctctatctgggtctgcaaacgctaggcacgttgtccgatgatctggctgcttcacgtcatgcgaaatatgtaagccaaagcttcgaacccgctaatatcaaacaaaaaatacttgaatctatgtgtcgcgtgcttgaagcggattactcagatcttatgacctgtacgaccagcagtggctacacattcagtaaatttaccaaaaacggaattacctacactgaacatacaatgggagctggggagaaacgggtttttgaagtactgaaagccgctcatgacccccttctgagacctaatggtttactactgattgacgaactggatgtacttttgcatgaaaaggcttttaaaaagctgattgaagaattgatttccatagccgaagacgccttgcttgaaattgtcttctcaacgcacagggaatctattgttcagttcaagcgagccatcaatattgtcagtattttcaatatgggaacagggattcaagctttccctagggtgtcagctgatgcgttgcgacaactgaccgatattcagcctgaaatggtcagtgttttcgttgaagatgaactggcacgcacggttatcaatgtgcttctggagcgagaagctctgaccgataaggtgaatgttgaactgttcggtgcagctgaaaactcggcggttgttctggctggactaatgcttgccggcgaggatattaataaggttatgtgtgttcttgacggcgatgttcaccgaactgtctctgagagacataaaatagtaaacaaatgcctgacagggacagataaaagagaacaacgtcgtgcggttatgaaccgcatttttgagttcagtcttgctgatttccctcaaaaaggtgccccggagtataatcataagcgctggtttgaagcgatagaccctgccactatttcggcagaggagtctgctgaatacatcaagctaagagggttttctaggtcaatcaacgggctggcagactggcatgattactatgaaaaactgaatcattttgccagaaaatccaacatcgaacataccgttctgagctacatcagcaaatactctcccgcgtgggatgattatatttcagcgatccgccaagaaattattgtcaaggctgccgaattggaatga

SEQ ID NO: 21103 - DNA, 438 bp, Escherichia coli
atgttgattctcgattgctcctcacgaactcaggcgttgcatacattatctgccgggtttggctgtccccctgaaaagctgaaaaaagtgctgctttcgctcgatcttgaaagtatctacgagcttaatcctcgccagttggttgatgcacctcagtatctgagagaatacgtctgtgcggaactgggcgaaccgggaccattcacccgggctctgtggtttcatggcacccggactttcgccggtaatacttttccggcggggttactggcgctaaatcagtcagaatccctcgccatgaaaatgctgcttgacctggccccgaatgagatggtccgtacacacctgaaggaatgggatgttccgggggcgttccggatgagatgtttcagctcagaaccggcgataaaatccactgggggccttttggccatttag

SEQ ID NO: 21104 - DNA, 177 bp, Escherichia coli
atgatgacgctactgtcagatttgcttctcgcctacaagatgggagttaaaacgctttactaccacaacaccagagatggggcaggaaagcgtgatgacgacgaaccgcagaatccactgacgcaagctgtagccgtcgagccagaagatgagtgcgacggagcctgcaaaatctga

SEQ ID NO: 21105 - DNA, 1143 bp, Escherichia coli
atgtcatattcaacgttccgtttgggtgctaatgatgcaaccaaagagcctatgttcctcggacaatctgtcaacgtggcacgttacgatcagcaaaaataccgtgattttgaaaagttgattgaacgtcaattgtctttcttctggcggccggaagaagttgatatttcgagcgatcgcatcgacttcaacacgaagctgcgggaccacgaacgtcacatttttctgagtaatctccgttatcaaacgttgctcgattcagttcagggacgtagcccaaatgcaacgctgctgccgcttatctctattcctgaactggaaacgtgggttgaaacgtggtctttctctgagactatccatagccgtagctacacccacattattcgtggcatggtggacgatccgagcattgtttttgacggtattgttacggatgaagaaatcatcaaccgagcgatcagtatctctgctgaatatgacaggctttatgggatgacatgcgagcgccagtcgttaggtgagaaggagtttgaacgtctgtacgtaaatgaatatggctgggagccataccctttgcatcgtcagcttttccgcacgttggtgtccattaatgcgcttgaggcgatccgtttctatgtaagttttgcatgtacgtttgcctttggcgaacggaagttgcttgagggtaacaccaaaattatgcgctttattgcccgtgatgaagctctgcattgcgaaggaactgaacgcatgatccgcttcatgcgtaccggtcgagaaggtttattgtggaaagagattgctgctgatgaagaaaacgtcatttacgacaccatgaaatcagtcgccgaacaagaaatgaactgggcagactatctcttcaaagacggttcgatgattggtttaaacgcggatattctcaaaacctatgtaaaataccgcaccaatctggctatgaatcgtcttggcctgaaggctttatttccagaagttaccactgatccgctggtctggatgaacaagtggttgttaaccgacacactgcaaattgcaccacaagaggcagagcaaagcacatatctggtaggtcagatcgattctaccgtggataaggcttctctaagccagtttgcagacctgtaa

SEQ ID NO: 21106 - DNA, 507 bp, Escherichia coli
gtgaatgagatttactacctgacgttacgtgaacgttattcaccaaaaccagcgcctaaatgctctgtttgtggcgaggaaatgtcaatacagcgcatatctggagcacatgttgtttatgcctgttccggtgagggtgatgacggatattttaagatagggcgtacttttgcagacgaacattatgaaaaatcacgcgtaacagtagttgatgatagtgatcccgatgtgattgcactgctggacgaactggataaaagacagcaacacatccgacgtcttgagcaggagaacgtagagatggccctaacgcttgagaaactgcgtgttgagatggccctaacgcttgagaaactgcgtgttgagatgaaggcagccaaatcaaaactcaacgagcagcgtgagtattacgaaggtgttatctcggatggaagcaagcgcatagccgctcttctttgcaaggacaatcttgtcagcaccacgaacattgaaggtgaaagaagatga

SEQ ID NO: 21107 - DNA, 324 bp, Escherichia coli
atgaccacatcgcattctgctattacccaggaaaaagccttcaacatactcgaacgactagagacgctcgctacggaggaggagatatccccggagaaactggttgagttcagccgtgtgatattgcgtcgcaagaacgatatggagcggctgacatctggcgctccatccttatcagccaggcgaacactttgttgcagcttctgcaacaaatcccagtacgccgtcaaaaagttaattgctggggacgccgtattcatctgcgacgagtgtgtggatgtgtgcaacagaattatccggggagagaaagagggatcagcatga

SEQ ID NO: 21108 - DNA, 378 bp, Escherichia coli
atgcgtgatattcagatggttcttgagcgttggggggcatgggcggctaataatcatgaagatgtgacctggtcgtccattgccgctggttttaagggattaattccttcaaaagtaagatctcgtccgcaatgctgtgacgatgacgcgatgatcatttgtgaatgtatggctcgcctgagaaaaaacaacagcgatttacatggtttattggtggactattatgtcggcggcatgacttttatggcgcttgcacgtaagcatgggcgatctgattgttgggttggcaggatgctccagaaagctgagggcgtagtggagggcatgctgatggtattggatctccgattggagatggatgctgattgttcgaaataa

SEQ ID NO: 21109 - DNA, 423 bp, Escherichia coli
gtggcaaaagtttttacacaagaagagcgggaaaaaattaaagggctgatcgtggaattcgtacgccttaacggacgaggcacgattcggcagttatcggatgaaattggtgtcagtcatgcgtctgtcggtcgtttatgcatggagctggccgccagtggtgatgtttacaattccggttacggagtattcccgtctgagcaggcgcgcaaggactggcaaaacgcccgcaaaaaactctcaagggcaaagctgaagaaaccatctgtggttgatccggaccttatctggctattaccagacggcgaaatacgccgctacgacaggcgtcagaacataatctgtcgcgagtgccggaagagcgaagttatgcagcgcatattgtcgttttatcagggtaattttcaggaggtagcgcagtga

SEQ ID NO: 21110 - DNA, 444 bp, Escherichia coli
atgagcatcagaacctacgcagtgaattgcaatgacgcatggctaaacaccgaaggtgatgacatctccggctcatacgttaagtacaaagaccatcaggaagtggttgccgctcttgaggccaagtgcgcggcgctggcggcggagaatgcggtaataaagtctgcaattccagaaccacgggatattgaggacgacaatgacaatatggatgacgtatctcttgctgaagatttcgggttcaatcatgcaatagaactgatgaggagacggattcctgaaactccggccaccgatgctttcctggctgaagtacgggcgcagggcgtggatacagctatcgagcacctgcataagaagtttaaaggaactgtgcttgttggcgtcccggtaatggcgttggagtatttagccgcagagcttcgcaaaggaggcaaccagtga

SEQ ID NO: 21111 - DNA, 750 bp, Escherichia coli
gtgagcgaaattaattaccaggcactgcgtgaggcagcagaacgtgcaattccagcaatggaacgcctgttaatgttgccaactgatgatgatttgttaagtgaacaggaacttaaagattacggtgtggatattgatgcgctcaatgccttcaaatttctgaccggaccagaaaccgtgctggcactactggatgaacgggaaaggaaccagcaatacatcaaacgccgcgaccaggagaacgaggatattgcgctaacggtagggaagctgagagttgagcttgaggaagtaaaacaacacgctgaagaattatccgaaaccaaggctgttcgtaaccaatggcggccagatatttgcccaataaccggacgtgcatttttcatgtggattgagcatccaacattggggaatgtgccgacatatggtggcccattagatagttacaccattccaacaaaggacggtgacggtgagttttcatgtgagcgttacgatcatgattttggcggttgggtagaaagcgaatgtcttgggttatatctgattgatgatagagaacaatgcagggtctacgaactggaggaacgcgttaaggaactggatgctcgggaaatatcgctcccggaacgtagcagcatgcttcatcgaacagattttcacgatgattaccaaacggtaatggcatacaaagtttctgaagtcatcgctgcaatccgcgccgctggcattcgcatcaaaggagagtga

SEQ ID NO: 21112 - DNA, 264 bp, Escherichia coli
atggcaactttaacaaaaaaagaacgggcatggttgaacgaattacaggacgttcttgatcgctgcccatcaccgaaaaaaattggtttttacaccattggcgataaaagcatttacctgtatgacctgcgccgcatggatgaaatcatggaggctcttgataatcgttcgtcgatggattggtgtgttgctgttcatgatatgaatgcagggtttgatgaaaagattttgttcccctcatcagttgaaagcactgcgggttaa

SEQ ID NO: 21113 - DNA, 357 bp, Escherichia coli
atggaaataaaaccagaggatgagttaagcaatatcgttttatttccggtaaaagaggatgaccctcgtaatcaggttaattttctttatgagccatcggaaagaccatattgtcatcacgcctctgtccgggttgacgaaaaagagcgtcaggtccgctgtaaaatctgcggtgcagttgtggaaccatttgactggatgctctctgtggcgaaaagagaaaccagactggcagatgatgtaaggctattgcgccaggaggaacaggaaaggcgaaaaaatatagaaaagctaattcagattgagcgtaacgcgaaagcgcggatacgcagggcgacaaaatccagaactgaataa

SEQ ID NO: 21114 - DNA, 249 bp, Escherichia coli
atggcttttcgcatagtctatattccagctgcaacagttactaatgatattgctatatttgcggatcatcttgaatcttttttgtctgaaaactgggtagaatggggtaaggcctgcaacgaaattgaagcacttacaggaatcaatctctcaaaaaatcaactagcttaccgaacagcaactatcaatgctaaaggcaacgtaccagaaatgctcgagactattcttgctaaatctgctgggcgataa

SEQ ID NO: 21115 - DNA, 228 bp, Escherichia coli
atgccagcttatgctaataaaggcggtaattcgggtatagtgttttatgagattactccagatgctatcacagtacagtttaaagatggatggaaatacgtttacgattctacaaaaccaggggcttcaacggtctctaggatgaaagagttagcccaggctgggcatgggctaaatagttttattagtagtgtggttaagaaaaatttctcacgtaaatacctttaa

SEQ ID NO: 21116 - DNA, 873 bp, Escherichia coli
atgaatccgtctgatgccattgaggcaattgaaaaaccgctctcctccctgccttactcgctttcccgtcacatcctggaacatctgcgcaaactcacccgtcacgaacccgtgattggcattatgggtaaaagcggggccggtaaatcctcactctgtaatgcactgtttcagggggaggtcaccccggtcagtgatgttcacgccggcacccgggaagtacggcgcttccgtctgagtggccacggtcacagcatggttatcactgacctgcccggggtgggcgagagccgggacagggatgcagagtatgaggccctgtaccgtgacattctgcctgaacttgacctggtactgtggctgattaaagccgatgaccgtgccctgtctgtggatgagtatttctggcgacacatcctgcaccggggacatcagcgggtactgtttgtggtgacgcaggccgacaaaacggagccctgccatgaatgggatatggccggtattcagccttctcctgcacaggcacagaatattcgcaaaaaaacggaggcggtattccgtctgttccggcccgtacatccggttgtggccgtatcggcccgcaccggctgggaactggatacgctggtcagtgcgctcatgacagcgcttcccgaccatgccgccagtcccctgatgacccgactgcaggacgagctgcgcacggaatctgtccgctctcaggcccgtgaacagtttaccggtgcggtggaccggatatttgacacagcggagagcgtctgtgttgcctctgttgtccgtacggccctgcgcgctgttcgtgacacggtggtctctgttgcccgtgcggtatggaactggattttcttctga

SEQ ID NO: 21117 - DNA, 297 bp, Escherichia coli
atgccatcttatcagtttctggctgtagcacgcattcagttcaggcagcgtgatattgtttatttcggaaagcaggacataggtggtttttccttcctgcacgacagagagcctgagttgagatgcaagaatgttcagcaggacgttcagctttttcctgttccggaaccggcccgggccacactggagaatataatttttcctgacacggggcgggcattctccgcggcactcctcaatgagccagtcgagcagctcccgggcgtcctgcagctgcagttcagattcatcaggtaa

SEQ ID NO: 21118 - DNA, 1578 bp, Escherichia coli
atgattttgattacttcggctgcctatatttctaatgaattgagaattgagtttggtgttatccctccatgtttattacccattggtaatcgtactttattagagtatcaagcagaatcaattcgtaaaatgagcaacgagaaaatttttttgactttgccagaggattactgcctatcaaaatttgaagaacgattactagactcgctaaatatacgagccatctacttatcaccaaatttaagcttaggtgagtctatttatcaagcacttgatagtataggtgattatactttttcatccgatggtctcaagctgttacatggtgatactctgattaatgatttaactaatcagaatgatattattgctgtggcaccatcttcagatgattatttttgggaaaaagaagaacatacatatgagaaccttgcctggtgcggttattttacattttctatgcctaatatatttaagggctttttagaagcatcaagattcaattttgtacaagcagttcgttcttatgatgaagtaatccacctcagtcgtatgaaaccaaaaagctgggatgatctagggcatttaaatacttattttatttctcgatctaacattactactcagagagcatttaatgaaatgcgtattcaacatgggatggtatggaagtcaagcaaaaacaacaaaaaaattcttgctgaaacgaattggtataaaaaaatcccagccttactaaaatcttttacacctcagttgatcgaagacggtatttacaacaaaactggaaattatttctacacattagaatatttaccatatatcccattaaatgaaatatttgttcacggcaaaaatccagattttttttggaggaaaattttcaatattatcaaagaatacttattcaaagctaatagtgcactgacaaatattagtcaaaataatattggtgaaaaaatagccattgattctgaagcgttatataggactaaaacatttgttagactcacagagtatgccgttgagaataatatatcaatcgataagcctgttttttacgataacagaagattaccttcattacacgatatagctagtgattgtatagaccgaactactcagctaccaattgtaccttcaattcttcatggggatctttgctttagtaatattcttttcaactctcgtcttaacagcattaaagtgttggatcctcgtggtataagccataatggtgaagagaccattcttggtgaccaaaaatatgatctggcaaaactctgccattcagtaatagggctttatgattatgtaatttccggaagatatcatttagatggggatctatttaataatgctgttataaggtttgatatagatacacgaattaagagtattcagcaagaattttatgaatataaatttttgtctaatattagtgttggagaaataatgcctcttactactttgctatttttgtctatgctgccccttcatagcgatcgtccggatcgtcaaaaagctatgctgtttaatgcactgcggatatattctacatatgtttacgatgtttaa

SEQ ID NO: 21119 - DNA, 1281 bp, Escherichia coli
atgattacgggcttttcgccatcatataaaaaaattgttattggcgacgatgaaataacaatgcctggcgacaagattgtaaagtttaaacgcgcatcgaaagcaacttacattaataaatctggtgtgctgacagaggctgccattgacgagccacgatttgaacgtgatggcctgcttattgaggggcaaagaactaacctgctaatcaattcaacaaatccgactaaatggaacaagtcgtcaaatatgatcttaagtgcatcaggtgtagatgatttcggattccagtacgcaaaatttacattaaaaccagaaatggtagggcaaatttcagcgattaacatagtaaccgtttccggcagtaaaggttttgatgtaacaggcggagaaaagtatgtaaccatatcatgcagggtgcaaagtggcactccaaatttaagatgccgattacgatttgaaaactatgatggttctacctacacattcttaggtgacgcttacttaaatacgacagatttatctattgataagacgggtggtgccgctaatcgcattactgcaagggctgttaaagatgaagcaagcaaatggatcttttttgaggcgacaattaaggcacttgatacagaaaatatgataggtggaatggttcagtatgccccggcaaaaggagtgggcactggcgcggatgattatatttatattgcgacccctcaagttgaaggtggggcgtgcgcttcatcgtttattataacaggcgcatcccctgtaacacgcgccagcgatattgtaacggtccccatttctctaaattggtgcaatcccgctattagttcattagcagaagttaataccaattgggatgaatcgccaaacaaagaaggtagcgcacgtattcttaatatttccactacgggagatacaactgaaattgcagatgaaagttatatgtatttggggtatacatctttgggagcacgcgcaatcattacaaatggtaaaggcactaaaatagaatataaaagcgttatagaacgaccagagagaaaaagcattatcggctttagattcacagaaagtcgagaattgtgtgttgtggttaacggtaatattggtgctaaggtagtttctccttataaaaaacacaaatatacaggaggcttcattaatattggtggtcaatcatcatccggcaaccgtcacctatttggacacgttcgaaatctgcgtatttggcacaaggcattgactgatgctcagatgggggagtcaatctaa

SEQ ID NO: 21120 - DNA, 405 bp, Escherichia coli
atgaccaccaggtccgcgatcttcgccgtcctgacatctgcaacaaacgtcacgttctggctcgcggtgctgttgttgatggttgcagtgaccgcactgattccggcggtctggctggtgacagagatctccaccgtcccgtccggctgcgtggtgaccgtcggagcagtcgtggcaccgttgcctgccaacacgctgaccgtctgtccggtaagcgcattaccgaacgcatcggtcaccctcgcccgcagcgtgttcgccgtcgaaccgtctgccaccgcgttatcctggctaacgaccagatccgctatcttcgccgtcctgacatccgcgacaaacgtcacgttccggctctggctgctgctgttgatggttgcagtgacggcactggtgcccgccgtctga

SEQ ID NO: 21121 - DNA, 828 bp, Escherichia coli
atgtttaacaaagttttgataggtttaaggagtcatccagaattaataattcttggattaatggtgatgattatcgccatgctcataattccattgcccacctacttaatcgattttttgattgggctgaacttaacattggcaatacttgtgtttttaggatcattctatgttgataggatcttaagtttttcttcattcccatcaattcttctcatcacaacgttatttcgtttggcgctggcgatcagtaccagtcgacttatacttcttgaggcggacgccggagaaattataacgagttttggtgaattcgttattggagatagcctggtagttggttttgttattttctccattgttactattgttcagtttatcgtgattactaaaggttcggaacgtgtggctgaagttgctgcccgcttttcgcttgacggtatgccaggtaaacaaatgagtattgacgccgatctacgcgccgggatcattgatgcagatttagcaaaagaacgtcgtagcgtattagaacgagagagtcagctgtatggttcctttgatggtgcgatgaaatttatcaaaggtgatgctattgcaaacattattattatctttgttaatattatcggtgggctatcagtaggagtaggccaaaatggaatggatttctcgacagcgttgaccgtctacacaattcttaccgtcggtgatggtcttgtttctcaaattccagctttattaattgctattagcgcagggtttatcgtaacgcgcgtgaatggcgatagtgactgtctcttatacacatctgacgctgccgacgaatag

SEQ ID NO: 21122 - DNA, 675 bp, Escherichia coli
gtggtgagaacgccggagggggaaagatattttccctgcgtgaatatctccggtgagccggaggattatttccagatggctccggaggactggctgcgggcagagatgcagggtgagattgtggcgctggtccacagccaccccggtggcctgccctggctgagtgaggctgaccggcggctgcaggtgcagagtgatttgccatggtggctggtctgccggggggcgattcataaattccgctgtgtgccgcatcttaccgggcggcgctttgagcacggggtgacggattgttacacgctgttccgggacgcttaccatctggcggggattgagatgccggattttcatcgcgaggatgactggtggcgtaacggccagaatctctatctggataatctggaggccacagggctgtatcaggtgccgttgtcatcagcacaaccgggtgatgtgctgctgtgctgttttggttcatcggtgccgaatcatgccgccatttactgtggtgacggcgagctgctgcaccatattcctgaacaactgagtaaacgagagaggtataccgacaaatggcagcgacgcacacactccctctggcgtcaccgggcatggcgcgaatctgcctttacggggatttacaacgatttggccgccgcatcgacctgcgtgtga

SEQ ID NO: 21123 - DNA, 339 bp, Escherichia coli
atgccggatttttatcgcggggatgactggtggcgtaacggccagaatttctatcttgacaatatggaggcgactggtttttaccgtgtcgcactgacagaggcgcagccgggcgatgtgctgctgtgctgttttggttcatcggtgccgaatcatgccgccatttactgcggcgacggcgagctgctgcaccatattcctgaacaactgagcaaacgagagaggtataccgacaaatggcagcgacgcacacactccctctggcgtcaccgggcatggcacgcatctgcctttacggggatttacaacgatttggccgccgcatcgaccttcgtgtga

SEQ ID NO: 21124 - DNA, 339 bp, Escherichia coli
atgccggattttcatcgcgaggatgactggtggcgtaacggtcagaatctctatctggataatctggaggccacagggctgtatcaggtgccgttgtcagcggcgcagccgggcgatgtgctgctgtgctgttttggttcatcggtgccgaatcatgccgccatttactgtggtgacagcgagctgctgcaccatattcctgaacaactgagcaaacgagagaggtacaccgacaaatggcagcgacgcacacactccctctggcgtcaccgggcatggcacgcatctgcctttacggggatttacaacgatttggccgccgcatcgaccttcgagtga

SEQ ID NO: 21125 - DNA, 282 bp, Escherichia coli
atgaaagatttaacactcaaatttgaagacagggccgacttttcggcctttatggagagtattggctattatgatgacgagtcgatgcaggatgatattcttatcgacgtgataggtaacgtgtacaaagaaaccggagaactgactgaagatggcgaaccggtatgtgttaaggaagacggatattttgtaaacgtgcgcatcattaatgattcgcaaatatcgtcattattcgatgaatacgtggttgctgttgagcatcaacttcgtggctggatgtga

SEQ ID NO: 21126 - DNA, 324 bp, Escherichia coli
atgccaatcaaaacctactcatcagggatgagatcacggcttggttttggtctaggcatggcatttaattttgattattatcttgttgatgaaattactgcagttggtgatgctagatttaaagaaaaatgtgctaaactttttaaagcaaagcattctgaatttaatttcattatggtttcacatagcttgcattccttaaaagagttttgtgatgttgctatatatttaggtagaaacaacatggtttactattttgatgatgttgattatgcgattaaacaatatttgattgatgaaaaaataaatccacggtcaaattaa

SEQ ID NO: 21127 - DNA, 147 bp, Escherichia coli
atggtcggcattaacacgggcgcgatttcaaacgaagttgctccgtttggtggcgtaaaacagtcaggtctaggtcgtgaaggttcaaaattcggcatcgaagaatatgtcgaaatgaaatatctctgcgtagacttatctgagtaa

SEQ ID NO: 21128 - DNA, 1770 bp, Escherichia coli
atgccggaggcactgcgccgttttgagctgatggtgaatgaagtggcacgtcatgccggagcatcatcacagagcgcagcggcagcaaagaaatccgaaactgcagcggcatcatcgaagaacgcggcgaaaacctcagaaacgaatgcagctaacagcgcacaggtggcagcggcctcgcagactgcatcggcaaactccgcgacagcagccaaaaaatcagaaaccagcgcgaaaaatagcgagacagccacaaaggccagcgaaaaaaacgcaaaatccagccagacggcagcgaaaaccagtgagacgaatgccaaagacagtgaagccaacgcaaaggtgagcgaaacagcggcggcgaactcggcgaaagcatcggcagcaagccagacggcagcaaaagcaagtgaagatgctgccagagaatacgcaaaccagacagcagagccgtacagatatgttttacagccgctgccggatgtgtggataccctttaatgattcgctggatatgattacgggctattctccgggttataaaaaagtgaagattggtgataatgtggttcaggttgccagtgataaacaggttaatttcagtcgcgcatcaacggcaacatatatcaacaaatctggcgaactgaaaacggcggaaattaatgagccacgatttgagtgtgatggcctgcttattgaggggcaaagaacgaacttcttccagaacagtacagacccttcgaagtggaataagtcaacttcactggacgttacagaaacaggcacagatagtttcgggtttaattatggccggtttgtcgtacaggattcgattgttggtacaagtaaagcgcataccattatcggactgtattcgagtaccggaggggttgatacttcaggggacgaaaagcatgtaactatatcctgtcgggtaaaaagtgaagttgataatatcgccgttcgtattttatttgaacattatgatggggaggtaaggacatcaataggagcagcaaacctgaaccttaccacccgcataattagcaagacaggtcagacaagccgtgttacagcaaggtctgttaaggatgatgcaactggctggatattttttgaggctacattaaaagcagatacaacagaaaatacggttggtggttttgtccagtattctccggatacagggcagatggttgcatcaggggattatctcgatgtaaccactccacagattgaggctggtacaggcgcatcatcttttattgttacggggacggcaccggtaacgcgggcaagcgatatggttacagttccgattaagaataatctttataatcttccttttacggttctttgtgaggtacataagaactggtataaaacgccaaatgcagcaccgcgtgtttttgacacataccggcatcaggcagatgcggggatcgtaatggggtttggttcatcaggtgggtacgacggttttccgtattgtgatataggtggttcagaccgacgaataaatgaaaatgccgggctggaaaaaatgcttattggtatgcgggtaaagtccgaacggtccacatgtgtagtcagtaacggtaagttaagcagcgaaactaaaaccaaatgggaatatatccggagtacagcaaccattcgcattggtggacaaactacagcaggattacgccatttatttgggcatgtgaggaattttcgtctctggcataaagagctaacagatgcgcagcttggggaggttgtggagtga

SEQ ID NO: 21129 - DNA, 384 bp, Escherichia coli
atgacaatccttatatttattgtcagtttgttaggggctatcgcaattggcgttcccatcgcctgggcattattactgtgcggcatttcattgatgttctggatggatatctttgatgtgcaaattctggcacaaacgttggtaaatggcgcagacagcttctccctgttagccatccccttctttgtactggcgggtgagatcatgaacgcgggcggcctgtcgcaacgtatcgtcgacttgccaatgaaactggtaggccacaggccaggcggtctgggttacgtgggcgtgctggcagcgatgatcatggcaagcctgtccggttctgcggttgctgataccgcagctgtcgcggcgctgctggtgccgatgatgcgctag

SEQ ID NO: 21130 - DNA, 135 bp, Escherichia coli; identical to SEQ ID NO: 9306

SEQ ID NO: 21131 - DNA, 201 bp, Escherichia coli
atgttccaggaattgccagtgaaattttgcgcgggcgcgacgttcatcaccggcttcaatggcagtggctacagcgactgcaccttcttcctttattgcctgttcgtccggaatggcggcgcaaataaagactttactcattttgttttacctcattacagatttaagggtgaacaaatccctgccattgctggcatataa

SEQ ID NO: 21132 - DNA, 819 bp, Escherichia coli
atggcgaagcccttcagcacccacgctgaaatccacggtctgcgtctccagcagttccgttttaatcagccacagcccggcgcggtgtgcctgcccccggctggtacagccaaaggcatccatcttcgtgacgttacgaccgtaacgggcaatggcctgcgtgtcctccacaagctctgtcgccgtctcccagccgttatccgggtcaatccagttcacctcaacagcattatggcggtctttcagggcgctgaagctgtagcggaacggcgcaccatcatccggcatcaccacattactgcggttataggtccacaccttatccgacggtcggtcctgcacgaacgtcagcgtctgcccgttccataccggcatacagcgcatcgccgagcagaaatcactgagaacatcccacgccttgcgctgtgtggtcaggtaggcattacaggtgatgcgcggctccgtgccaccaaagccatccggcaccgactggtcgcaattctggccgatgacatacagcgcccatttgtccacatccgccgcaccgagacgcttccccatgccgtagcgcggatgggtcagcatatcccacagacaccaggccatgttgttgctgtatgctggcttaaacgttccgtcccagataccgctgtattgccgcgtctgcgggttatagttcgacggcacctgcagaatgcgcccgcgaagatgataattacggctcacctgctggctgccgaactgttccgagtccacctgcacgccgaccagtgccgtgttcgggtagcactgtttcacatcgatgatttcggtgtatga

SEQ ID NO: 21133 - DNA, 432 bp, Escherichia coli; identical to SEQ ID NO: 9330

SEQ ID NO: 21134 - DNA, 222 bp, Escherichia coli
atgaaaatcatcacccgtggtgaagccatgcgtattcaccaacaacatccaacatcccgtctttttccgttctgtaccggtaaataccgctggcacggcagtgctgaagcgtataccggtcgtgaagtacaggatattccctgtgtgctggccgtgtttgcagaacgccgtaaggacagttttggtccgtatgtccggctgatgagcgtcaccctgaactga

SEQ ID NO: 21135 - DNA, 210 bp, Escherichia coli; identical to SEQ ID NO: 19699

SEQ ID NO: 21136 - DNA, 336 bp, Escherichia coli; identical to SEQ ID NO: 12930

SEQ ID NO: 21137 - DNA, 1134 bp, Escherichia coli
atgagtaatccgatcctgtcctggcgtcgcgtgcgggcgctgtgcgtcaaagagacacggcagatcgttcgcgatccgagtagctggctgattgcggtagtgatcccactgctactgctgtttatttttggatacggcattaacctcgactccagcaagctgcgcgtcgggattttactggaacagcgtagcgaagcggcgctggatttcacccacaccatgaccggttcgccctacatcgacgccaccatcagcgataaccgtcaggaactgatcgccaaaatgcaggcggggaaaattcgcggtctggtggttattccggtggatttcgccgaacagatggagcgcgccaacgccaccgcaccgattcaggtgatcaccgacggcagtgagccgaataccgctaactttgtgcaggggtatgtcgaagggatctggcagatctggcaaatgcagcgcgcggaggataacgggcagacttttgaaccgcttattgatgtacaaacccgctactggtttaaccccgcggcgataagccagcactttattatccccggtgcggtgaccattatcatgacggtcatcggcgcgattctcacctcgctggtggtagcgcgagaatgggaacgcggcaccatggaggctttgctctctacggagattacccgcacggagctgctgctgtgtaagctgatcccttattactttctcgggatgctggcgatgttgctgtgtatgctggtgtcggtgtttattctcggcgtgccgtatcgcgggtcgctgctgattctgttttttatctccagcctgtttttactcagtaccctggggatggggctgctgatttccacgattacccgcaaccagttcaacgccgctcaggtggccctgaacgcggcttttctgccgtcgattatgctttccggctttatatttcagatagacagtatgcccgcggtgatccgcgcggtgacgtacattattcccgcacgttatttcgtcagcaccctgcaaagcctgttcctcgccgggaatattccagtggtgctgatagtgaacgtgctgtttttgatcgcttcggcggtgatgtttatcggcctgacgtggctgaaaatcaaacgtcggctggattag

SEQ ID NO: 21138 - DNA, 660 bp, Escherichia coli
ttgctggtctggcgcgataacgaagaacatcgcgatgatatcgaacgtcactatctgaaaatgctcactcaggcgcggcgggaagtgattatcgccaacgcctacttcttccccggctatcgttttttacacgccttgcgtaaagcggcacggcgcggggtgcggatcaaactgatcattcagggcgaaccggatatgccgattgtcagagtcggcgcacatttgctgtataactatctggttaaaggcggcgttcaggtgtttgagtaccgccgccgcccgctccacggcaaagtggcattgatggacgatcactgggcgacagtagggtccagtaatctcgatccgctcagtttgtcactgaatctcgaagcaaatgtcatcatccacgatcgtaattttaaccagacgctgcgcgataatctgaacggcattatcgccgcagattgtcagcaggtcgatgagaccatgctgccgaaacgcacctggtggaacctgaccaaaagcgtgctggcgttccactttttacgccacttcccggcgctggtgggctggcttccggcgcacacgccacgtctggcgcaggttggtccccccgcacaaccgacaatggaaacgcaggatcgggtagaaactgaaaacacgggggtaaaaccctga

SEQ ID NO: 21139 - DNA, 1239 bp, Escherichia coli
atgattgacagccaggttcgcgatgcgacagctgcgtatatgcgtggcgttgaatttcctaacccacctggtgaggctgattttattgcagcttatggagtcagagaaggaaaactgcgatataccgagttcagaaatacgcaaatcgccggacagtatataggctctttccgcaacatgccgacaagcagcattacagcatatgttgagcaattacgcccggatactggtgagacaggggagggttatgcggcacgagccgctctttatgacaacgttgtgtcggctgcaagtcaggtgataaagcagcgacaggctgatcctgtacagttctctcttgccgccggacaggcaaagcctatcgacatgagcaataaggataactttggacagagcgttgccttgcgtgctgctcaggtcagtgaccttgctaagtcatatggcactccactgacgttcttttccaaagacgaggccaatcagatcggtgttttctttcgtgatgcgcccgtttcccaacaggcagcatatctcgataccatcaggcagagcactggtggtgggcaggtgtatatgtcagcactacagcagatcagtgccaacgctccatctgctgccgttgccgggatactgatggataagccaggtggtattttggcagaaaaaaactggtttaatccggatgtttccgtgtctcctgaaaccgctgcgcagacaattcttgctggcgcggcggctcgtaaaggtactgatgacgcgaaaggtattccgatgcctaaagatgctgatctccgccttgagttttctgacatggtgaaggatgcatttgctggtgatgctcagggggcatcaatggcatacgagatcgcaaaggactattacgctggtgtgatggcgaaaaaaggcgtggtatcaggcgaaattgacaatgatatctggaaacaggctgttaacgtagctacaggtggcgtgcatgactataacggaatggggaatgttcttttgccgtggggaatgtctgcagagcaattcgataagcaggttaatcaggcttggaatgaacaagttgttggcacagggataaaaacaccgcctggtcagtatggtttgcaaagttacggcgatagtcagtacctggtgaaacttggtactggttatctgctaaaagatgatggttctcccgttgttcttgatctgacacagaagcgtcagagattctccggagatattccgcaatga

SEQ ID NO: 21140 - DNA, 645 bp, Escherichia coli
atgcaaatgattacctcgcgacaaaacagattattacgattccttttacctcgaagggaatatacgactattgttacgattgccggctatttaaatgtttcggaaaaaaccattcaacgtgatttacgtttacttgagcaatggctgggacaatggagaataaatgttgagaagcgtgctggcgcgggtgtgatgttaagtgcggagaatattgctgatttgctgcatcttgatcatttgttggtggcagaatgtgaagagattgatggtgtaatgaataatgccaggcgcgttaaaatagcgtcgcagttattaagtgaaacaccgaatgaaacgtcgatcagtaaattgtcagaacgctactttatcagcggagcctctattgttaatgacctgagagtaattgagtcctggcttgcgccgttggggttatcgttgatccgcagtccaagtggtacgcatattgaaggtagtgaagggcaagtccgacaggcaatggcattactgattaacggcattattaaccataatgagccgcaaggtgtcgtgtattcacgtctggatcccggaagctataaagcattagtccattattttggagaagaagaggtgttatttgtccagtcattgttactggatatgtaa

SEQ ID NO: 21141 - DNA, 1308 bp, Escherichia coli
atgtgtaacgctctgaccgttacaaaaagagaaagcgccccgttgccggagcgcctttgtgaacgaatagcctactgcgccatattgcttactgtctacgaggcagattatagcgttgtggtcgcacagagtgaaggcgctgatcaccgttactacagcacgccagaaatgcagaatattttgctgcaaaatgtcgttggtcacactgtccggaaagcaaaaaattttgctggtggcgcgactgatgcgattttgtcaggtcgccaggtgctgatcaatctgatgtctgatttcgttctggataaaacaaaggcgaccgcagagggccgccagtgggaaagctacatacttgaacgcatcgccaacaatgccagatttgcggctggtgggcaatgtgtcagctttgcaccaatgactctatgtttaactgagggtcattatggtgaatatgctggcttgctggtgggctattcctgctctttaacattgccatgccgcgatgttttacaggtatgcgaccccatttttgtgcgcctgtactctttaaggaatttctcaaggataaacgcacagggcgcgaatctgtttgactcatgctcgtacgctatctttctgcgctgtcttttccgtgccggtgatggtgtattggttgattctttgttggtcatggcgcagccctgtaaaacgatgcaccgtagttcctcacaccacggcgctggtgatggttactcctgttctttggccttgcggcgctggcggtattcaacttctcgctttaatgctgctgttacaaactgccctgtactttcaccaggcatttttaccgcctcaacattgttcataacttcatgcggaacccttgccgcaactgtttgtgattttgcgtttactgcttttgtcgccatgttgtgtaccccttacaaaaaacaaatgcagtatgcaggaaaaaaaataagtgttcaacacttgacgtgtttaacacctgggcttaaattggtgttcaacaccttgttgatgcaaggtgcagaaacgacaacgccccgcagtggtggcacacatgcagggcgtctaaccaccaacgatagcaagagtatcgaggtagctatgagaaatcataccacacacccgcaagggcgggactcgcacaacctgaataaatacatctggcgttttatcgccctgagcacggcacaaccgcgcgtaattcacatcgaggccaccagcgaacaggaagcacgccagcaatctcctgatggctgcgtgatggtattcgccgcccgtattcgccaggaggtggaacatgtgtaa

SEQ ID NO: 21142 - DNA, 234 bp, Escherichia coli
atgcgtgatgatcgttttaattccctgaaacgggaatttgatggcgcaccggaagatgcagcgggcgcattgttgagcgttgctgacatgatgaaagctgcatattttcttatcaataccagtggctacaagtcagagggtgaaatgattcttagtattgcgtcggactatgcggaatatgtggcagagacgcgttacagaagaaaattcacggaggatgtaagccatgcataa

SEQ ID NO: 21143 - DNA, 528 bp, Escherichia coli
atgttgatgagtaaagccgaatacgccaaatacaaaggcgtaagccgccagacagtttacgactggatcgagaaaggcgaagtgatcatgtctggcaaaaaaattgatgtggaggcgacagagcagcggaacagcccaccggcacaggggaaagacaccgtttctgaaatgtggccagaaagaacgctggaaatgacgtggggcgagttctggaaagcagttaaggccagagatggtataatccctgcgccagtaacggacgacgacatacagcaacgtgtgctggatgcagccggggaattagactgggaagtgcaatttcttgatgatggcgggatttggatggatgacggcgatgctgagttttatttcgagcaatatgatctcaggcagaatgccgaactggtgattggtacgctgcgacgtgaggtctgttatgtggctgatgcttgtcctgacgagctggataactggagcgaagccggactaaacgccctggctgaatgggaaaaatcagaccatcaatga

SEQ ID NO: 21144 - DNA, 828 bp, Escherichia coli
atgataaacttagatatggatgttgtggttggacatgggcagaacgattttgaagaattagaaatgaattccggcataaaggtttttgctggagcttctgacatcacccaaattacaacaagcactattttagatgattcagtccccaaaaaatcaacctctatacatgggcttaggaatatgttcaaacatacatttgatggatcgtttggacaaaattttgaacttagaattgatgatcctgaaaagataaaaagatttaatgaaattggcaggggtgttttttttgatgttatgtcatattacatctctaaaggaatgggaatagctcaccatcttaagagccagaaagcaatcgacttagtagagcgtcttaaaccgcttgaaaaacaacttttgataagaattcaggaacctatacagaatttacataaaacagttgagaagcaaaaatataatgtacttctgagaagaagaacaccaactaaaaaattagttgttgctaaaatggatacgcagacgctcttcaatatcaatgtagagcatgaatctgctcaaccagtagaagaaaatgttattataactaggtttaatatgttaacaggaactggtcgattgttattagatagacagtcagattcaattgcctttagacaccatcttaattgggaacatgtattgcagtctcagaaaaataagttttcaaggaatcttgataggaataacagaggtggtaaagacgcttttatacctataaccatttctgcttatgagttgcgcgatcatattggagagctcaaggcttatataattagagaaatattgtaa

SEQ ID NO: 21145 - DNA, 780 bp, Escherichia coli
atgaagatgccctcaatcaaagttatttcacttatattaatagctattgtatggtatttttacttttctcatttcaatcattgggatagcccgttagatatctttaatgctagcaaatggatgggtttttccaatgataaaggtgattggggcactttcggggattttgtaggaggtgtgcttaatcctatcttgaccttcattacaattgttatgctcattaattccttgaaacttcaacgagaagcaaacgagcaactaattaaagacgaaagaagacaagagaaagacgttcttctaaaacggtttgaagacggtttttataaccttatctcttcagaaagagaggagtttagttgttttactattaacattaacggaaaagaataccgctcatctgctgctgttagtgaattggaagaggcaatatgggcttttattgagaaacaaatagatgaaaaaggagcttgcgaaattgaggatgttaaaaattacataaataaaattgatgaggattcatctatggcaatattttccatggtgcgatgtgtatatgttgtttttaaggttgttaaggataaatgccctgaagaacatcaagattactacttagatatttttatgaatatgttaccagttaaactggtaaatttagttgctattgtgtctgtgtatatggactggaaaaacgtaaaatatattattgatggtggaaaaggattttcggataatgaagcagttaaagaatatattaatacttggaaggagtttcatgaataa

SEQ ID NO: 21146 - DNA, 342 bp, Escherichia coli; identical to SEQ ID NO: 4967

SEQ ID NO: 21147 - DNA, 138 bp, Escherichia coli; identical to SEQ ID NO: 16164

SEQ ID NO: 21148 - DNA, 699 bp, Escherichia coli; identical to SEQ ID NO: 19215

SEQ ID NO: 21149 - DNA, 744 bp, Escherichia coli
atgacacagactgaatcagcgattctggcacatgcccggcggtgtgcgcctgcggagtcgtgcggcttcgtgataagcacgccggagggggagcggtatatcccttgtgtgaatatttccgcggagccggaggcgtattttcgtatcgcaccggaagactggctgcgggcagagatgcagggggagattgtggcgctggtccacagtcatcccggtgggctgccctggctgagcgaggctgaccggcggctgcagataaaaagcgcactgccctggtggctggtctgccggggtgatattcacaaattccgctgtgtgccacatctgacgggacggcgctttgagcacggggtgacggactgttacaccctgttccgggatgcataccatctggcggggactgagatgccggattttcatcgcgaggatgactggtggcgtcacggtcagaatctctatctggataatctggaggccacagggctgtatcaggtgccgttgtcagcggcgcagccgggcgatgtgctgctgtgctgttttggttcatcggtgccgaatcatgccgccatttactgtggtgacggcgagctgctgcaccatattcctgaacaactgagtaaacgggagaggtattccgaaaaatggcaacgacgaacgcattctgtctggcgtcaccgccactggcacgcatctgccttcacggggatttgcaacgatttggccgccgcctcagcctgtatgtga

SEQ ID NO: 21150 - DNA, 216 bp, Escherichia coli
atgtaccagatggaaaaaatcacaacaggtgtgtcatacaccacgtcagcggtgggaacgggctactggttcctgcagttgctggacagggtttccccgtctcagtgggcggcaataggcgtgctggggagtctgctgtttgggctgctgacatatctgactaacctgtatttcaaaatcagagaggaccgtcgtaaggctgcacggggagagtaa

SEQ ID NO: 21151 - DNA, 780 bp, Escherichia coli; identical to SEQ ID NO: 5300

SEQ ID NO: 21152 - DNA, 216 bp, Escherichia coli; identical to SEQ ID NO: 11727

SEQ ID NO: 21153 - DNA, 654 bp, Escherichia coli
atgagtaataaatattgccaggcgctggcggaactgcggaacaaaccagcccatgaactgaaggaagcgggcgatcagtggcgcacgccggacaacattttctggggaattaacactctgtttggcccgtttgttctggatctgtttactgacggtgataacgccaaatgtgctgcgtattacacggcggaagacaacgcgttggcgcatgactggtcagaacgccttgcggagcttaaaggtgctgcctttggtaatcccccatacagccgcgccagtcagcatgaggggcaatacatcaccggcatgcgttacatcatgaagcatgccagtgccatgcgtgataaaggcgggcgctatgttttcctgatcaaagctgccaccagcgaagtgtggtggccggaagatgcagatcatattgcttttattcgcgggcgtattggttttgaactgcctgcctggtttatcccgaaggatgagaagcaggtgccgacaggcgctttcttcgctggtgctattgctgttttcgacaagacctggaagggaccggcaatcagctacatcgggcgcgatgaacttgaggcatgtggtgaggcgtttctggcgcaggttcgccagcaggcggaaaaactggtcagggagatggcggcatga

SEQ ID NO: 21154 - DNA, 180 bp, Escherichia coli
atgaagattgagcaggaagtgcttaccacctggcccgcggaggcaatttctcatgctgaaaacgtggtgtaccggctgtccggtatgtatgggtttgtggtgaatgatgcccctgaccaggcagaggactccgggcctgcagagcctgtttctgcgggaaagtgttcgacggtgagctga

SEQ ID NO: 21155 - DNA, 261 bp, Escherichia coli; identical to SEQ ID NO: 5351

SEQ ID NO: 21156 - DNA, 261 bp, Escherichia coli; identical to SEQ ID NO: 5349

SEQ ID NO: 21157 - DNA, 279 bp, Escherichia coli; identical to SEQ ID NO: 4619

SEQ ID NO: 21158 - DNA, 312 bp, Escherichia coli; identical to SEQ ID NO: 12872

SEQ ID NO: 21159 - DNA, 432 bp, Escherichia coli
gtgattgcacagtattatgaattcctgcgcctcggtcgtgaaggctataccaaagtacagaacgcttcctaccaggttgctgcttatctggcggatgaaatcgccaaactggggccgtatgagttcatctgtaccggtcgcccggacgaaggcatcccggcggtttgcttcaaactgaaagatggtgaagatccaggatacaccctgtacgacctctctgaacgtctgcgtctgcgcggctggcaggttccggccttcactctcggcggtgaagccaccgacatcgtggtgatgcgcattatgtgtcgtcgcggcttcgaaatggactttgctgaactgttgctggaagactacaaagcctccctgaaatatctcagcgaccacccgaaactgcagggtattgcccagcagaacagctttaaacacacctga

SEQ ID NO: 21160 - DNA, 1071 bp, Escherichia coli; identical to SEQ ID NO: 7594

SEQ ID NO: 21161 - DNA, 231 bp, Escherichia coli
atgcctgtctgcccgcgccgggaaaaaacgcgcgccggtggcgctgaaaggggccgcgctcacgcgccgcccctttcattacgcggacgttctgatgggggcttctgtttcttcatgcctgtcatttgtctgttactgatgttgttgttcctgctactgctactgctactgctactgctactgctactgctactgctactgctactgttcttctttttcctgctgctctga

SEQ ID NO: 21162 - DNA, 1362 bp, Escherichia coli
atgacattagcagcaatcaccatgaccgccccggaagccgccagccctgtgcagatgtaccgcgcgacctactcaccggatgacaacaaactgcgcctgtatgccgtgtcacgtcttgacccggagacgtataaaaaagtgcatgatgccggtttccgctgggcaccaaaacaggcgctgtttgtcgcgccagcctggacaccgggccgggaagacgtgctcctctcacttgccggagagattgaggatgaagacagcacgctcgctgaacgtcaggaagcacgggcggagcggtttaccggatacagcggaaagcgggccagtgaatccgcacaggcacttgatgaagtggaaagactggccgcgatgatcccgcccggtcagcccattcttgtggggcatcacagcgaacgccgcgcccgtcgtgatgcgcagcgtattgaaaacggcatgaaacgagccgtgatgctctttgaacgtgcggaatactgggaagagcgggcgcggtcggcactgcttcacgcgaagtataaagaacgtccggacgttcgctggcgtcgtatcaaaaaaatcgaagctgatttgcgcaaggctgaaaagaccatcgcgcagtcgcagaaatatctgacgatgtggcgggctgaatcgctggatctgaatatggcaaaactcatcagcagtcatgaccatatcagcgcctgtttcccgctggatacgtatccgcgcccggcagaaaaaagccagtatgaaggaagtcgatcgttatggtcggccctggatgatgacatcatcaccacggagcaggcccgcgaaattgcgatccgctgtcatgaacggcagattcagcatcaacaacgctgggttaaccactatcagaaccgcctgatctatgagcgtgccatgctggacgaaagcggcggcgtggttacccggacacaggattttgagccgggcggacaggttttcagccggggcgagtggctgaccatcatccgtgtgaacaaaagcaacggggcggtgagttcagtcacaacgccaaattacagttttctcgggtacagcggcacgatgaaagtgacgcccgatcgcatcacggactacaaagcaccatcggcagaagaggctgccgtcgccagtcaggccgcgaagcgtccgccggtagtcaactatccgggggaaggtttccgggaaatgacaaaggcacagtgggccgccctgccccgggactgtaaggccgtgcgcagtgtggcagaagcagaagaccacggggcataccggtaccgccgcacaatggacaataatttccgcctggtgaatgtgtatatctccgacatgaaaatcacggaaatcccacagaaataa

SEQ ID NO: 21163 - DNA, 192 bp, Escherichia coli; identical to SEQ ID NO: 14879

SEQ ID NO: 21164 - DNA, 1788 bp, Escherichia coli
atgacggaggatgatgcccgtccggaggcactgcgccgttttgagctgatggtgaatgaagtggcacgtcatgccggagcgtcatcacagagtgcagcggcggcaaagaaatccgaaacggcagcagcctcatcgaagaatgcggcgaaaacctcagaaacgaatgcagctaacagcgcacaggcggcagcggcctcgcagactgcatcggcaaactccgcgacagcagccaaaaaatcagaaaccaacgcgaaaaatagcgagacagccacaaaggccagcgaaaaaaacgcaaaatccagccagacggcagcgaaaaccagtgagacgaatgccaaagacagtgaagccaacgcaaaggtgagcgaaacagcggcggcgaactcggcgaaagcatcggcagcaagccagacggcagcaaaagcaagtgaagatgctgccagagaatacgcaaaccagacagcagagccgtacagatatgttttacagccgctgccggatgtgtggataccctttaatgattcgctggatatgattacgggctattctccgggttataaaaaagtgaagattggcgataatgtggttcaggttgccagtgataaacagattaatttcagtcgcgcatcaacggcaacatatatcaacaaatctggcgaactgaaaacggcggaaattaatgagccgcgatttgagtgtgatggcctgcttattgagggacaaagaacgaacttcttccagaacagtacagacccttcgaagtggaataagtcaacttcactggacgttacagaaacaggcacagatagtttcgggtttaattatggccggtttgtcgtacaggattcgattgttggtacaagtaaagcgcataccattatcggactgtattcgagtaccggaggggttgatacttcaggggacgaaaagcatgtaactatatcctgtcgggtaaaaagtgaagttgataatatcgccgttcgtattttatttgaacattatgatggggaggtaaggacatcaataggagcagcaaacctgaaccttaccacccgcataattagcaagacaggtcagacaagccgtgttacagcaaggtctgttaaggatgatgcaactggctggatattttttgaggctacattaaaagcagatacaacagaaaatacggttggtggttttgtccagtattctccggatacagggcagatggttgcatcaggggattatctcgatgtaaccactccacagattgaggctggtacaggcgcatcatcttttattgttacggggacggcaccggtaacgcgggcaagcgatatggttacagttccgattaagaataatctttataatcttccttttacggttctttgtgaggtacataagaactggtataaaacgccaaatgcagcaccgcgtgtttttgacacataccggcatcaggcagatgcggggatcgtaatggggtttggttcatcaggtgggtacgacggttttccgtattgtgatataggtggttcaaaccgacgaataaatgaaaatgccgggctggaaaaaatgcttattggtatgcgggtaaagtccgaacggtccacatgtgtagtcagtaacggtaagttaagcagcgaaactaaaaccaaatgggaatatatccggagtacagcaaccattcgcattggtggacaaactacagcaggattacgccatttatttgggcatgtgaggaattttcgtctctggcataaagagctaacagatgcgcagcttggggaggttgtggagtga

SEQ ID NO: 21165 - DNA, 213 bp, Escherichia coli
atgtctcacaaatgtaggttagcctcttacgtgccgaaaggcaaggagaagcaggctatgaagcagcaaaaggcgatgctaatcgccctgatcgtcatctgtttaaccgtcattgtgacggcactggtaacgaggaaagacctctgcgaggtacgactccgaaccggccagacggaggtcactgtcttcacagcttacgaacctgaggagtaa

SEQ ID NO: 21166 - DNA, 369 bp, Escherichia coli; identical to SEQ ID NO: 14436

SEQ ID NO: 21167 - DNA, 483 bp, Escherichia coli
gtgttaacgggaaaatactgcgaacacctgccactgtatcgtcagagtgaaatctttgcccgacagggtgccgaactgagccgtgcattaatctccaactgggttgacgcgtgctgccagttaatgactccgctaaatgatgccctgtaccgttacgtgatgaacacccgcaaggttcacactgacgacacaccggtaaaagtgctgacaccgggcagaaaaaaggcaaaaacaggacgcatctggacgtatgtccgggatgaccggaatgcgggctcatcagagccaccggcggtctggttcgcctactcaccagacaggcagggaaaacatccggtacaacaccttcgtcccttccggggtatcctgcaggcggatgcattcagcggttacgatcggctgttcagtgccaaacgtgaaggtgatgcacagacagaagttgcgtgctgggtccatgcccggcgaaaaatacacgatgtatga

SEQ ID NO: 21168 - DNA, 279 bp, Escherichia coli; identical to SEQ ID NO: 8154

SEQ ID NO: 21169 - DNA, 249 bp, Escherichia coli
ttgcattaccttgccgaccgcgccggtatcagaggcctgttcagcgatgcagatgcgtaccacctggaccaggcctttccgctgctgatgaaacaactggaactcatgctcaccagcggtgaactgaatccccgccatcagcataccgtcacgctgtatgcaaaagggctgacctgcaaagccgataccctcagcagttgtggttacgtttatctggctgtttatccgacgcccgaaatgaaaaattaa

SEQ ID NO: 21170 - DNA, 255 bp, Escherichia coli; identical to SEQ ID NO: 7767

SEQ ID NO: 21171 - DNA, 1914 bp, Escherichia coli
atgaatcgctggtacaccattaaggcggcggatgttcgcggagcggcggatatatctatctatgaggagattggcggcttcggtgttactgcaaagcagttcgcggaagacctgaaagcccttggcgatgtttcacatatcaatctgaggatccattcaccaggtggtgatgtgtttgaaggcatcgccatctataacctgctacggaatcatccggcagacattacggtttatatcgatggtgttgcggcttcaatggcttcggtggtcgcaatggctggcgatcgtgttgtgatgccggaaaacgccatgatgatgatacataagccgtggggtatctctggcggaaatgctggtgatatgcgtgattatgctgatttgctggataaggtggaaaccgtgttagtccctgcttatgccagaaaaacgggcaaatcagcacaggaaattaccgccatgctggaagatgaaacctggatggatgggaaagaatgccttaagcacggttttgctgatgaattgttgccatccgtcagagcaatggcgcgaattgaatcgaagcgcacaggagattttttacatatgccggaaaccattaaaggaatgattacaccgccacagggagcggcaaatattgctggtaatgaacagaaacgcatcaatggaataagtgaagtgtttagcctgttcggcagtcgttacgacgggatcaaaatggcgtgtctggaagatgcatcatgtacaccggaaatggcccgtgaaaagctgttgaacgagctggggcgcgagtccacgccatccaataaaaataccccgcctcatatctatgccggaaacggaaacataacaggtgatgcaattcgtcaggggctttattcccgtcttgggtatgaacgccctgaacgaggcaacccttacgcgatgatgagcctttttgaaatggcccaggcatcactggttgatcgtggtatcactgtgagtggttttattaatcgctcgcaggttgttaatgcggcttttacacacagcagcagtgatttttctcatattctggctggtggggctgaaaaatctgtactgaaaggctggcaggacagcggcgaaacgttccagaaatggacgcgtaccggttcgctttcaaactttcatgaagcaaagcgcgttggtctgaatggtttttcaaagctggataaagtaccggaaggtgcggaatataaatacatcaccaccagcgataaaggtgtacctattgcgctggccacgtacgggaatattttttccgttacccgtcaggccattatcaacgatgacctgacccagttaactacaatccccatggcgatgggacgcgcagccgccagaacagttggcaatctggtttatctcctgttaaccagcaacggcaagtttacggatggtaaagcgttattccatgccgatcataaaaatcttattgcgaaggatatggacatggtggggcttgatgaagcccgtaagctgatgcgcctccaggaggatgctaacggcgactcactgaatattacccctgcttttgttctggtccctgccgcgctggaatctgccgcgcgtcgcgccattctgtcatcgtcatcagtctttccggttggtgatgagggcactatcaatcagaaccccggcatcattaacgttgtgaaagatatggcagaagtaattgttgagccacgtcttgataaggccaatagcaaggaatggtatgtagccgcagctaaggggatggacacaatagaagtcgcttatcttgatggtatggatacgccatatcttgaggagcaggtgggctttactgttgatggtgtcgcctggaaggtgcgcatagatgcaggtgttgcggccctcgattatcgtggattgctgaaatcgaatggagcatga

SEQ ID NO: 21172 - DNA, 174 bp, Escherichia coli
atgatccgtacggggataacataccgttttaagcaacgagtgacagaagccggagcaatccggctttttatgggtcctcccggtgtagtgacctgccacggggcgggagcggcgcggaaaaaggctggtttttgcattttcatggcggcggcagcatgtgtgataatttattga

SEQ ID NO: 21173 - DNA, 177 bp, Escherichia coli
atgtcaaccaatgacaacaaaaaagaaagattctccgtacaactacgcctagacgcagatttgttcgagcgtttaagtattgccatgaaagaagatggcgacgataaccgatctggatggatcaaaaggcttttacgacgcgaattagataaacgcggcattgagtcaaaaagctga

SEQ ID NO: 21174 - DNA, 2601 bp, Escherichia coli; identical to SEQ ID NO: 4871

SEQ ID NO: 21175 - DNA, 309 bp, Escherichia coli
atgaacgtggcggtaataggtgcaggagtaatgggaactggcgtcgctcataacatggcgcaatacggcatatcaactaacgttgtggatatttctcaatctcagttggataaatgccgacagatgatcgaagcgaacttacgcttatataattttcacccgcagcataaaaaaaagacgcatagcacagcggagataatggaaaatatccgtttcacaactgagttggacgacattgtagaatgtgatttggtgattgagaatattactgaggatatagagaaaaaaatgcactatacacacggatga

SEQ ID NO: 21176 - DNA, 630 bp, Escherichia coli
atgagcaagatcaaaaacccagttgtacttatccataaacgagaaaatagtgactcctacgctgttgcaatcacctgcggtagccagaactatcacgacgccgttctgatggcgtcgatggagctggatatgagtgacgatgatgtcgatacctggagtaaaaccggctactacatggctcaagaaatcgagcgacttaaacaagcactgtccgcagcggaaaataatttgattgattccgaatgcctcgtcgctgaattaagcaaagcaaagaatcacgcatatgggctggtcgacacatacgactggcaacgtcagcgtctccacgcagccacagagaaagtcatcaaatggtgcagacaagaagctgaacaccgtagcagcgatccagagaaatcagaaaactatgcgtgtgttaaagaactacgcgacgcattaactttttgcaaaagttctgaaggcagcaagaagaaaggcctgaccatcaccctgcccgatatcacatcaaaggcattctggagcggtaccggaaaaaacgcaaaattccatccggaaacctataaacgctgggtgaaagaagctatcaaacgggattgtgttattgccgggatcggcgtggaggtgaaatga

SEQ ID NO: 21177 - DNA, 225 bp, Escherichia coli
atgaaaatccaataccaggactatggcgccgtagcgaacatcgtgatcaccagttcccgcctgacattgcaaaagcataaccgcgttgttgatgcggtgctgtttaatgtacagggaatccatgaaaaccgcagcggctttttctgggttaagtcatcgttgtcaggaaaaacactcgacatcctgcgcgcctacaaaatcgtacagcgggaggcaaagcgatga

SEQ ID NO: 21178 - DNA, 339 bp, Escherichia coli
atgccactcattacacaaaatttccgcctcaatgcgctggcaaatcagtatgcggctgcactgcacaaccacatatccgccaccaacggagatcatttcatgattaatgtcaatgggcaatccatacgagtaaacatcatcggtggggttaaaggtatcagggatttaatcgatggttatgctctgaaggctatcaaagaaaattacccccaatgggaagccgttggtattcagctgttaagcaaatgcgttcgtggaaacgagctgacgcaaaacggcaaagaaatctggcagagcatagttaacgacatgagcgataccgttatggggaacatgtaa

SEQ ID NO: 21179 - DNA, 360 bp, Escherichia coli
atggcatgtacaaccatttataaagatcgtcgccgcatggtaacagcggcactccggcggatgcaacgtaaaacaggtagtaatctgctcgtcgttgacctcccggacggagaaataacaacgatagaaataactgaacagttcatgaaccagttgttattacgatttgagggtcttacccgtgttgaatatggacggacggaaggagaagcaacaatccgtaccgcataccagaatgccatcggtattaatcaacacacggaatatctcactgaatcagggaaactgatagtggacggccttttaaaagaggttgttgactacgtaaaagagaaatatatcagtggaggaattaactga

SEQ ID NO: 21180 - DNA, 411 bp, Escherichia coli
atgtcatcgtatatgggattaccaacaaatcagcacgatgctcttgagaatattcagctcttagtagggactggtgcactactgtatagcagcaataaccctgagttaattgaacttgccagctccatcctggctgtaactcaaaaatatagcctcaccgcgtcacgtttatgcaaacaaaatttagctattaattcccagaatcggattcgcacccaacgcgaagcctgcggcttaacaaccgccgaactcgccaggctgctcgatctcgatgaagaaattatcatccagtgggaaagcggagagtacgaaccaaccatcagcatgcttatccctctggctaatgttcttggctgtgatccaatgttgttattgactgatgcttataaacaaaatcaggaggaagcataa

SEQ ID NO: 21181 - DNA, 693 bp, Escherichia coli
atgacattttcagaacgacttgatttagctatgcgcaacgcaaaatttacgcaaggtaggctggccaaagaagtgggtatggctcagtccagtgttaatcaactacttaacaaagccaacggttccagaaaaacagtcgaaatagcaaaagttttgggcgttaacccggaatggctcgcatcgggtgttggcccaatggaaatcgtgacctctgcagactcacaccaaatacgtaacatttctgaagattgggttactgattcgtatgtcgtggatgttttagacatcagatatagttgcggacctggtagttataactctgattttcctgatattgtcagatctatagcgatagaaccaggatacgcatcaagagtttttggcggcagaccagcatcagcaatcaaagcaataaacgcccacggcgacagtatgaaaggcacaatagaccctgaagacttggtatttgtagatgtatcagttcgcacatttaatggtgatggtatatacgcctttacatactctggaacatcgcacatcaaaagacttcaaaaaatcaaagatactctaacggtgatatctgacaacccagcttacaaggattgggctatcgaaccggaagacttcgaacaacttcacattgacggaaaagtaattgtcagttggcctatgacactacaccgttttgcataa

SEQ ID NO: 21182 - DNA, 288 bp, Escherichia coli
atgaaacataaagccatagagaaagctattgagattcttggaagtcagcaagccttagccaagcgatgcggaaaggcccagtcaacagtctgcgattggttgaactgcaagaacaagatttcaccagaatttgtgccgttattggttgcagctgtcgacggaaagatccaagcgtatgaatttcggccagacctaccagagctttttccacatccaagcttagcgcgcacgggagaggtgaagggcttgtatgtcccagaattacgttcagacagagatgccatctag

SEQ ID NO: 21183 - DNA, 261 bp, Escherichia coli
atggaagaaaaaatagacgccgtaatccgtgagaaatacgggttacctcctgttatgagcacgccagtgaaatatgccgatctcattatgctggcaaccgaacgccgcgatctcgggcttgatgatggctctttctggcctgtactggaaggcatcccggcaacagagatgttcaaagttattccactgtcaccaggccatgcctacgggatgtttatggaacgttttaacgagttatcggaattacgcaaatgtgcataa

SEQ ID NO: 21184 - DNA, 204 bp, Escherichia coli
atgacaatcgtaaaaacccataccggcattgtgatcaccaaagacggcccgcaggtaaaaaaacttcaccagacagagcggatgtgggtcgtcggcaaaaacgagttttaccacaaagaaaccggacgccgccactttgcagaaaatacgcgcctccgactactgatcgacaccatcaagcctatcgaggtgaagcatgtttaa

SEQ ID NO: 21185 - DNA, 1287 bp, Escherichia coli
atgagtaacgcatcatacccgacaggcgttgaaaaccatggaggatcactccgtatatggtttcactataatggcaaacgtgtcagagaaaacctcggtgttcctgacacagccaaaaaccggaagatcgctggtgaacttcgcacttccgtttgttttgcaatcagaatggggagtttcgactacgccgcgcagttccctaattcccctaacctgaaacactttggtctgggaaaaagagagataaccgttaaggcactttcggaaaaatggttggaccttaagaaaattgagatttgtgcgaatgcacttaaccgttaccagtcagtaattaaaaacatgttaccaatgttaggtgaaaaaaaactggtttcatccataacaaaagaggatttacttttcgtaaggagagatttgttgaccggttaccaaaagctttctaatggaaagacttcttccataaaagggcgctcagtggtcacggtaaactactatatgacaaccatagctggaatgtttcaatttgcaacagataatggttatacctcaggaaacccatttaacggtctggctcccttaaaaaagtccaaggtaaaaccagatcctctcacccgtgacgaatttattcgttttattgaggcttgccgtcatcaacaaacaaaaaacctgtggattctcgctgtatacacgggtattcgtcacggggagttggtatcgctggcatgggaagatatagaccttaaagcaaggactataaccatccgtagaaattatacaaaacttggcgaattcactccaccaaaaaccgatgcaggcaccggaaggacaattcatctggttcaaccagctattgatgctcttaaaagccaggcggaaatgaccatgcttggaaagcaacattctgtagaggtgaagcagagggaatatgggagaactgctgtgcataaatgcacttttgtttttagtcctcaggtaacaaaacagcagcagttgtccggacctcactacaaggttgactccatcagggagtcatggacaagtatcttaaaacgcgcaggtctgagacacagaaaatcgtaccaatccaggcatacttatgcatgctggtcacttgccgcaggagctaatcctagttttatcgcaagccagatgggccacacaaacgcacaaatggtattcaatgtttacggagcatggatgaaagacaacaatcacgaacagatagaactccttaacaaaagactatctgaaagtgtcccatgtatgccccataagaaagttgggtaa

SEQ ID NO: 21186 - DNA, 498 bp, Escherichia coli
atgtttgctctggccggaaataaatggaataccacgctgcccggcggaaatatgcaatttcagggcgtcattattgcggaaacttgccggattgaagctggtgataaacaaatgacggtcaatatggggcaaatcagcagtaaccggtttcacgcggtaggggaagatagcgcaccggtgccttttgttattcatttacgggaatgtagcacggtggtgagtgaacgtgtgggtgtggcgtttcacggtgtcgcggatggtaaaaatccggatgtgctttccgtgggagaggggccagggatagccaccaatattggcgtagcgttgtttgatgatgaaggaaacctcgtaccgattaatcgtcctccagcaaactggaaacggctttactcaggctctacttcgctacatttcatcgccaaatatcgtgctaccgggcgtcgggttactggcggcatcgccaatgcacaggcctggttctctttaacctatcagtaa

SEQ ID NO: 21187 - DNA, 534 bp, Escherichia coli
atgaacgtaaaaatcagatacagcctgtcggctgctgttctggcactgattgccgccagtgctcctgcccctgacattctcgatcagtttctggatgaaaaagaggggaatcacaccactgcataccgcgatggctccggcatatggaccatctgtcggggagcaacgatggtggacggtaaacctgttattccgggaatgaaactgtcgaaggaaaaatgcgcccaggttaacgccattgagcgggataaggcgctggcatgggtggagcgcaatataaaagttccactgaccgagccacagaaagccggtatcgcgtcattctgtccctataacattggccctggtaagtgtttcccgtcgacgttttataagcggctgaatgccggtgatcgtaagggtgcatgtgaggcgattcgttggtggataaaagatggtgggcgcgattgccgcatacgttcaaataactgctatgggcaagttattcgtcgtgaccaggaaagcgcattagcctgttgggggatagatcagtga

SEQ ID NO: 21188 - DNA, 327 bp, Escherichia coli; identical to SEQ ID NO: 5975

SEQ ID NO: 21189 - DNA, 249 bp, Escherichia coli; identical to SEQ ID NO: 11247

SEQ ID NO: 21190 - DNA, 495 bp, Escherichia coli; identical to SEQ ID NO: 17117

SEQ ID NO: 21191 - DNA, 1026 bp, Escherichia coli; identical to SEQ ID NO: 5729

SEQ ID NO: 21192 - DNA, 1149 bp, Escherichia coli
atgaacagtttaacggcaaataaccgtttgtcgcaacagctagtggtcagtgtcgctgcacacctgttgttacggcatgaatgcagattaccaaatcacctggctgtaagtaaccacagagaactttacctgactgtggggggcgagttgtgcaggaacttaaccgctggtttcgtgacggaagaggactttatgttcatgttattcgttgggagccagaaacacagcgcgttatctatcttcgcaaagactacccgcatgagtgctttagtcctttgtggaaattcaggcgtgattttgttgagtgtgaaggaccaccagcacattgattctgccattccgggacgttacactgttcaggcaccttataaagcgggtgccgggattggcgtcctggaattgcatacggcgacaattggcgcgttagcgtcttttttgttgctacaactcagctatacccaaattatggtgggctgggtgggggcaccgaaaggtgcgccggtttccgtatgcgccggttacgccaaccctgctcagttcaccaccagcgaaattggcgtttccggtggtggaagttatccattgcatacggaggctgccatcatggctacgatccctgccttagtacaacctgaactttgcattattgcagacaaagttgttacttcttctctggctgttgctagttatttcggcaaacaacacaaaaatgtcattcaaaaaattgcgtctcttgaatgctctgccgaatttactgagctgaatttccagctcagtgagtacatcgacgcatcaggccgcaaactaccttgctatcaaataacccgcgacggctttgcgtttcttgctatgggtttcacgggtaaacgtgctgcccagttcaaagaggcatacatcaatgcctttaaccagatggagaaacagctttcaaagcccgctgtaccgagcgacgttgcacataacgccagcgttctctattcctacatttcatcaattcatcaggtctggctgcagcagctttatcctatgttggcaaaagccgaatctccgctggctgttagcttgtatgactatattaatgatgcttcggcactggcctgcctcataaatttgtcgctgaacccttcagaggtaagggggcgcaaatga

SEQ ID NO: 21193 - DNA, 741 bp, Escherichia coli
atgaacaatgtcattcccctgcagaattcaccagaacgcgtctccctgttacccattgcgccgggggtggattttgcaacagcgctctccctgagaagaatggccacttccacgggggccacaccggcctacctgctggccccggaagtgagtgcccttcttttctatatgccggatcagcgtcaccatatgctgttcgccaccctctggaataccggaatgcgtattggcgaagcccggatgctgacgccggaatcatttgacctggatggagtaagaccgtttgtgcggatcctgtccgaaaaagtgcgtgcgcgacgcggacgcccgccaaaagatgaagtgcgcctggttccgctgacagatataagctatgtcaggcagatggaaagctggatgatcaccacccggccccgccggcgggagccgttatggccggtcacggatgagacaatgcgcaactggctgaaacaggcggtgaagcgggctgaagctgacggcgtgcatttttcgattccggtcacaccacataccttccggcacagctatatcatgcacatgctctatcaccgccagccccggaaagtcatccaggcactggctggtcacagggatccacgttcgatggaggtttataccagagtttttgcgctggatatggctgccacgctggcagtgcctttcacaggtgacgggcgcgatgctgcagagatcctgcgtacactgcctcccctgaagtga

SEQ ID NO: 21194 - DNA, 366 bp, Escherichia coli
atgattgatgtcttaggaccggagaaacgcagacggcgtactacacaggaaaagatcgctattgttcagcagagctttgaaccgggaatgacggtctcccttgttgcccggcaacacggtgtggcagccagccagttatttctctggcgcaagcaataccaggagggaagtcttactgctgtggccgcaggagaacaggtcgttcctgcctctgaacttgctgttgccatgaagcagattaaagaactccagcgcctgctcggcaaaaaaacgatggaaaatgaactccttaaagaagccgttgaatatgggcgtgcaaaaaagtggatagcgcacgcgcccttattgcccggggatggggagtaa

SEQ ID NO: 21195 - DNA, 807 bp, Escherichia coli; identical to SEQ ID NO: 9304

SEQ ID NO: 21196 - DNA, 1041 bp, Escherichia coli
atggctacatcgacagtaattcctgatgacatcaaaacgctaaaatccgacgttagcaaattaaaaaacgatcaaggaagctacgcaacaaaatcttatgtagacaataaaacaacatggaatggttattgcaatgtaatctatgatcaaaaaacattgccaacaactggaactatattcagcggtaagctgcatttgtcaaataagactggtgaaacggaaaacgcttatagtgacatatataccagaaaaaatattgatggtactaaagatacaatgacgaggatcgtcacacataacgggacaaaaggtatcttttgggactttagtgatctttacggaggaactttaattttccctggcactgctggttatttgaaaatgggtaagtgcctcatgtcctatggggatcgtgtagataatgccctgattaaatttgattatacagacacattacagatcaaatatgctaatcacgggtcgaccatgacattaaacacacagggaaccgcttatgctggtgttactgctaaattgtggggcaactccagccgtccggttgtttatgaagtcggtgttgatggtggcgcttatatgttctatgcgcagaaaaataccgataacacctatatgttaagcgttaatggtgcatgtcatgccaccgcatttaaccagcattccgaccgggatctgaaagacaacattcaggtgatcgataatgcaaccgaccgcatccgtaaaatgaacggctatacatacacgcttaaagaaaacggtatgccctatgctggtgtcattgcacaggaagctctggaagcaatcccagaagttgtaggttccgcagtgaaatatcaggacggtgcaagcggatcggaaggtgaagaaggtgaacgttattacacagtagattattctggtattactggcttgcttgttcaggtagccagagagtcagacgacagaataacagcactggaagaagaaaacgcagaattaaaacaaagattatctgcaattgaggcggcgcttgcgtctaaataa

SEQ ID NO: 21197 - DNA, 819 bp, Escherichia coli
gtggtgaaggggcagacggttcaggtcgggaccagaaaagaagggggccacgaccagagtatcacggtggcgaacgaccggtgcatcacggtacgtaatgaccagacgctgcaggtgacgaatgaccggacggtgagcgtgagtaatgatgacggcctgtacgtcagaaatgaccgtaaagtgacggtggaagggaagcaggagcataagacgacggggaaccatgtcagcctggtggagggaaagcacagcctggtggtgaagggggacctggcgaggaaggtgagtggcgcgctggggataaaggtcgacggggatatcgtgctggagagcagcagccggataagcctgaaggtgggtggctcgtttgtggtcatccattcagggggcgtggacatcgtcgggccgaaaatcagtctcaatagcggcggtagtccggggacgccggtgccggcgctgcaaccgacggtgctgaagacactgggggatgagaagagtggtgatggcagtgattccggagaagaaaatgaagactctggagggaactgcgtgaccggaagtggtggtgatgatcgaggtgacgatgaggatgaacctgaaaaatatactctccagttccattttacagacgatgacgggataccgtattcagaaacccgctacattgccttctttgaggatggcacgcagacccacggagaaacggatgaagaggggtatacagagcgtttttttgtatctagcaaacatgaaattaaagtgaagttgctatttgcgaatgatgattttctctcaatggaaggacactatggacgataa

SEQ ID NO: 21198 - DNA, 435 bp, Escherichia coli
atgagtaaccgaattactcagatagacactgctacaggggaagaggtaggtagttttgtcgcagttatccgacccaaacagaagtcagcttttgagaggcatttcactatgaaccaagacgctttaaagatccttgctaagaccctcacaggggagcaattcaaagtcttgatgatgctgttagctgatctcgattatgaaaattacatccaaattgcccaagccgatattgccgacgctttaggtatgcagaaaaccaatgtaagccgttcggttaaggcgctaattgacctatccgtgattcttcaaggcccaaaagtagggcgcagttacagttaccgtctgaaccctcagtttggctggaaaggtactgtcagcaaccacaaaaaagcactgaaaaacggcctcagcgttatacagggcggcagaacctga

SEQ ID NO: 21199 - DNA, 699 bp, Escherichia coli
atgcaggatattcgcgaagaaagtctgagcgagtcggttaaatcagagcagtcaccgcgggtggtactctgggaaatcgacctgacggtacagggcggtgagcggtattttttctgtaatgagctgaatgaaaaaggggagccggtcacctggcaggggcggcaatatcaggcatacccgattgacggcagcggttttgagatgagcgggaagggcagcagtgccagaccgtcgctgacggtgtccaatctgttcggtctggtcaccgggatggcggaagacctgcagagtctggtgggggccacggtggtccgccgccgggtgtatgcccgttttctggatgcggtgaatttcgttgcgggcaatccggaggccgacccggagcaggagctgacggaccggtgggtggtggagcagatgtcagcgctgacagccatgacggcctcgtttgtgctggccacaccgaccgagacggacggggcgctgtttcccggtcgtatcatgctggcgaacacctgtatgtggacctaccgctctgatgagtgtggttacacgggcggggctgtggcggatgagttcgataaacccaccacggatatccgtaaggacagatgcagcaagtgcatgcgcgggtgtgaactgcgcaggaatgtcggcaattttggcggtttcctttccattaataaactttcgcagtaa

SEQ ID NO: 21200 - DNA, 642 bp, Escherichia coli
ttgaccaacacccagaatttgggtgttgacccggtgagtgtgattcatgggggaaatgaacggggaacgtatgtctgcaaggaactggtgtatgcctatgcaatgtggatcagcccgtcattccatctgaaggtgatccgtactttcgacatgataaccagcgcaccggaaaaattatccggacaggctgctgacaagatgcaggctggtgtgattctgctggactttatgcgccgggaattaaacctgtctaactcttcagtgcttggtgcctgtcagaaactccaggaggctgttggcttaccgaatctggcaccgcgctatgccattgatgctcctgctgacgcgcctgatggctcaagtcgtcctacgctgtcgctgagtgcactgctgaaacagtatggtatccgccttacggctaatcaggcatatcaccagatggtgaagctggggatcgttgaacaacgcgaacgatacagccgtaccgcgattaacaacatcaaaaaattctggtcgctgacagcgaaaggttgcatgttcggcaagaacatcaccagtcccgcaaatccgcgcgagacgcagccgcatttcttcgaatcccgattccctgagctgttaaagctgctcgataccgttcactga

SEQ ID NO: 21201 - DNA, 621 bp, Escherichia coli; identical to SEQ ID NO: 10407

SEQ ID NO: 21202 - DNA, 330 bp, Escherichia coli; identical to SEQ ID NO: 8750

SEQ ID NO: 21203 - DNA, 825 bp, Escherichia coli
atgtctcagaacttagacgcaaccgcaattaatcaaatccatgcccttatttctgctcagggtgttaatgaaattatcagtaagattggtgccgacgcagtggcattacctgaaaatttccgcattcatgatctggaaaaatttaatttaaatcgcttccgtttccgtggtgcgctttccactgccagcatcgatgactttacccgttattctaaagatcttgcggatgaaggcacccgctgctttatcgatgccgataatatgcgtgccgtcagtgtgcttaacctgggtactattgatgagcctggtcacgcagataacaccgccactctcaaactgaaaaagacagcaccgttctctgctctgttgtctgttaacggcgagcgtaactcccagaagtcactggcagaatggattgaagactgggccgactaccttgtgggctttgatgctaatggtgatgccattcaggcaacaaaagcggctgcggcagtccgtaaaatcacaattgaagcaaaccagaccgctgattttgaagacaatgacttcagcggcaaacgctccctgatggagtctgtcgaagcgaagaccaaagatattatgccagtggcatttgaatttaaatgcgttccgtttgaaggcctgaaagaacgtccgtttaaattacgcctcagcattatcactggcgatcgtcctgtactggttctgcgcattattcagctggaagcagtgcaggaagaaatggctaacgaatttcgtgatctgcttgttgagaaattcaaggacagcaaagtagaaacctttattggtacttttaccgcctga

SEQ ID NO: 21204 - DNA, 471 bp, Escherichia coli
atgaaaatcgtttctcagaacacaactgctctttcttcagccacagcaccagggaataaccagcctcaactggttgccaccctcgtccctgatgaacagcgcatcagcttctggccgcagcattttggcctcattccacagtgggtgaccctggagccccgtgtcttcggctggatggaccgtctgtgtgaagactactgcggtggtatctggaatctgtacaccctgaacaacggtggcgcatttatggcacccgaaccggatgacgaaacatgggtgctgtttaacgtcatgaacggtaaccgcgctgaaatgagcccggaagccgccggcattgccgcctgtctgatggcgtacagccatcacgcctgtcgtacagagaattatgccatgacggttcattattaccggctgcgggattatgccctgcagcatccggaatgcagcgccattatgcgcatcatcgactga

SEQ ID NO: 21205 - DNA, 642 bp, Escherichia coli
ttgcagatttgcaactcggtcaatatagagccagttaacgttattcgtggcggaaataaccaggggacgtatgtctgcaaagaactggtgtatgcctatgcaatgtggataagcccgtcattccatctgaaggtgatccgtactttcgatatggtaaccagcacaccggaaaaattatccgggcaggctgctgacaagatgcaggctggcgtgatcctgctggactttatgcgccgggaattaaacctgtctaactcatcagtgcttggagcctgtcagaagcttcaggaggctgttggcttaccgaatctggcaccgcgctatgccattgatgctcctgctgacgcgcctgatggctcaagtcgcccgacactgtcgctgagtgcactgctgaaacagtatggtatccgccttacggctaatcaggcatatcaccagatggcgaagctggggatcgtcgaacagcgcgaacgatacagccgtacagcgattaacaacatcaaaaaattctggtcgctgacagcgaaaggttgcatgttcggcaagaacatcaccagtcccgcaaatccgcgcgagacgcagccgcatttcttcgaatcccgattccctgagctgttaaagctgctcgataccgttcattga

SEQ ID NO: 21206 - DNA, 405 bp, Escherichia coli; identical to SEQ ID NO: 13528

SEQ ID NO: 21207 - DNA, 177 bp, Escherichia coli; identical to SEQ ID NO: 4925

SEQ ID NO: 21208 - DNA, 405 bp, Escherichia coli
gtgtttcctgctgaagaatggaatgccacagaaaaatgcccgtcccgtcagcaggcgctctcactggcgacggtgacagcccgggtggcaaccctgttcccttcatcatttccagtactctccgttgctgcacctgtcggctggaaccttccggcgtttgtgtcgctgatgatccacgcactgccaccacaggcaaccagcgcggtgtattcacatatccggggagaaaaccgctctgaacaggcccggaaacacgcacaacagacttttggtgaaaccatcgggaaaagttttgacgacgccgttgcccgtttcagttttccggcctggatgttacagcttctgcgcaaaacccgggaccgcattatccacctgctgatcacactgtgggagcgtctgttctga

SEQ ID NO: 21209 - DNA, 249 bp, Escherichia coli
atgcgtattgaaatctgcatagccaaagaaaaaatgactaaaatgccaaccggtgctgtggatgcgttaaaggaagaattaacccgacgcatcagtaaacgttatgacgatgtagaggtgatcgtaaaagccaccagcaacgatggcctttctgttacgcgcaccgccgataaagattcagctaaaacttttgttcaggaaactctgaaagatacctgggagtctgctgacgagtggtttgttcactaa

SEQ ID NO: 21210 - DNA, 222 bp, Escherichia coli
gtgacagaggcccatctgcgggctttacagcaggacttgcaggcactgacaccggaaaactgtcagacacggttcccgaccactgagggctttttctttggttcaacggcttatgatgaggcgtactgggctgatgtggaaggcgtcagacgctggctgtcagagataacggagacgtttgactttgacgcagagtcactgttttttgtggcctggtggtaa

SEQ ID NO: 21211 - DNA, 669 bp, Escherichia coli
atgataaaaattgaaagtttaactaaatcatatcgtacgccaaaagggcggcattatgtttttaaaaatttaagtattgaatttcctacagggaaaagtattgcgcttataggccgcaatggagcaggaaagtctactcttttacgaataattggaggtatagatcgtcctgacaaaggggaaataataactcaaaaaacaatatcgtggcctgttggcctttcaggcggttttcaaggaagtctgacaggacgagagaatgtgaaatttgttgctagattatattcaaggaaaaatgagctacaagataaagtagcatttgttgaaagtttttcagagttgggaaaatattttgatatgccgataaaaacttattcttcaggtatgcgctctcggcttggttttggtcttagtatggcatttgattttgattattatttggttgatgaggtaacagctgttggtgacatgagatttaaagaaaaatgtcttgatgtttttaattcaaagaggggaaaatcgtgtttcataatggtttcacataatttgaattctctaaaagattactgcgatatggcttttgttttttatgatgagaatcgtgtgatccgttttgataacatagatgaagccatatgtgaatataaaaataaaataattttaacttaa

SEQ ID NO: 21212 - DNA, 189 bp, Escherichia coli; identical to SEQ ID NO: 19578

SEQ ID NO: 21213 - DNA, 303 bp, Escherichia coli
atgagcagaaaaacccaacgttactctaaagagttcaaagccgaagctgtcagaacggttcttgaaaatcaactttcgatcagtgaaggcgcttcccgattatctcttcctgaaggcactttaggacaatgggttaccgccgccagaaaagggctcggtactcctggttcccgcacggtggctgaactggaatctgaaattctgcaactgcgtaaggcgttaaatgaagctcgccttgagcgagatatattaaaaaaagcaacagcgtattttgcacaggagtcgctgaaaaatacgcgttaa

SEQ ID NO: 21214 - DNA, 540 bp, Escherichia coli; identical to SEQ ID NO: 16163

SEQ ID NO: 21215 - DNA, 1524 bp, Escherichia coli
ttgataatcagcgaaatgcaacgcaagcttgccacatgggcagtcaccgatccgtccctacggattcaacggctgctgcgtctgataacacaaccagaatggctggctgaagcggcgcggatcacgctttcatcaaagggggcccatacccccggcgttgatggcgtgaacaaaacaatgctacaggccagactggctgttgagctgcaaatcctcagggatgaattactctcaggccactaccagcccttgcccgccagacgggtttacatccctaaaagcaacggcaaactgcgaccactgggtatccccgcgttgcgggatcgtattgttcagcgggccatgctgatggcgatggagccgatatgggagagtgattttcatacgctctcatatggcttccggcctgagcgcagtgtccaccacgctatccgcacggtgaaattacagctcacagactgtggtgaaacccggggacgctgggtgattgaaggcgacctgtccagttacttcgacaccgtacatcatcgactgctgatgaaggctgtacgccgcaggatcagtgacgcacgtttcatgactctgctgtggaaaaccatcaaggcgggacatatcgatgtcggtctctttcgggcggccagtgaaggtgtgccacagggcggtgttatatcgccgctattatcgaacatcatgctgaatgagttcgatcaatacctgcatgagcgctacctgagcgggaaagccagaaaagatcggtggtactggaataacagtatccaacggggccgaagtacggcggtcagagaaaactggcagtggaaacccgcggtggcgtactgccgctatgccgatgattttgtcctcatcgtcaaaggcaccaaagcacaggcggaagccatcagggaggagtgtcggggtgtgctcgaaggcagtctgaaactcaggctgaacatggataagactaaaatcacccatgttaatgacggctttatctttctggggcacaggatcattcgcaaacgcagtcgttatggcgagatgcgagtggtctcaacgatcccgcaggagaaagccagaaacttcgccgcatcgctgacagcactgttatcaggcaactacagtgaaagcaaagtcgatatggctgaacaactcaaccgaaaactgaaaggctgggccatgttctatcagttcgttgattttaaggccaaagtcttcagttatatcgaccgtgtcgtgttctggaagctggctcactggctggcccgcaaataccgtacaggtatcgcttccctgatgaggtggtggtgtaaatcaccgaaaccgggtcagagcaaaacgtgggttttatttggtaaaaccaatcacggcaagctcagcggcgaaatactgtaccggttggtggggcaaggcaagaagctgttccgctggcggctacccgaaggtaatccctatctgaggacggagaccagaaacacgtatacatcgcgctttacagaagtggcaatggcgttcgccagcatttaa

SEQ ID NO: 21216 - DNA, 825 bp, Escherichia coli
atgtgcgaactcgatattttacacgactctctttaccaattctgccccgaattacacttaaaacgactcaacagcttaacgttggcttgccacgcattacttgactgtaaaactctcactcttaccgaacttggccgtaacctgccaaccaaagcgagaacaaaacataacatcaaacgaatcgaccgattgttaggtaatcgtcacctccacaaagagcgactcgctgtataccgttggcatgctagctttatctgttcgggcaatacgatgcccattgtacttgttgactggtctgatatccgtgagcaaaaacggcttatggtattgcgagcttcagtcgcactacacggtcgttctgttactctttatgagaaagcgttcccgctttcagagcaatgttcaaagaaagctcatgaccaatttctagccgaccttgcgagcattctaccgagtaacaccacaccgctcattgtcagtgatgctggctttaaagtgccatggtataaatccgttgagaagctgggttggtactggttaagtcgagtaagaggaaaagtacaatatgcagacctaggagcggaaaactggaaacctatcagcaacttacatgatatgtcatctagtcactcaaagactttaggctataagaggctgactaaaagcaatccaatctcatgccaaattctattgtataaatctcgctctaaaggccgaaaaaatcagcgctcgacacggactcattgtcaccacccgtcacctaaaatctactcagcgtcggcaaaggagccatgggttctagcaacggcactgttgcaaagttag

SEQ ID NO: 21217 - DNA, 231 bp, Escherichia coli
gtgcataaagataaagtaggtagcgtaggcggtgcgatgcacggtctggcaaatatttccggcattattggtccattggtaaccggttttattgtccagttcagtggtaaatatgattacgcattctatcttgcaggtgccatagcaatcatttcaagtctgctggtattcatttttgttaaaaataaaggattgaaagtcaatgaaagtcaaagctgtgtacatcaataa

SEQ ID NO: 21218 - DNA, 1281 bp, Escherichia coli
atgcgtgttcgccttgatggcagcaatgcctctgaccagctggtgattaatggtggtcaggcaaccggcaaaacctggcttgcgtttacaaatgtcggaaacagtaacctcggggtggcaaccaccggacagggtatccgggttgtggatgcacagaatggcgctaccacagaagaaggtgcgtttgccctgagtcgcccgcttcaggccggcgcctttaactacaccctgaaccgtgacagcgatgaagactggtacctgcgcagtgaaaatgcttatcgtgctgaagtccccctgtatgcctccatgctgacacaggcaatggactatgaccggattctggcaggctcccgcagccatcagaccggtgtaaacggtgaaaataacagcgtccgtctcagcattcagggcggccatctcggtcacgataacaacggcggtattgcccgtggtgccacgccggaaagcagcggcagctatggcttcgtccgtctggagggtgacctgctcagaacagaggttgccggtatgtctctgacgacaggggtgtatggtgctgcaggccattcttccgttgatgttaaggatgatgacggctcccgcgccggcacggtccgggatgatgccggcagcctgggcggatacctgaatctgacacacacgtcctccggcctgtgggctgacattgtggcacagggaacccgccacagcatgaaagcgtcatcggacaataacgacttccgcgcccggggccggggctggcagggctcactggaaaccggtctgccattcagtatcactgacaatctgatgctggagccacaactgcagtacacctggcagggactctccctggatgacggccaggataacgccggttatgtgaagttcgggcatggcagtgcacaacatgtgcgtgccggtttccgtctgggcagccacaacgatatgacctttggtgaaggcacctcatcccgtgacaccctgcgcgacagtacaaaacacggtgtgagtgaactgcctgtgaactggtgggtacagccttctgttatccgcaccttcagctcccggggagacatgagcatgggtacagccgcagccggcagtaacatgacgttctcaccgtcccagaatggcacgtcactggacctgcaggccggactggaagcccgtgtccgggaaaatatcaccctgggcgttcagggcggttatgcccacagcgtcagcggcagcagcgctgaaggttataacggtcaggccacgctgaatgtgactttctga

SEQ ID NO: 21219 - DNA, 159 bp, Escherichia coli; identical to SEQ ID NO: 6188

SEQ ID NO: 21220 - DNA, 375 bp, Escherichia coli
atgaaaacattacctgtattacccgggcaggcggccagttctcgcccgtctcctgttgaaatctggcagatactgctgtcccgactactggaccagcactatggcctcacactgaatgacacaccttttgccgatgaacgtgtgattgagcagcatattgaggcaggcatttcactgtgtgatgcagtgaactttctcgttgaaaaatacgcgctggtgcgtaccgaccagccgggattcagcgcctgtacccgctctcagttaataaacagcatcgatatcctccgggctcgcagggcgaccggcctgatgacccgcgacaattacagaacggtaaataacattaccctgggtaagtatccggaggcgaaatga

SEQ ID NO: 21221 - DNA, 234 bp, Escherichia coli
atggcccccgaaccggatgatgatgatgacgaaacatgggtactgttcaatgccatgaacggtaaccgcgcagaaatgagcccggaagccgccggtattaccgcctgtctgatgacgtacagtcatcacgcctgtcgtacggagaattatgccatgacggtccattattaccggttgcgggattacgccctgcagcatccggaatgcagcgccattatgcgcatcattgactga

SEQ ID NO: 21222 - DNA, 129 bp, Escherichia coli
atgatgagtagcttcatcatgaccctttccttatttaaggccccttcctcgggaggggctttcccgtttcagcgtcccgctgaaatcttcggcttacctcctttcgccctgtatgcagtctatcgctga

SEQ ID NO: 21223 - DNA, 213 bp, Escherichia coli; identical to SEQ ID NO: 5358

SEQ ID NO: 21224 - DNA, 153 bp, Escherichia coli; identical to SEQ ID NO: 14351

SEQ ID NO: 21225 - DNA, 1032 bp, Escherichia coli
atggaaaaaacacgtaagcgccgtggtaccggacgggtgacgctgcaggaggtcgctaactttgcaggtgtcggaaccatgaccgtttcccgtgcgctgagaacaccggaacaggtatctgacaagctgagggaaaagatagaacaggccgtagaagagttgggttatattcccaacagaactgctggcgcccttgcatctggtcacagtgatacagtcgccgtactggttccttccctgacagataaagccagctcccgctttatgcagtcgttgcagcaggtgcttaataaaaatgaattccagctactgcttgggtgtcatgagtataatcagctcaaagaagctgaaattctgatgacgcttcttcaaggcaacccggcggcgttagttatttttggttctcagttggctgataaaactcaccagatactcgagaaaacaaatatacctaccattaacgttgtcggttcccctttcagtccggctcaaattaccatcgaaacagcattttttgaagcatcacataaactgaccgaacatctgctggaacagggttataagaatatcggatttatcggtgcgcatatggacaaccgcctgcaacgtcagcaactgaacggctggcataaagcaatgttgagccattaccagaactctgatcttgttatcaccatgccggatgccgcaagtctgcaattggggcgttacgcattaaacgagatattactgcgacaaccagagctggatgctgtgatttgcagccacgaagagattgcgctgggtatcatgtttgagtgtcagcggcgtttgttaaaaatccctggaaatatcgctgtagcttgtcttgacggttcagacagttgcgatcaaacacacccaaccttgacatccatccgtattgactacaaaaaaatggggatagagacgggtaagttactgattgggctattgaataataatcatgatgaatcagaagagtcgcgtatcgtgcaattcaactaccagatagaattacgtcagagtacatga

SEQ ID NO: 21226 - DNA, 444 bp, Escherichia coli
atgttaaaaaatctattaaatacagaggtcgttcaggtcgtggaacaggccaaagactggcgggaagccgtggcgatttcatgccggccgttgattgaaaacggttctatcgaaccgcgttatgttgatgcgatctatcgctcgcacgacactatcggtccgtactatgtggttggccctggtattgcgatgcctcatgcgcgcccggaagagggagctaacaagctgtcattagcactgaccctgatcccttcaggtgtgaattttgatgccgatgaaaacgatccagtgaaattactgattgtgctggctgcaaccgacagtaccagccacattgaagcgatttctcaactcgccaagttattcgataacgaaaaagacatacaggccattttgatggccaaaacgacgcaggacattttgtctgttattgcgcgctattaa

SEQ ID NO: 21227 - DNA, 288 bp, Escherichia coli
atgaaaattacagtggtttgcggtaacggcttaggcaccagcctgatgatggaaatgagcattaaaagcattttgaaggatttgtccgtcagcgctgatgttgatcacgtcgacctgggctccgcgaaagggacgccgagtgatatctatgtcggcaccaaagacattgccgagcagttagtcgcgcagtctgtcgcaggcaaaatcgtcgcactggaaaatatgattgataagaaagccatgagagaacgtttgtccgtggtattaaacgaattaggcgcactgtaa

SEQ ID NO: 21228 - DNA, 1257 bp, Escherichia coli
atggatttctttcgttttttgatgagcgatgtactttccgaacccgcagtgctggtcggtttaatcgccctgattggcctgattgcacagaaaaaaccggtaaccgaatgcattaaaggtaccgtcaagaccattatggggtttgtgattttaggcgcaggggcgggtttagttgtgtcgtcactgggtgatttcgcaaacattttccagcatgcctttggtattcagggtgtcgtgccgaacaatgaagccattgtttccgtagcgcagaaaagcttcgggaaagaaatggcgatgattatgttctttgcgatggttatcaacattatgattgcccgtttcacaccgtggaaatttatcttcctgaccggtcatcacacgttgtttatgtcgatgatggtagcggtaattctggcaacagcaggcatgaccggcattacgcttatagccgttggctctttggttgttggcgtggcaatggtctttttcccggctattgcgcatccgtacatgaagaaagtgaccggttctgatgacgttgccatcggccacttctcaacattatcttatgtattggccggtttcatcggcagcaagtttggtaataaagagcactcgactgaagacatgaatgtgccgaaaagtctgctgttcttgcgcgacacgccggttgctatctcttttaccatgagcataattttcctggtgacgtgcctgtttgcgggtgcagatgcggtgaaagagcttagcggtggtaaaaactggttcatgttctctatcatgcaatccattaccttcgcagctggcgtgtacatcattctgcagggtgtgcgcatggtgattgcggagattgtcccggcattcaaaggtatttcagacaagctggttccgaatgccagacctgctctcgattgcccggtcgtcttcccttacgcacctaacgctgtactggttggtttcctgagtagctttgctgcaggtttaatcggtatgttcacgttgtatctgctgaacatgatcgtgattattcctggtgtggtgccgcacttcttcgtaggtgcagctgcaggggtattcggtaatgcaacgggtggacgtcgtggtgcgattttgggtgccttcgctcaaggcttgcttattaccttcctgccagtattcttattgccggtgctgggtgatattggttttgctaacaccaccttcagtgatgctgactttggcgcactgggtattttgttagggattatcgttcgctaa

SEQ ID NO: 21229 - DNA, 255 bp, Escherichia coli
atggaacaaaaaacattatcagctgaaccccgcaggtcattttcaaatgagtttaaacttcaaatggttacactggctttacaaccaaggggttctgttgcccgtattgcccgggagcatgatatcaatgataatcttctgttcaaatggctcaggctctcgctgatcaaagggcgtatatcacggcgtcttccgttaacgaactcttctggcattggcgttgaattattacctgtggagatgacgctgggatga

SEQ ID NO: 21230 - DNA, 1317 bp, Escherichia coli
atgaacgataaaaacatcattcagatgcctgatgggtatctgaataagactcccttgttccagtttattttgttatcgtgtttattcccgctatggggatgcgcagctgcattaaatgacatattaatcactcaattcaaaagtgtattttcgctaagtaactttgcttcagcattggtgcagagcgcattttatggaggttattttttaattgcaataccagcatcccttgtgattaaaaagaccagttataaggtggcaattttaattggcctgacgctgtatattggtggttgtacactttttttccctgcctcacatatggcaacctacactatgttccttgcagctatttttgcgattgcgattggcctgagtttccttgaaactgcagcgaacacatacagttcaatgatcggtccaaaagcctatgccacattgcggctcaatatcagccagaccttttatccgattggtgctgcgtctggtattttattgggcaaatatctggttttctccgagggggaaagccttgagaagcagatgtccggaatgaacgccgggcaaattcacaactttaaggtgctgatgttagagaacacccttgaaccgtataagtatatgattatgattctggttgtggtcatggtgttgttccttttaacccgcttcccaacctgtaaagtggcacagacaagtcactataaacgcccgtcagcaatggatacgctgcgctatctggctagaaatccgcgctttcgtcgcggtattgtggcgcagttcctttatgtgggtatgcaggtcgcagtatggtcatttaccattcgtctggcgctggagttgggcgatatcaacgaacgtgatgcttcaaacttcatggtctatagctttgcctgcttctttattggcaagtttatagccaacatccttatgacgcgttttaatccggaaaaagtattgattctctattccgttataggggcgctgttcctggcatatgttgcactggctccaagtttcagcgcggtctatgtcgccgtcctggtaagtgttttgtttggcccttgctgggcgacgatctatgcaggaacactggatacagttgataacgaacatacagaaatggcaggagcagtcattgttatggctattgtcggtgccgcggtggttccggcaattcagggatatattgcagatatgttccactcactacagctttcattcctggtttctatgctctgctttgtctatgtcggagtctacttctggcgtgaaagcaaagtacgtaccgcactggctgaagtcacagcgtcctga

SEQ ID NO: 21231 - DNA, 378 bp, Escherichia coli; identical to SEQ ID NO: 7410

SEQ ID NO: 21232 - DNA, 147 bp, Escherichia coli; identical to SEQ ID NO: 8534

SEQ ID NO: 21233 - DNA, 162 bp, Escherichia coli
atgcatgctgggtgtggggaagtcgtgaaagaaaagaagtcagctgcgtcgtttgacatcactgctatcttcttactggttatgcaggtcgtagtgggtggcacacaaagctttgcactggattgcgaggctttgtgcttctctggagtgcgacaggtttga

SEQ ID NO: 21234 - DNA, 1578 bp, Escherichia coli
atgttggagtttagtgttattgaaagaggcgggtatattcctgcagtagaaaaaaataaggcattcctacgagcagatggttggaatgactattcctttgttacaatgttttatcttactgtctttgatgagcatggtgaaaaatgcgatatcggaaatgttaaaattggttttgtaggtcaaaaagaagaagtaagcacttattcattaatagataaaaaattcagtcaactccctgaaatgtttttttccttaggtgaaagcattgactactatgttaatctcagcaaattaagcgatggttttaaacataaccttcttaaagctattcaggatttagtagtatggccaaatcgattagccgacattgaaaatgaaagcgtccttaacacctcattacttagaggggtaactctttcagaaattcatggacagttcgcacgtgtgttaaatggtttgccagaattgtcagatttccacttttcatttaatagaaaaagtgctcccggattcagtgatttaactataccttttgaggtgacggttaattctatgcccagcacgaacattcatgcttttatcgggcggaatgggtgtggtaaaacaacaattttgaatggaatgattggtgcaatcaccaacccagaaaacaatgaatattttttctctgaaaataatagacttatcgagtcaagaatcccaaagggatattttcgatcgcttgtttcagtttcgtttagtgcatttgatccttttactcctcctaaagaacaacctgacccagcaaaaggtacacaatacttttatattggactcaagaatgctgccagcaatagtttaaaatcactaggcgatctccgcttagaattcatttcagcatttattggttgtatgagagtagatagaaaaagacaactctggcttgaagctatcaaaaaactaagtagtgatgaaaacttttcaaatatggaactcatcagcctcatttctaaatatgaagagttaagacgtaatgaaccacagattcaagtggacgatgataaattcactaaattgttttatgacaatatccagaaatatctgcttcgaatgagctctggacatgcaattgttttatttactatcacaagattagtagatgtcgttggcgaaaagtcattagttttattcgatgaaccagaggttcatctgcatccacctttgctctctgcttttttacgaacattaagcgacttactcgatgcacgcaatggtgtagcaataattgcaactcattccccagtagtactgcaagaggttccaaaatcctgcgtgtggaaagtcctacggtcaagagaagcaataaatattatccgtccggatattgagacattcggtgagaacttaggtgttttaactcgtgaggtgtttttacttgaagtgacaaattctggataccaccacttattatcgcagtccgttgattcagagctttcttatgaaaccattctaaaaaattataatggtcagataggattagaaggtcgaaccgttttaaaagcgatgataatgaacagagatgaaggtaaagtacaatga

SEQ ID NO: 21235 - DNA, 891 bp, Escherichia coli
atgaaaaaactacctcttccagcgagaacttatagcgaaatgcttaataaatgctcggaaggtatgatgcagataaatgttagaaataatttcattactcacttccccacttttttgcagaaagaacaacaatatagaatattaagctcgacaggtcagttatttacctacgacaggacacaccctcttgagcctacaaccttagtagttggtaacctgacaaaggttaaattagaaaagctttatgaaaataatctccgagataaaaacaaacccgctagaacatattacgatgacatgcttgtttcatcaggtgaaaaatgtccattttgtggtgatataggacagacaaaaaatatagatcattttcttcctattgcacattatcctgaattttcggtgatgcctattaatttagttccatcgtgccgcgactgcaatatgggagagaaaggtcaagttttcgcagtagatgaggtacaccaagcgattcatccctatatcgacaaggacattttttttcgtgagcaatgggtatatgcaaatttcgtttccggaactccgggtgctatcagtttttatgttgaatgcccggcgaactggaggcaggaagacaaacacagagctcttcatcatttcaagctattaaatattgctaacaggtatcgtttggaggcagggaagcacttgagtgaagtgattactcaaagaaactctttcgtaaaagttataaggaaatatagttcaaccgcaacgtttcagcagctacagtcagaatttattgaagcaaatctgaaacctattatagatttgaatgacttccccaattattggaaaagagttatgtatcagtgcctagcaaactcggaagattttttcagagggatctag

SEQ ID NO: 21236 - DNA, 621 bp, Escherichia coli
atgcgtaatgtgtgtattgccgttgctgtctttgccgcacttgcggtgacagtcactccggcccgtgcggaaggtggacatggtacgtttacggtgggctattttcaagtgaaaccgggtacattgccgtcgttgtcgggcggggataccggtgtgagtcatctgaaagggattaacgtgaagtaccgttatgagctgacggacagtgtgggggtgatggcttccctggggttcgccgcgtcgaaaaagagcagcacagtgatgaccggggaggatacgtttcactatgagagcctgcgtggacgttatgtgagcgtgatggccggaccggttttacaaatcagtaagcaggtcagtgcgtacgccatggccggagtggctcacagtcggtggtccggcagtacaatggattaccgtaagacggaaatcactcccgggtatatgaaagagacgaccactgccagggacgaaagtgcaatgcggcatacctcagtggcgtggagtgcaggtatacagattaatccggcagcgtccgtcgttgttgatattgcttatgaaggctccggcagtggcgactggcgtactgacggattcatcgttggggtcggttataaattctga

SEQ ID NO: 21237 - DNA, 651 bp, Escherichia coli
atgaaagtatcagttccaggcatgccggttacacttttaaatatgagcaagaacgatatttataagatggtgagcggggacaagatggacgtgaagatgaatatctttcaacgcttgtgggagacgttacgccatctgttctggtcagataaacagactgaggcttataaacttctgttcaatttcgtgaataaccagactggcaacatcaacgcctcagaatactttactggggctatcaacgagaatgagagagaaaagtttatcaatagcctggaattattcaataaacttaaaacatgcgcaaaaaatccggatgagttggtcgcaaagggcaatatgcgctgggtcgcccagaccttcggggatatcgagttaagtgtcacttttttcattgaaaagaataagatatgtactcagacgttgcagctgcataagggccaaggtaacttgggcgttgatcttagaaaggcttaccttcccggcgttgacatgagggattgttaccttggtaaaaaaacaatgaaaggtagcaatgatatcctttatgagagacctgggtggaatgctaacctgggcgtgctaccccggacggtgctaccccggacggtgctaacccggacggtgctaacctggacggtgctaccgtga

SEQ ID NO: 21238 - DNA, 1332 bp, Escherichia coli
atgaataaagcaataaaagtatcattgtatatatcttttgttttgattatttgcgccttatctaaaaacataatgatgttaaatacatctgatttcggaagagccattaagccattaattgaagacataccagcatttacatatgacttacctttattgtataaattgaaaggtcatattgattcaattgatagctatgagtatataagttcatatagttatattttgtatacatacgtcctgtttattagcatttttactgaatatcttgatgctagggtgttatcgttatttctaaaagtaatatatatttattcattatatgcgatatttacttcatatataaaaacagaaaggtatgtaactttatttacattctttattttagcttttcttatgtgttcttcatcaacactgtcaatgtttgcatcattctatcaagagcaaatagttataattttccttccatttttggtgtattcattaacatgcaaaaacaataaatctatgcttttgctatttttttcgttgctaataatatctactgctaaaaatcaatttatattaaccccactaatagtgtattcatattatattttttttgatagacacaaactaattattaaatctgtaatatgcgtggtgtgcttgcttgcgtcaatatttgcaatatcttattcaaaaggtgttgttgaattaaataagtaccatgcaacatacttcggtagttatctttatatgaaaaacaacgggtataaaatgccatcgtatgttgatgataagtgtgttgggttagatgcctggggtaataaattcgacatatcatttggcgcaaccccaacagaagttggaacggaatgtttcgaatctcataaagatgaaacgttttcgaatgcactctttttattggttagcaaaccaagcaccatcttcaaacttccatttgatgatggtgtgatgtctcagtataaagaaaattatttccatgtatataaaaaactacacgtaatatatggagaatcaaacatactaacgactattactaacataaaagacaatatatttaaaaacattagatttatatcattgttattattttttattgcttctatttttattagaaataataaaataaaggcatctttatttgtagtatctctttttggaatatctcaattttatgtgtcatttttcggggaaggatatagagatttaagcaagcatttatttggaatgtatttttcgttcgacctttgcttatacataacagtcgtttttttaatttataaaataattcaaagaaatcaagacaatagcgatgtaaagcactaa

SEQ ID NO: 21239 - DNA, 897 bp, Escherichia coli
atgccgtggggcgacaacagtaccgttagctataacggcaactatggcagtgggacggacagcagccaggtcggttattttagccgtgtcgatgacgcgactcactatcagttgaacatcggcaccagtgacaaacacaccagcgttgatggctactacagccatgatggttcgctggcgcaggttgacctcagtgcgaactaccatgaagggcaatacacctctgcgggcttgtcgttacagggcggcgcaacgcttactacccacggcggcgcacttcaccgtacccagaatatgggcgggacacgcctgctgattgatgccgatggcgttgccgatgttccggtggaaggtaacggggctgctgtttataccaatatgtttggtaaagccgtcgtttctgacgttaacaattattatcgcaatcaggcgtatatcgacctcaacaaattgccggaaaacgccgaagcaacccagtcggtggtgcaagccacgctaactgaaggagccattggctaccgcaaatttgccgtcatcagtggtcaaaaagcgatggcggtgctgcgtttacaagatggcagccatccaccgtttggcgcagaagtaaaaaatgataacgagcagacagtgggccttgtcgatgatgacggtagtgtctatctggctggggtgaaacctggcgaacatatgagtgtgttctggagtggtgttgcgcattgcgatatcaacctgccggacccgctgcctgccgatctgtttaacggcttgttactgccatgccagcataaaggcaacgtcgcgccggttgttcctgatgacataaagcctgtcattcaggagcagacgcaacaggtgacacccaccgatccccctgtttctgtttcagctaaccaataa

SEQ ID NO: 21240 - DNA, 1242 bp, Escherichia coli
atggcaagaaaaaccaagccgttaactgatacggaaatcaaagccgccaaacctaaagatgccgattaccagctttatgacggtgacgggcttactctgttaatcaagtccagtggcagtaagctttggcaattccgttactatcggcctttgaccaagcagcgaaccaaacagagcttcggtgcctatcctgccgtctcgctttctgatgcacgtaaactcagagccgaatctaaagttttattggcgaaagacattgatcctcaggaacatcagaaagaacaggtgaggaattctcaagaggccaaaaccaataccttcttgttagttgccgagcgttggtggaatgtgaagaaaaccagcgtaacagaggactatgccgacgatatctggcgctcgcttgagagagatattttcccggcaatcggtgatatcagtatcactgagattaaggctcatactctggttaaagcagttcagccggttcaggccagaggtgcattagagactgttcgccgcctttgtcagcgtattaacgaagtcatgatttatgcgcagaacacaggcctgattgatgctgttcctagtgtaaatatcggaaaagctttcgagaaaccgcaaaagaaaaacatgccaagcatccggccggatcaacttccgcagctaatgcacaccatgcgtacggcaagtatcagcatgtccacaagatgcctgttcatgtggcaacttctaaccatcacccgccctgccgaagctgctgaggctcgatgggatgagatcgatttcaatgctagcgaatggaaaattcctgcagctcgaatgaagatgaaccgggaccatacggttccactatctgatggggctcttgctattctggaaatgatgaagcctctcagtggtggccgagaatttatctttcctagccgtatcaagcccaaccaaccaatgaatagccaaacagtgaatgcagcactcaagcgtgctggcttaggaggtgtacttgtttcacacggcttgcgttctatcgccagtacggcactcaatgaggaaggatttccacctgatgtcattgaagcagcgcttgctcatgtagacaaaaatgaggtgcgtcgcgcttataaccgcagtgattatcttgagcaacgtcgtccgatgatgcaatggtgggctgatctcgtaaaagcagcagatagtggtagcatcgttttaactcatttgagcaaaattcgtcttgtcggataa

SEQ ID NO: 21241 - DNA, 957 bp, Escherichia coli
atgggtatctttaaggcaaaaaacccatgtaccaaaaatacaatttttacaacctctaatacattgatttatggtggttttatgatttctctgaatgatttttatgaacaaatttgtagaaaacgacgtgatctcgcctatcacatgtccgaatgcgaatgggcggtggatactgatgttctagaggaagatcatccggaaatacggattgagctaggcagaatgcgagagcaattctggagctctgagaaaataggtactcgtgtgaggttatattcctgcgatgtaccatgggaaacaaggcaccatacagtgaatgggcaactggagataaaggaagaatacactgaattatatgatccagctcaagaatgctggaaaaatctaagttcaaaccttaccaaggaaacgtttttacctcttgttatcgagccattttccattaatgacattttcaaggcacaccttatgttcgcctcaatctcttttttctggggaaaatctatcatgtctgaaaatgaaaacgttgcctttaaagcatttcatcgggctgcggagttatttgataagtgcataggtatgacttggtttaacatctctgtttgtaatcaaaaaaaattatcagaagtcaggcggagtgcaggaaagaagggtggcaaaagcaaagcggaagtgtaccatatcattcaactgaagttggttgagctaattaatgactctgttccgaatgatgggtggaaaaataaggttgtagcagttaatgaacttatcgaaccgctatgggattttattcaaatgtcagagtttgagataaataatcaaaataaaaaatatcgtgtagcaacaatgagtcaagatgctttggttgatactattttaaatcaatggtctttaaaaaatgaagatgtaaaacaagctttcgatagcgctgttcgtagaaaaaaaagaagtaaataa

SEQ ID NO: 21242 - DNA, 213 bp, Escherichia coli
atgaacaatcgatcggccgttagaatactacggttaccagcggttatccaaaaaacaggtatggcacgggccaccatctatgactggttgaaccccaaatcaccacgatacgatgccacctttcccaaaaagcgaatgctcggcgtgaaatctgtcggatggattgaggccgagattgatgagtggttatcacaacgctgtaaacttatttga

SEQ ID NO: 21243 - DNA, 1410 bp, Escherichia coli
atgttcaatggtcgtcctttccctgtagatgcatttcctaaaattatcaggaatgcaatttatgaagtggaacagcatacgcaggcccctcaaggtttgattgctgcttctgctcttggggtaatttctcttgcctgtcagaaccggattgatgtttgccgattgaataatctacgtggcccggtatcacttttcttaatgactctggctgaatcaggtgaacgtaagagtacggttgataaactgctgatgaagccattatatcaactggaagaggatttatttgaaaaatacacccacgatcttaccgcatggagaaatgatgaagcaatttttaatattgaaaaaaaagcactgatgtcaaaacttaaatcagatattcgacgtaacaaagatcacttggcaacaaatgaaagacttaaagaactacttacgacaaacccgaaagctccagtgagattcaaatttttatttaacgatgccacacctgcagctattaaagctcatctctgtgggcactggcgatcagtcggcatcatgtctgatgaagctgggatcatttttaatggttacacacttaacgagctgccgtttatcaataagatgtgggatggttcaatatttacggtggaaaggaaaaacgagcccgagaaattaattagagatgcaagaataacactgtcgctgatggtccagcctaatgtttttaagggttatatcgacaggaaaggagatatggcaaaggggattggattttttgcacggtgcctcatgtgccagcctgcttcaacacaaggtaacagaaaaatttccaacccaattttttcaaatgaacatttgccggtatttcaccaacgtcttatggaaattgttaatgagagcatcattaaaattaatgaaaataatcgcatctgcctccgattctctgcagaagcagaaagacattggatcgaattctacaaccaggtcgagtcagaaatgagaatgattggccttctttatgattttaaggattatgcttctaaaatggcggagaacatggcgaggcttgctgccttacttcattacttcagcggtgatggaggcgatatatctgttaccgcagtaaaagcagcagtggagatagtggcttggtatattgaagaatacatccgcttgttctctaaaaaagaagagttttctttagatgtttcagaagcagatgagctttattgttggataaaagattactgcacgcaaaaattttcttcctgcatcaagaaaaatattatcttacaatttgggccaaataaatttagaaatcgtgacaaggcaaatgaattaattagaatcttaatttcacaaaacaaaatatttatatcttcatggggtaaaacaaaaataataaacataactcattgtgttttttga

SEQ ID NO: 21244 - DNA, 627 bp, Escherichia coli
atgacatacgatagtgaattcggatcacatgtatccctatatcgggatagaatcaaacaggttattgatgactccctaaacgaacatcttaactcaatgattctacgtgttgatctgcatgacccaattgatacagaaaatatggataacccattctttcaacccagggttgactctggtgctatatctcgctttaccagtgcgttaaaagcaaagcttaaacatgataagcatattaaaactcaacggaaagactggcctgatagtcgacattccactttacgttacgcatgggtcagagaatataccaaaaatagaaagcggcattaccatttgatactgtgtttcaatcaggatgcttattatcatttaggtgattacgacttaaaccgtaacacgttacgtacaatgataacgacagcttggtacagtgcacttggcatccctatagatagctcggggaagttagttaattacccgccaaatggcaaataccttctcaatcgtaaaagggacaactttgagcagacttatagcgatttgatgaatagggtggattacatgaccaaagtaaggactaaaatagtcggtgacggagaccgtaatttcggctgcagtcgcgggtaa

SEQ ID NO: 21245 - DNA, 2190 bp, Escherichia coli
atgacagagatctatgaacaggcgaaacatagcctgcagggtgaggacttctcatcgttcaattatctgtttgcggttaacaagctgttgtctaaccctgtttcgtatgacttgggacgggacttgatcgtgcgagctctcgattcgcgcgagcggttttccgagcacaccacaattttgaaaaatatggtgagaaaatcaggtttgttcccgtatctcaaaaaggagttcaccagcctgacaccggatgacctgagggtgcttgagctataccggacgccattctcggatggttatgttttccactcaatgcagttccacatattcgatctgctcaagtctggtcaaaacgtggtgctgagtgcacctacaagcatgggcaaaagtgcaatcgtcgattcattgctcggcatgggaactttgaaacggcttgttctggttgttccaaccgtggctcttgccgacgaaacccgtcgccgactgcaagagcgattcggtgaccgatatcagatcatccaccacagttcccaagtgtgccattccgatcaggctgtttatgtgttaactcaggagcgagtgaacgagcgtgacgacatcgtcgacattgacctcttcgtcattgacgagttttacaagttggcgttccgacaactgaaaagcggggacattgatcatcaagacgaacgagtcatcgagctcaacattgcgttaagcaaactgcttaaggtctccaggcagttttacctgacgggaccgttcgttaacagcattcgcggtctcgaaaaacttggatatccgcatactttcgtttctaccgacttcaatacagtcgcgctagatgttaagacgttcggcatcaaagcgaatgacgacaaagccaagctcaaagcgctgggggaaatcgcgcacgcatgtgtcgacgcaacgatcatttattgcaagtcaccaactgttgcgggcctggtggcgcgcgagctgatcaggcttgggcatggcactccgactgagaatccccatgtcgactgggtcagcgaagagttcgatgccgactgggattacacagtcgcccttagaaacggtattggcttgcattttggcgcgctaccgagggcactgcagcaatacactgccgaccaattcaatgctggaaaactgcgctttttgctctgcacctccacgatcattgaaggagtcaacactatcgctaagaacgttgtgatctacgacaaccgcgatggaactcgcagcattgacaaattcacccatgggaacatcaaaggtcgcgccgggcgcatgggcgttcacttcgtcggcaaaatcttttgcctggaggaaatcccggaagacaatctcaatcaagaggtggatattccgctcggtattcagggcattgataccccaatcaacctgttagccagcgttcaaccagaccacttgtccgagttttcacaggatcgctttgatgaggttttcataaacgaccgtgtttccatcgaccttgtgaagaagcattcgtacttccgtgtcgagcagttcgaaatgctgcaaagcatgttcgagatgatggacgataacgaattttcctcgttagtgtttcactggactcccgcgacaaacttcctcaagacctttgcaaagatcattgccagactggttccccatacgttcagtcgcaatggggtccctgttaagcctacggatgtcatgatcgcaaaacttgccggctatttaagtgctgaaagttattcggaatatctgaaaaatcagatcgattatgcacgacagtggatttctgaaggggagaaacgtactctttccattgccctcaacaatgatttgaagctcataaccaataccttcggctataccctacctaaggtgctcagcttgatggaggatgtagttaaacaccacgctgtaaagcgtggtatacgcagcaaagtcgattacacacatgtcaaattggcgttcgaaagtttccatctaccaccaggtgtcaatgccttagaagagattggcattcccattcagacgttacaccgactggtagacttgctggaattttccgacgaggctgatgtggatgagttgagccagtatcttcgggatactcaggacatttggagtagatcgattgggtacgttgatcagatgtttatcaggcgcgcgctcggtattagacgacattga

SEQ ID NO: 21246 - DNA, 1617 bp, Escherichia coli
atggagtcgaacgattcaggcggagtagccgccaagcacggtttcttatttcaggactgcgtagccgcttaccatgtcacccgaatgcttcgtgacaagactatccgcagtgtgcgctgcgaggtcacagacgatatcgacattgtatctgatggatacatcgacttcgttcaggtaaaaagcaccggcaaaacacgttggaacatttcggacatcgttcagaattcaaaaggtgctgataaaaagacgatcccctgcagttcaattttgcacaaatcaatgcagtgtgagtctgacctgtcccttggacgtaggtactccatcgtcacagaggaaaaggtcaacaaaacccttgagtacttgacgatcagcccaaacgcccgactagataagccaggtcgacaggaactcatcgatgacctcaacaaacgcacagacaattttttaacagactcaggtataagcgtttcagattggatcgatgcggctacatgggaagtgttttcatccctgcgcgaactggaacttctagggatcaagaacatacggctggcctcccaagatctacatggggtcattctcagttccgaaaccgtcgccgaagacatttggtgccgcatccttgatactgtgacgcgcaagggcgagcattctcgacgcattcacagtgctgatgacaagtcctacttacgaccagacctacttgagtggttcaagcagcgtgtcgaagatgaccaatctcggtcaggccgcaaaatctacgtcaaacgggacttaccccacatccttacgccatttagagcgcctatggcttcggtctgcgctaagcgtaaaggccaggttctacatcagcagtactcacttaagaaataccgctacaagcacatcgcggataacgtctgtcaatggttggatgaggtttttctccgaccaaaagaaatgtctgatattcataaactgacattcattgaaaagcgagaacgactaaagaattccgtcttcaaatcgctccatgacgtcagcgaatttttgggtcgagtgctgttgcacgcaacgatccggcagcaccacgaaagccagcctattccttgcatgctatacgtggaaaaagcaggggccgaaaaaattcttgaaaacgtgcatatcgttcgccgcgatccagaaggtgatcagctttggattggcttcagcgagttggtgactgatattaacattgccgtcagattgccggagatacgggatcagttgtacgaggacatttcggattgcatcgataccgcgcgcaaaaaaatcctcgacattaaagacgataactacctgcttcgccacgacattgacgaaattcttgatggcagccaacctttcgatgctcacctcgatcgtttcacgtttgttctgttcgtgggctacgactctaatctactaaccgagcctgaaacgccggggttcgaggatgacctggagaaagaaacagcggtgctgttcgaaaaattcgcggctgacctcatcgaggattcgccgtttgcgaatctttgcatccacgtattcatttatccagccccgagtcttgagcggttaacccaattagttgatgagaaggtgagagaggtcgtatga

SEQ ID NO: 21247 - DNA, 264 bp, Escherichia coli
atgggggatgatgtccatcgtttcggtaacctcttcctgatctcaccaagcagcaactcgatacttagtaattattcgccagcagacaagaaaaaattctacgtcgaaacagaacgagcagagagcccaaaacaagccatcatgatgagctataaggagtggggtccggatgggcaaggcatcaacaatatagaaagccatgaacacgcgatgttgacattgctcaaagagcatcgagatatgaccctaccaaccaggaaataa

SEQ ID NO: 21248 - DNA, 1074 bp, Escherichia coli
atgacaatcaggagttacaaaaacttaaatctggtcagggcaaatatcgagactgaatccagacaattcattgaaaataaaaactattcaatccaatcaattggtcctatgccagggtcaagggctgggcttcgggtcgtatttaccagaccaggggttaacttggcaactgtggacattttttataacggggacggttcgactacaattcaatatctcactggagccaatcgttctctgggccaagagttagcggatcatctttttgaaaccatcaatcctgctgaatttgagcaggtaaatatggtactgcaaggatttgtagagacaagcgttctacctgtacttgagctatcagcagatgaatcgcatatagagttcagagaacactctcgtaacgctcataccgtagtgtggaaaattatttccaccagctatcaggacgaattgactgtgagcctgcatatcacaacaggtaagctccagattcagggccgaccgctgtcatgttacagagttttcacgtttaacttggcagccctgcttgatttacagggtttggagaaagtgctaatccgccaggaggatggtaaagctaatattgttcaacaggaggttgcccgcacttacttgcagactgtaatggccgatgcttacccgcatctccacgtgactgccgaaaaattgctcgtttcagggctatgtgttaaactcgccgcccctgatttgcctgactactgtatgttactttatcctgaactacgcaccattgaaggtgtcttaaaaagtaagatgagtgggttaggcatgccagtacagcagccggcaggttttggaacttactttgataaacctgctgctcattacattctgaaaccgcaatttgcagctactcttagaccggaacagattaacatcatcagcacagcctatactttttttaatgtggaacgtcattctctgttccacatggaaactgtggtcgatgccagccgtatgatttctgatatggcccggttgatgggtaaagccactagagcgtggggaataatcaaggacttatatattgtttga

SEQ ID NO: 21249 - DNA, 372 bp, Escherichia coli
ttgtttgaaatcaccggaattaacgtctcaggggctctaaaagctgtcgttatggcgaccggcttcgagaaccctttgtcctcagttaatgaaattgagacgaaactttctgccctactgggtagtgagaccactggtgaaatcctttttgacctcttgtgcgctaacggtccagagtggaaccgcttcgttacgctggaaatgaaatatggccggatcatgctggatacggccaaaattattgatgagcaggacgttccgacacatatcctgagcaaactgacttttactttacgtaatcatcctgagtacctagaagcctctgttttgtctcccgatgatgtacgccaagtcctgtcaatggatttttga

SEQ ID NO: 21250 - DNA, 864 bp, Escherichia coli
atgaaaaattttgaagttctgcagccactacagaactccctttccggtctaccgctatgggtatctgaacgtatattgcagcagataaatcagttaacccactacgagccagtgatcggcatcatgggtaaaactggggcgggaaagagtagcctttgcaatgccctgtttgccggtgaagtatcgccggtcagcgatgtagcggcctgtacacgtgatcctttacgctttcgcctgcagattggagaacactttatgaccatcgtggatctgcccggcgtgggcgaaagtggcgttcgcgataccgagtatgctgcgctgtaccgcgaacaacttccccggctcgacctgattctgtggctgattaaggctgatgatcgggcactggcgactgatgagcatttttaccgtcaggtgattggcgaagcataccggcataagatgctgtttgttatcagccagtcagacaaagctgaacccaccagcggtggaaatatcctttccacagagcagaaacaaaatatcagccgcaaaatctgcctgctgcatgagctattccagcccgtgcatccggtgtgtgccgtgtcggttcgcctgcagtggggactaagggtgatggcagagcggatgattaagtgtctgccgcgtgaggccagcagcccggtagtagcgctactgcaacatccctttcgaacaacggtagcccgggagcaggcacgtgacgatttcggtgaaaccgtaggtgccatactcgatacggtaagcacctttccccttattcccgccccggtgcggaccattattcaggccgtgcgttcctcggtggtgtcagtggcccgcgctgtctgggatttcttcttctga

SEQ ID NO: 21251 - DNA, 822 bp, Escherichia coli
atgacccgtctggcttcgcgctttggcgctgcaaatcttattcgccgtgaccgtccgttaacccgtgaagagttatttcgcgtggtgcccagcgtattcagtgaggataaacacgaatcccgcagtgaacgctacacgtatatacccacaatttccctgctggacagcctgcagcgggaaggcttccagccattctttgcctgtcagacacgggtacgtgacccccgtcgtcgtgagcatactaagcatatgctgcgcctacgtcgggaggggcaaattaccggtaaacaggttccggaaattatcctgcttaactctcacgatggcaccagttcgtaccagatgctgccgggcatgttcagggcggtgtgccagaacggtctggtctgcggcgagtcgtttggcgaggtgcgggtgccacacaagggggatgtggtgagtcaggttattgagggggcgtatgaagtgctggggatttttgagcgtgtggaagaaaagagggatgccatgcagtcgttgcttttaccgccacctgtgcagcaggcactggcaaaagcagcgcttacgtatcgctttggtgaggaccaccagccggttactgaatcgcagatactctccccacgccgctggcaggatgagagcaatgacctttggaccacctatcagcggattcaagaaaacctgattaagggcggactcagtgggcgtaatgctaaaggcggacgaactcatactcgtgccgtgcgtggcattgacggggatgtgaagcttaaccgtgcgctgtgggtgatggcagaaacactgctcacgcaactgcagtag

SEQ ID NO: 21252 - DNA, 702 bp, Escherichia coli
atgacacaggcagaacgccgccatgaccggctggctgtcaggctgtcactgataatcagccgtctggttgcgggtgaaacgttgagcgtgcgcaaactggcggctgagtttggcgtgtcagtgcgcacgctgcggcgtgattttcgtgaacgactgatgtatctggacctggagtatcagtccggatactgccgcttacgcactgctggcagtgagatgcagatggtgcccgacgtgcttatctttgcccaccgcagcgggctggccgggctttttcccggccttgaccgccgtctggtgaatgcactgctgatgtgcgatgagtctccctgcgtgatagcaccagccaatccggttccttcgccttcaggagcattgtctttctggagactgattcaggccattaccgggcgcaggcgggtgacgctgattgcagaggggcgacgctgtgagcgcctagctccctgccggttactcatccaccagcagacctggtatctggtggctgaacacgaagggcatatcgccgtattcacacttgatgaaatccatctgattcagcctttgcaggagacttttcgccgcaatgacagtctgtgtcgcctggttgaagacccggtcttcattcaggccttaccccattttcgctttatccagcattcactgcttacgtttgttccggccgacagcccaccggaatag

SEQ ID NO: 21253 - DNA, 237 bp, Escherichia coli
gtgcccgttattgccattatcgccattgttatcatcgtcatcattctgaacaaaaccggagtgtccgacagcctcacggccctgacacttgcaaccgttgccgcactactgacgggaggtggtgcagccggtgctgccagtgtcgcgctgacgccgttcgtcggcgtgccggtgggtatttttgtgggaatttatgtctttgccaaagtggttcgtctgatttcagggaaaaaataa

SEQ ID NO: 21254 - DNA, 444 bp, Escherichia coli
atgaaacgtaaaacactacctctgctggcgctggttgccacctctctgtttctgagcgcctgcgatgacaggagtgatgacctcaaagctatcagtaaatttaaggacctcacgcccccgcgcttcagcgatgtggtcagccgtcaggatgatgtcagcgaagaatggtcacaggttggcttctcatccggtctcaccctgcaggtcttacgtacccgtgagtcgcccgatggttgcgagggtggcagttactactatctggtagatatggaggagaaaaccgtccagccgctgatgaatgcgctttgtattgccgacaatatcaaactggaataccacgaagttacggacccgtatacgaaagaaaaatacttcgaatattcccatgacggcaaactgatgggacggctgctgataccgtcaaaccctgataaccgggaataa

SEQ ID NO: 21255 - DNA, 468 bp, Escherichia coli
atgaaaatacgttcactaagccggtttgtactggcaagtacaatgttcgccagctttacagcctctgcggtccccggactctggcaacaggggtacggtcagggcaatgcggaatacagtgtgacggatgccagcggaaagatgtttaccatcaactgcacgggaaatccggaccagaacggtatttaccagcactcggtttttctgatcctcgccggggataaaacggtcagctcgcatgatgacagtaccggcatcacagtggtgatggaccataagcaatatgccattccctcaacccttggctggcgtaacggagataatgcctggttcagcttcatcatggatatccgtaaggcccggcagttcgacgtctacgtcaatgaccagaaagttggatcgtttaaccctgatgttcggaatgcacaaaaggtcctgccaacattagcggactgcactaacgactga

SEQ ID NO: 21256 - DNA, 315 bp, Escherichia coli
atgagcaacattaccatctatcacaacccggcctgtggcacctcacgcaacacgctggagatgcttcataacaacggcaacgaaccgacaataattaattatctcgatatgccaccgacccgtgatgaactgattaaacttatttcagatatcttcagtgacaaaatcatcgagtgcatcagggagcaatgtcacctgatgcctgccttgtccttgaatgtgattggccatgttgatatccgcagtattcattcatatctttttaattttaatgaaaaagttagtccgtctcatgggtttatcaagaatggttga

SEQ ID NO: 21257 - DNA, 594 bp, Escherichia coli
ttgctgcttgtcggtttcttctttctggagccgcagggaatcctggtcagtgcgatagcggccgctggcgcagcagtgctgtttgtggtggcgaaaagaggtcattcgatcaacaccggaaaagtcctgcgcggtgcgccatggcagatcgttattttctcactgggcatgtacatcgtggtctatggcctgcgcaatgcagggttcacggagtacctgtctggcgtgctgaatctgctggcagacaaggggttatgggcagcgacgttcggcaccggcttcttgacggcatttctctcatcagtgatgaacaatatgccgacggtgctgattggtgcgctgtcgattgacgggagtacggcgactggcgtcgtcaaagaggcaatgatttatgccaatgtgattggctgtgatttaggcccgaaaatcaccccgattggcagtctggcaactctgctgtggctgcatgtgcttgcccagaaaaatatgacaatcacttggggatattacttccgtaccggcattgtcatgactgtgccggtgctgtttgtcactctggccgcgctggcgtggcggctctctgtcactttgtaa

SEQ ID NO: 21258 - DNA, 201 bp, Escherichia coli
atggctgcaggatttattgcagatacggccagcctgccgctcattgtttctaacctggtgaatatcgtctcggcggacttcttcggtctgagctttgcgcagtacgcctccgttatgatctccgtggatgcggcagcgattgcggccacgctgattatgctgtatctcttctttcgcagagttattccggcaacgtattaa

SEQ ID NO: 21259 - DNA, 1704 bp, Escherichia coli
atggcttttgtatcagaaagagaaattgtaagaaagatatttagcaaaaaaattgactttacgatcttggcatttttctatatttcctctattttttttcttctttgtagtggcgttctctttcaatattttaccgctgccttcacaaaaggtaattgttatgaatgctcaatgaaacttgattacataaaacaattttatttttcactggaaaccgcatggtacctcatatctgctgttgcagtatttattgcatctgtttttatacagcatagaattaaagcttatttaacattattagctattacatggattgtactaacaataacagatgtggcgttaatacacgccttagacaatatagccatgaataatattttgttaaatatactatataatctttttggggcgattttattgtcactgtttatgtgtttatcaaattccctccttttccaccttaataagataaaacatattccaatgattttatcggcaatgattccattagtttccgcaataataatagccatactcataaccgctgttatatatttattgtttgcccggcaggcggtagagattgagatggatatatctgaaggttcagacatcgcatatgtaggtgtaaaagataatgaggaatcatttgggtttttaaatgataaaaaaacagacacaccaacgtatctggatgtaatcaaaaatggtagtttgatatataatgatacacagggtttaagtggtgctgatatttatattgtctccggttgttatgcccttccagatttacttcgcaatgtaccgcttgatgctaaaaaatcttttctgaatgtaaaaaagctagaaatcacacagaaacttccaatgatggggttcatacaaggtgaatccgctgatgtgatgcctaaagcagcatccaggttaagtttgagcaagcaagatgataaatttatgctagcctcaagtgttactgactctcaaataaaatttaaatcaaacaatgcacaattgatggttgctttcgcatttatgccaataacaacgaatggtattttacatgattatacatacgatataataataaatgataaaaaatataaaattgaaaatcatgttgcacctctatctaggcttgataaaaataagaagatgaagtgtgaataccagcaaatatcggatttaacaaatacgtataacattaatgcaaattacttaacgggttttttacttgtcctaaaaccagatgatattattaattacaacaatagcccttccgtactactcaagactgattttgcgttctataaaaaaacataccagaagcttgataaaatatatgatgacataagcaatggaaaattatcttcactgagagcaacaggtatctcccagtttagtatcaacgggaaacatttgtcgttaaggccagaatcggagattattatttctgaagggagtttgtatggactagttaataaaagcaaaaaaatcaaaatatatggcacagcagatcttgtttttgttgataacaagataatgaaccttcgtaaaataacttatttgcaatctaagctagaaatttttggttcttctattatggatatattaaagtatatatttggtttaggtctgctagcaatttctataaaattcattcattcttactttaagaatgatgtgaatgaaaatttattcttgtaa

SEQ ID NO: 21260 - DNA, 459 bp, Escherichia coli
atgacaacacagacacagtacgacctcgtacccgctaacggatccgaatttgagttgagcgtaacgcaggtacccgatgaacagcatatccgcttctggccgcagcactttggcaccatcccgcagtggataacgctggaaccgcgcattttcgcctggatggaccgcttctgtgatgagtactgcgggggtatctggtccttttacacgctcagcaatggcggagcgtttatggctcctgatgctgacggtgacgataaatggcatttgctcaacggcatgaatggcaatggtgcggaaatgagcgcggaagccgcaggtatcgctgtctgcctgattgaatatagccatcacgcctgcctcaccgaatgcgatgccatgacggagcactattaccgcctgcgggattacgctctgcagcaccctgaatccagcgccattatgcgcattattgattaa

SEQ ID NO: 21261 - DNA, 483 bp, Escherichia coli
atgatggaacagtcactcatcccacagacaccggtacttccactgaccgcacaacgcacggtaaaacgcgccttaacgctgcttgaccgacacctgcgcgaaacaggcgtggcattcacctccactcaggctgctcgtgactggctgaagctgaaaatggcggggctggagcgtgaagaatttatgatgctgtatctgaaccagcagaaccagttgattgcccacgaaaccctgtttgccggttctattagcagtaccgaggtacatccccgtgaggtggtcaaacgcgccctgtatttcaatgcagcagcagtgatactggcgcataaccacccctccggcgacactactcccagccaggcagataagactataacgcagcgtctggtgcaggcgcttcagctcgttgatatccgtgtccctgaccatctgattgttggtggcaggcaaatctattcgttcgcagaacacggtctgctttga

SEQ ID NO: 21262 - DNA, 201 bp, Escherichia coli
atgagaattatcagtaaacgccgggcaatgacgatataccgccagcatcctgagtcccgaatctttcgctactgcaccggaaaatatcagtggcacggtagcgtctgtcattacaccggcagggatgttccggatatcacaggagtcctggctgtgtacgccgaacgccgcaggaccgcagcggaccgtatgcttgactga

SEQ ID NO: 21263 - DNA, 330 bp, Escherichia coli
atgaacactctacctgctacaatttcgcaggcggcgaagccctgcctgtcgccagtggctgtctggcaaatgctactgacacgcctgctggaacaacactatggcctgacactgaacgacacgccgttcagtgatgaaactgttattaaggaacatatcgatgctggtatcactctggccgatgcagtcaattttctggtggaaaagtacgaactggtacgtatcgatcacagaggattttcgtggcaacaacagtctccatatatttccgtagtagatattctgcgagcaaggcgctctaccggcttgctaaaaactaatgtgaaataa

SEQ ID NO: 21264 - DNA, 4581 bp, Escherichia coli
atgaacaggaccagtccctattattgtcgccgctcagtactttccttattgatatctgccttgatatatgccccgcccgggatggctgccttcactactaatgttattggtgtggtaaacgatgagactgtagatggcaaccaaaaagtggatgaacgaggtacaacaaataacactcatattatcaaccatggccagcagaatgttcatggcggggtatctaatggaagtcttattgaatctggtggatatcaagatataggaagtcataacaattttgtggggcaggctaataatacaaccattaacggtggcagacagtcaattcatgacgggggtatttccacaggtacgacaatcgagagtggcaatcaggacgtttataaagggggtatcagcaatggaacgacaattaagggcggtgcttcacgcgtagagggagggagtgcgaatggaatactcattgatggtggtagccagatagtaaaagttcaagggcatgctgatggtacaacgataaataagtctggctctcaggacgtagtacaaggaagtctggcaacgaacacaaccataaatggtggtcgacagtatgttgaacagagcacagtagaaacaacaaccattaaaaatggcggtgagcaaagagtatatgagagccgtgcgctggacacgacgattgaaggcggaactcagtctctgaatagtaagtcaacggcaaaaaatacgcatatctattctggtggcacgcaaattgttgataacaccagcacctcggatgttattgaagtttattctggtggcgtgcttgatgttaggggtggtacggcaacaaatgttacccagcacgatggtgcaattttaaaaactaacactaacggtacgacggtgagcggtacgaatagtgaaggtgcattctccatccacaatcacgtggcagacaatgtgttgctggaaaacggtggtcatttagacataaacgcatatggttcggcaaacaagacgattattaaagataaaggaacaatgtcagttttaaccaatgctaaagctgatgcgacccgaatagataatggcggggttatggatgttgcaggaaacgcgacaaataccataattaatggtggcacacagaatattaataattatggcatagccacaggcaccaatatcaacagcggaacgcaaaatatcaaaagcggcgggaaagctgacacaacaattatatcctccgggagccggcaggttgttgagaaagatggtacggcaattggcagcaatattagcgccggaggctcgctgattgtctataccggcggtattgcacatggggttaaccaggagacgggcagtgctttagttgccaacacgggtgcagggactgatatcgaaggatacaacaagctctctcacttcactattaccggaggggaggctaattatgttgtgctggaaaataccggcgaactgacggtagtggctaaaacctcggcgaaaaatactaccattgatactggcggtaagctgattgtccagaaggaggctaaaacagatagcaccagacttaataatggcggcgttctggaggttcaggacggtggtgaggctaagcatgttgagcaacaatccggcggcgcattaattgcttccacgacctccggaacacttatcgaaggaaccaacagttatggtgatgctttctacatcaggaattcagaagctaaaaatgtagtgctggaaaacgctggctcattaacagtcgtcactggttcccgcgcagttgacacgattattaatgccaacggcaaaatggatgtttatggaaaagatgttggcactgtactcaatagtgctggcacccaaacaatatatgccagtgccacttctgataaagcaaatatcaaaggtggcaagcaaacggtatatggtttagccactgaagcaaatatcgaaagtggtgaacaaattgttgatggtgggtcaacagagaaaacacacatcaatggtggcacgcaaaccgttcagaattatggtaaggcaatcaataccgatatcgtctctggcctacaacaaattatggcaaacgggacagcggaaggttccattattaatgggggttcacaggtagttaatgagggcggcctggctgaaaactcggtgcttaatgacggcggcacactcgatgtgcgggagaaaggcagcgcaacggggatacagcagagtagccagggcgctttggttgcaaccaccagggcgacgcgggtcacaggaacacgcgcggatggcgtcgcgttcagcatcgagcagggtgcggcgaacaatatcctgctggcaaatggcggcgtgttaaccgtggagtcagacacctcttctgacaaaacacaggtcaatatgggcggacgggagatcgtcaaaacaaaagccactgcgacaggcacgacgctcaccggcggtgaacaaattgtcgagggtgtggcgaatgagacaacaattaacgacggcggaatacaaacagtttcagctaacggagaggcaataaaaacaaagatcaatgaaggcggtacgctgacagtcaacgataatggcaaagcgacagatatcgtccagaacagcggtgccgctctccagacgagcacggctaacggtattgaaatcagcggtactcaccagtacggtactttttccatttccggcaatttagcgaccaatatgttgctggaaaatggcggtaatttattggtattagcaggtaccgaagctcgcgactccacggttggcaagggtggggcaatgcaaaacctgggtcaggactccgccacaaaggttaactctggcgggcaatatacccttgggcggtcaaaagatgagtttcaggctctggcccgggcagaagatctccaggtcgctggcggtacggcaatcgtctacgcaggtacgctggcggatgcatcggtcagtggcgcgacaggaagcctgtcgttaatgacgccacgggataatgttacgccagttaaactcgaaggggcggtccggattaccgatagcgcgacattgactctgggaaatggcgtcgataccacgcttgccgacctgacggctgccagccggggcagtgtctggcttaacagcaataattcctgtgcaggtaccagcaactgcgaatatagagtaaacagtttgctactcaacgacggtgatgtttatttgtcagcacaaacagcagcgcctgccacaactaacggtatctacaatacgctgacaaccaatgaactttccggtagcggtaatttctacctgcataccaacgttgcaggctcccggggcgatcaactggtcgtcaacaacaacgccactggtaattttaaaatctttgttcaggataccggcgtcagcccacagtctgacgacgcgatgacgctggtgaaaacagggggaggggatgcttcgtttacgctgggcaataccggcggtttcgttgatcttgggacctatgagtatgtcctgaaaagtgacggcaacagcaactggaacctgaccaatgatgtcaaacccaacccggaccccatcccaaatccaaagccagacccaaaacccgatccaaagccagacccaaatccaaaaccagaccctactcccgatccaacgccgacacccgttccggagaaacgcattacgccttctacggcagccgtactcaatatggcagcaacattaccgttggtatttgatgctgagctaaacagtattcgcgagcggttgaacataatgaaagcgagtccacacaacaataatgtctggggggcgacgtataacacccgtaataatgtcaccaccgatgcgggtgccgggtttgagcagacgctgaccggaatgacagtggggatcgacagccgtaatgatattcctgaaggaattaccacgctaggcgcttttatgggctattcccattcacatatcggttttgatcgcggaggacatggcagtgtgggcagttattctctgggcggctatgccagttgggaacatgaaagtggtttctatctggacggtgtcgtgaagctgaaccgttttaaaagtaacgtagcaggtaaaatgagcagcggtggagccgccaatggcagttaccacagcaacgggctgggcggtcacattgaaaccgggatgcgatttaccgatggtaactggaacctgacgccgtatgcatcgttaacggggttcaccgctgataaccccgaatatcatttatccaatggcatgaaatcgaaatcagtcgatacccgcagtatatatcgtgaactgggcgcaacgctgagttacaacatgcgtctggggaacggtatggaagttgagccgtggctgaaggcggctgtgcgcaaagaatttgtcgatgataaccgggtgaaagtgaatagtgacggtaatttcgtcaattatttgtcgggcagacgtggaatataccaggcaggtattaaagcctcattcagcagtacgttaagcgggcatcttggggtggggtatagccatagtgccggtgtggaatccccgtggaacgcggtagctggtgtgaactggtcgttctga

SEQ ID NO: 21265 - DNA, 2466 bp, Escherichia coli
atgtctggaaatataggggcaaatccagttatcatcattggttgtgcgtcagcttatgccgttgaattcaacaaagatttaatcgaagccgaagatcgtgaaaacgttaacctttcccaatttgaaactgatggccaattacccgtcggcaaatattcactaagcactctgattaataataagaggacgccaatccaccttgacctccaatgggtattaattgataaccaaactgcagtttgcgtgacaccagagcaattaacattattaggatttactgatgaatttattgaaaaaactcagcaaaacctgatcgatggttgttaccctatcgaaaaagaaaaacaaattacaacttatctcgataaagggaaaatgcaattatccatatctgcacctcaggcatggttaaaatacaaagatgcaaactggacgcctcctgaactttggaatcatggtattgctggggcatttcttgactacaatttatatgcctctcattatgcaccacatcagggcgataattcgcaaaatataagttcctatgggcaggctggggttaatcttggggcctggcgcctgcgtactgattaccagtacgatcagtcatttaacaatggcaaaagccaggcgaccaacctggattttccgcgtatttatttgtttcgcccaatcccagcaatgaatgcaaaactaactataggtcaatacgatactgaatcctctattttcgactctttccatttttctggcatttcgttgaaaagcgatgagaatatgttaccgccagacctacgtggttacgcaccgcaaatcacgggtgtcgcacaaacgaatgcaaaggtcactgtctcacagaacaaccgtattatttatcaagaaaatgttcctccaggcccatttgctattaccaatttattcaatacattacaggggcaacttgacgtcaaggttgaagaagaggacggacgcgttacgcaatggcaagttgcatctaatagtattccttatctgacgcgtaaagggcagattcgctacaccactgctatgggtaaaccgaccagcgttggtggtgattccttacaacaacccttcttctggactggtgaattctcatggggttggctgaacaatgtatccctgtatggtggttcagttttaacaaaccgtgattatcaatctctggctgccggcgttggttttaatcttaactcattaggttcattatcttttgatgtcacacgatctgatgctcagttgcataatcaggataaagaaacgggttatagctaccgcgctaactattcaaaacgttttgaatctaccggtagccagctcactttcgctggttaccgtttctctgataaaaactttgtgacaatgaatgaatatatcaatgacactaaccattacacgaattatcagaatgaaaaagagagttatattgtcacgtttaaccagtatcttgaatcattaaggttaaatacatacgtaagtttggctcgtaatacttactgggacgccagcagtaatgtgaattattcattatcacttagccgcgattttgatatcgggccattaaaaaacgtctccacttctctaacatttagccgaataaactgggaagaagacaaccaggatcaactgtacctaaatatttcgattccctggggaactagtagaacattgagctatggtatgcaacgaaatcaggataatgagatttcgcatactgcttcgtggtatgactcttccgatcgaaataattcctggagcgtttctgcttcaggcgacaatgatgaattcaaagatatgaaagcgtcactacgcgccagttatcagcataataccgagaacggtcgactctacctctccggtacatcacagcgagacagttattattctctgaatgccagttggaatggttcattcactgcgactcgccacggtgccgctttccacgactatagcggtagtgctgactcgcgttttatgatcgacgcagacggcactgaagatattccgttgaacaataaacgcgcggtaactaatcggtatggcatcggagttattccatcagtcagcagttacataacaacatcattaagtgttgatacccgaaatctgccagaaaatgtggatatcgaaaactcggttatcaccaccaccttaaccgagggtgctattggctacgccaaacttgatacccgcaagggctaccaaatcataggggttattcgcctggcagatggtagtcatccaccactggggattagcgtaaaagatgaaaccagccacaaagaattaggactggttgctgatggcggctttgtatacctcaacggcattcaggatgataacaaacttgctttacgctggggtgacaaatcttgttttattcaaccacccaatagcagcaacttaaccaccggaacggctattttaccgtgtattagccaaaattaa

SEQ ID NO: 21266 - DNA, 1209 bp, Escherichia coli
ttgagcaagacaccactcacagcaaaggccatagacgccgcacagccgcaggacaagccctataaactcaccgattcactgacgccggggctgtttttgctggtgcatcccaacggttcgaaatactggcgattcaggtattggctgaataaacgagagtttttgcaggccattggagtttacccgctaatcacactcaaagaagcacgcaggcgcgccacggagagcagatcccttattgccaatggaattaacccagtggaacaagcccgcaaggaaaaagccattgatgcgctcaacatggcggcaggatttaagaaggtggcggaagactggtttgctaccagggttggagggtggtcggaatcctatgcaaaacaggtcagatcggcactagaaaaagacgtctatccggtacttggcaagcggtcgattgtcgatataaccgcccgtgacgtgctggcattactccagaagaaagaacgtaccgcaccggagcaggcccgcaagctacgccggcgcatcggtgagatcttcaagtttgccgttatcaccgaactggtaacgaggaatccggttgcagatcttgatacggcactgaaggcccgccgacctggtcacaacgcgtggataccgattagtgaaattccggccttctacaaagcccttgagagggccgggagcgtccagattcagacggcaatacgtttgcttatattaacggcattaaggaccgcagaactgcgtttgtgccgttgggaatggataaacctggaggacgcaacaatcacattgcccgctgaagtcatgaaggcccgccgcccgcatgtggtcccgctatcacggcaggcggtcgagctattgcaggaccagttcacacgcagcggatacagtgctttcgtctttccaggccgattcatggataaacccttgtcagccagcgcgatacttaaagcgcttgagcgtatcgggtacaagtcgatagccacaggccacggctggcgcacaacgttcagcaccgcacttaacgaatcaggcagatactcgccggattggattgagatccaactagcccacgtcccgaagggaataaggggcgtttataaccaggctgcctacctgaagcaacggcgagcaatgatgcaggattacgccgacgctattgattcaatattggcaggtaacggcaatcctctagaaccggaatga

SEQ ID NO: 21267 - DNA, 528 bp, Escherichia coli
atgtctgatatgctagcagtagaacaagaaacaaacaatgatgttcgtcaatttttaaacaaaattaacgagttacggaataaagcacccaaaaacgaagagactaaacacgaagaacacacgccagataatcacgaggaaacagatcatcacgaggcaaaacagcaggagcaagcctggcgtggcaacctgcgctacctggacacattaaaccgacttgatgaagtattgccccgcaaactgtacgaaagatgggagaaagaacatacagtcaacgacgaggctgtgctacgtgctctttgttacttcgctggtactggcaaaaactcacagttgggatggtgcagggttggtaggggaacaatcgacaaacgagccaggctatcaaaaaacacggttaaaaaatgcctcgatcgtctggtcaaccacttcaaacttgttgagcgtactgaaggctatataccaggatcggcagaaagggagtgcaacgaataccagttattattcaagccgtacaacatgaaataa

SEQ ID NO: 21268 - DNA, 243 bp, Escherichia coli
atggttatccgccacgaatgtccgtcatattgcattgcgcagaaacgcgtggcactgagggagttttccgaattagttttggggaccctttccctgcttctggagcaaaagacgaacggcaaatgcagtgcttccttgtacgactgcagcgaagaagaaaagctgtttgttaagcgcctgaagttaatcaaagcggatatccacgcccagctgaaggcctgtgattgcgatatttctgaatga

SEQ ID NO: 21269 - DNA, 369 bp, Escherichia coli
atgaaacacgtttttaaatatcttgattttgcagaagaccgcgaacacgcagaatcagtggcgaccaaagagttaaaactggaccacgtagaaaaattcgctatccgcgatctagccaatgatatcaaagagcgtgggtgtgttgagcttgtccagcctggtggattcgatgagctggttcagatctatgaggccggaggcgatggaatagagccactcaattgtggaatcgaatcaaggaaggtggcaattgctgccctgcttcgcgtcatgcgtgaaccagactttcaatgcctggaaatggttcacgaaatcataagaattgctagagatttggaagcgccagttgacgctccgttagattgctaa

SEQ ID NO: 21270 - DNA, 417 bp, Escherichia coli
atggaaggcgaactgatagaaaacaatgggttagacatttatgacaccagcgaaacaccgaaaaagcgcggtcggccagctaaatataatgaaaaaatagcaacgcaaatcgtcctattggtaagcgaaggttatagtttgcgcaagatcagcatgatgccagggatgccgagccaccgtcagatgatgcgctggcaactggagcatatggacttcagggaagggatagcctggatgtcgtggctatggtgcgctgaagctggccgacgtgccgtcgagataatcgacgaggttgatataaacgcagaggatgggccgaagcagttgcgcaaagcagaagcaaaggcaaaggcactactggcagcagccaagctgaatagtttgaaacattcaccatttggagatgacaaacaatga

SEQ ID NO: 21271 - DNA, 594 bp, Escherichia coli
atgagcctgatccgcactgaaaccagagacacaaaacgcgcagctgacccactgcacgacctgcgtagcaagccgttttctgagtggggcgaagatgaaatcaggcgttttaatctgatagacgcgcttcttgagtttgtctacacagacacatccagcccgttcggtatcggcatgaccttcgattacacggagtgctgggaaattggtgttcgtgacgactgcctggtaatgacacgcgttaagccggtgcatccagaatatgcgaagcactggaacatgaaaggcgtcatgaatgacaaaacccgcttccacgccgacaagtgggtagggtacagcaaggtgcttgcctgggtgagcttatcgcacaaagacaccttcacgggtgcgaaacggtttcaatacttccaaacgatgtacgacatggaacggcaaatcaacgcaaacctgccggttggcggccttcccaacgttgacacagagcgaactggcaaactgttccaacgcgatgacttttctgaggatagccatgccaacgatccgaagttggttggtgatgattacgtcccccaggcaccggagcaaatcaactga

SEQ ID NO: 21272 - DNA, 378 bp, Escherichia coli
atgaaacttttaatcgcaatcatcctgatggtgctgactggtgtttgctttgcagatgttggtgattacaggctgaacggggaggataacgcaagaattgaatcagtcgttactgataactgtgaaaaaacagccgtattggtaggcggtgacaggcttgcgagggttgagatcgaatatatagcgacattgtgcaagccggtggctttggtgattatttacgacagatttgacgatatagcggcaatccctcttaaggtgacgttgaaaaaggtattgaaagagaatagcgatgaaaagattaacctattgaacaagatgggggatctggctggtcgtatcgttgcagagcagtatttaggcatgagttttgagtaa

SEQ ID NO: 21273 - DNA, 393 bp, Escherichia coli
atgaaagtgttaggtaatattttatggtgggcttttgttggtttcatggcttacgccactttgattaagccggacaacactgatccagctgttgtgaactatgaagagcctttgcctatggagcttgccaactatggcgaaccaggtgaaggggcgaaaatcatgaatgccgcaaaaataatgggtcgcgactacgcatggaaacatgtaaaagaagacaggttgccatgtctgtttgccgccggggttgttgctgataacatcctggtaaaataccatttcagcaatgaaactgagttcaaacttaaagcggcagcggtcagagaatgcgccaacgtagcagaaaacaacggctttgttttggtaggtagagtatttgaaaaacgtaattga

SEQ ID NO: 21274 - DNA, 810 bp, Escherichia coli
atgagttacgaaatcaaaatttgcgacatcctcaaaggcgctgcgatggaaggacaatataagggcgctcaacgtggggccaaatgcgaggagatcgcaaacgagttaactcgccggggagttaaaaacaacaagggagaggttattactaagggcggcgttagccattggctggaaggtagacgggagccaaatttcgacactctggctgaactgtgcgacatgttcggcgtttatgccctgatgccgatgcgtggcggtaaatggattcgagttcacccggaagaccgtggagaaatggaattacgcgaggctgtagctgaacgagatgctattatcgacgacctgaaggcccgtatcgctgagcttgaggcggcactagcaaataaacaagtcccagcagaagcggaagagatgggaggtgaaaaagtggaagaagtggcagcagagcaagcgcccaacgatgaaaaagagatgggagctaaggagtgggttaacccgaacccgaaaaaatacagcgtcggcatgttgtgtcaggtactggctgcaatgggcggcgaatacctgggcaacaacgcagggttacagcagaagatcactgtgttggataacgacggcaaccggaagccaatcagtaacggcgcgttttatcgactgattgagcaggccaaagggagaggattgattagcgttgaacaggaaatcaaacacaagaaagacgaaaacggcaaccagatcggcaaaggcaagaaaggtgacaagctgataactttgcttcccaactggattgataagctgggagacgaataa

SEQ ID NO: 21275 - DNA, 450 bp, Escherichia coli
atgagtctgcttctgtgggggtgcacttttggtcacagcgaagcacgtttacagacgttgcaggccgatttcgtgcgctggtttcgcgacaatgttaccgcctttccgctggttcaggagcgattaaccacctacctgttaagttccgatgctgatatctggttgattaccggctctccgcagccgctggttgaagcggtttatttcgatacgccctggctgccgcgggttaatcttatcgccagccaaattcagcgtggctatggtggttgggtattgacgatgcgttgtctgggacatgaaaaggtcgcacaactggagcgcaaaatcggcactccgctgcggctgtacagtggctatagcgacagtaatcaggacaatccgctgctttatttctgtcagcatcgttggcgagtaaccccgcgcggtgaactccagcaactggaatag

SEQ ID NO: 21276 - DNA, 834 bp, Escherichia coli
atgcatgtttttgataataatggaattgaactgaaagctgagtgttcgataggtgaagaggatggtgtttatggtctaatccttgagtcgtgggggccgggtgacagaaacaaagattacaatatcgctcttgattatatcattgaacggttggttgattctggtgtatcccaagtcgtagtatatctggcgtcatcatcagtcagaaaacatatgcattctttggatgaaagaaaaatccatcctggtgaatattttactttgattggtaatagcccccgcgatatacgcttgaagatgtgtggttatcaggcttattttagtcgtacggggagaaaggaaattccttccggcaatagaacgaaacgaatattgataaatgttccaggtatttatagtgacagtttttgggcgtctataatacgtggagaactatcagagctttcacagcctacagatgatgaatcgcttctgaatatgagggttagtaaattaattaagaaaacgttgagtcaacccgagggctccaggaaaccagttgaggtagaaagactacaaaaagtttatgtccgagacccgatggtaaaagcttggattttacagcaaagtaaaggtatatgtgaaaactgtggtaaaaatgctccgttttatttaaatgatggaaacccatatttggaagtacatcatgtaattcccctgtcttcaggtggtgctgatacaacagataactgtgttgccctttgtccgaattgccatagagaattgcactatagtaaaaatgcaaaagaactaatcgagatgctttacgttaatataaaccgattacagaaataa

SEQ ID NO: 21277 - DNA, 375 bp, Escherichia coli
atggatggctgtggcgtcattccgccagattctaaagaaataacggcagaacactggcagtcattattaaaatctcaagctgaaggaggcgtgatcgatttttctgtttttcctccttctattaaagaggttatccgtactcatgatgatgaagtcgcagatgcgaactttcaaaagcagatgcttatctctgatgcaactgattttatcaatagcagacagtggcagggtaaggctgcattgggaagacttaaagaagatgagctgaaacaatataatttgtggctggattatctggaagcactggaactggttgatacatccagtgcgccagatattgaatggcctacgcctccggcagttcaggccagatga

SEQ ID NO: 21278 - DNA, 894 bp, Escherichia coli
atgcgctcaccaatttgtcatcttttctcagcaattaattcatcaccatttaagattgcaccagagaaggagcaagatcttaaaacgatagttgacgacaaaaaaattataatttcagttgtgagtgaacctggttttaatatccgagtcaggaagaatgagagtaataattcacatgaaatagttctaacagtagcttcacttgaatatatttgggcattttccaatttcttttgggtttttacgcaagagtactccaaatctcagaaaaataatgatgagcactttgatttaacaggaaaaaataggcttaaaaagtctgatgaacttcttaaatgggcaaggaaaaacttgcaaacaacaggttgcgaatcatggcctaaaaaatgtcccaagccagaagcatatttacaaggaagcgaagactcacaagttgctagcgagatatttctttgtgctattgcttggattcttcatcatgaaataagtcatgttgttttacagcatccattggtcactacagcattctccactcaagaggagcgtgaagcagattcacatgctacaaaatggatattaggcaacctgtatgaatccgctcctgaattaaagaaacgtgcacttggcattgctacggcagtgctttgtatacaaagcttagaagttgaaaattacttctgtttacaaaatacacacccagctgcatatgagcgtatatattcgaatatttcatgctaccctgtcggaaatgaagagttgattgaagctctatgtacagtgatgcttcaatatcttttccatggcaaaaatatcaatgtgaatctagatggggagtccttttcatcgattttaggtgatcttctctgtgatatttcacgtcttaccagtaactga

SEQ ID NO: 21279 - DNA, 696 bp, Escherichia coli
atgttcgaaccccccaaaaattataatgaaatgttgcctaaacttcataaagcaactttcttaaatacgctaatatattgcatacttctagttatttacgaatacatccctttaataacattaccaaccaagtatgtcccacctattaaagatcatgagagctttattaattgggcactatcttttggtatattaccttgtgcttttgcgatttttgcatatttaattagcggtgcgttagacctacataacaatgcagccaaactacttcgggtgcgatatctttgggataagcatctaattataaaaccgttatcacggagagctggagtcaacagaaaattaaataaagatgaagctcacaatgtaatgagcaatctatattaccctgaagtaagaaaaattgaagacaaacattatattgaactcttctggaataaagtatactatttttggatattttttgaattttcgataattgcattaatttccttcctaataatctttttttgcaaacaaatggatatttttcatgttgaaggttctttgctgtctttattcttttttgtaattttatcattctcagtgagtggtattatctttgctttgacagttaagcccagaactgaaagtcaagtcggaaaaatcccggacgataaaataaaagaatttttcactaaaaataacattaattga

SEQ ID NO: 21280 - DNA, 666 bp, Escherichia coli
atggtacttgctttgaactataatatgcacggagttaatattcgctcagagaatgcagcaaaacctcatacgatgccctctagatatctttgcgagtatattagaagcattgagaaaaatggccacgcccttgattttggctgcggaaaacttagatattctgatgaattaatcagtaaatttgatgaagttacttttctagactcgaaaaggcaacttgaaagagagcaaattattagaggaattaaaactaaaattattgactatgtcccacgatattataaaaatgcaaatacagttgctttcgaggatgtcgacaaaataattgggggttacgatttcatcctttgctctaatgttctctctgccgttccttgtcgggatacaatcgacaaaatagttcttagcatcaagagattactaaaatcaggaggtgagactcttattgtaaatcaatataaaagctcatacttcaaaaaatacgaaacaggaagaaaacatctttacggatacatttacaaaaattcaaaaagtgtttcttactatggattactcgatgaactcgcagtgcaagaaatatgttcttcacatggccttgaaatattaaagtcgtggagtaaagcaggaagttcatatgtcactgttgggagttgtaatgcaatataa

SEQ ID NO: 21281 - DNA, 486 bp, Escherichia coli
atgttcagcaaccacgcggatatgatgctgacccaaatcgccattgggttgtgctttaccctgctgtacttcgtggttttccgcacactgattctgcagttcaacatgtgcacgccgggacgtgaagatgcggaagtgaaactctactcaaaagccgaatacaaagcctcgcgaggccaaaccaccgcggcagagccaaaaaaagagctggatcaggctgccggtatcctgcaagccctgggcggggtcggcaatatctccagcattaacaattgcgcgacgcgtttacgtattgcactgcatgacatgtcacaaacgctggatgacgaagtctttaaaaagctgggagcgcacggcgtcttccgtagtggcgatgccattcaggtgatcattggtctgcatgtatctcagctgcgtgaacagctcgatagcttaattaattctcatcaatcagcagaaaatgttgccattacggaggcagtataa

SEQ ID NO: 21282 - DNA, 1278 bp, Escherichia coli
atgaaaaccaaagttgctgctatttatggcaagcgggatgtccgtctgcgcgtatttgaactgccagaaattaccgataatgaattactggtgagtgtaatttctgacagcgtctgtttatcgacctggaaagcggcgttactcggtagtgaacataaacgcgtacccgacgatttagaaaatcatccggtcattaccgggcatgaatgtgccggggttattgtcgaagtgggtaaaaatctcactggcaaatataaaaaaggccagcgttttgtattgcaaccggcgatggggttaccaagcggatattcagcgggctacagctacgaatattttggcggcaatgccacttatatgattattcccgaaatcgccattaatttgggctgcgtattaccgtatcacggctcttattttgctgcggcgtcgctggcagagcctatgtgctgcattattggtgcttatcatgccaattatcacaccacgcaatatgtttatgagcatcgcatgggcgtcaaacctggcggcaatattgcactgctggcgtgtgcaggtccgatgggcattggcgctatcgattacgccattaacggcggcatacaaccgtcgcgggtggtggtggtcgatatcgacgacaaacgtctggcgcaggtacagaagctgctgccggtggaactggcggccagtaaaggcattgagctggtgtatgtgaataccaaagggatgagcgatcctgtccagatgctgcgggcgctgacaggagatgccgggttcgatgacatttttgtttatgcggcggtgcctgctgtcgttgagatggctgatgaattactggcggaagatggctgtctgaacttctttgccgggccgacggataaaaacttcaaagtgccgtttaatttctacaacgtccattacaacagcacgcacgtcgtcggtacatctggcggttcaacggacgacatgaaagaggcgattgcccttagcgccactgggcagttacagccgtcgtttatggtgacccatatcggtggcctggatgcggtgccagaaaccgtgctcaatctgccggatatccctggcggtaaaaaactcatttataacggcgtgaccatgccgctcactgccattgccgattttgccgaaaaaggcaaaaccgatccgctgtttaaagagttggcgcggctggttgaggaaacgcacggcatctggaatgaacaggccgagaaatatctgctggcacaatttggcgttgatatcggggaggccgcgcaatga

SEQ ID NO: 21283 - DNA, 855 bp, Escherichia coli
atgctgcttattatttctgcaaaaatggcgcattcactctggcgctatatctccttttctgcggaatatacggcggtttctcaaccggtgaataaaccgagccgtgtggatgcaaaaacgttcgataaaaatgacgtgcaattaatcagccagcaaaactggtttggcaaatatcagcctgtcgccgcgcaggtaaaacaacccgaacctgtgcctgtggcagaaacgcgtcttaatgtggtgctgcgtgggatcgcctttggtgccagacccggcgcggttattgaagaaggcggtaaacagcaggtctatttgcagggtgaaacgcttggctctcacaacgcggtgattgaggaaatcaaccgcgaccatgtgatgctgcgttatcagggaaaaatagagcgtctgagtctggcagaagaggaacgttccactgttgctgtgaccaacaaaaaagccgtcagtgacgaagcaaagcaagctgttgctgagcctgctgtcagtgtgccagttgagatcccggctgccgtgcgtcaggcactggcgaaagatccgcagaaaatttttaactatatccagcttacgcctgtgcgtaaggaggggattgtcggttatgcagcgaagccgggggcagatcgttctctgttcgatgccagcggtttcaaggaaggcgatatcgccattgcgctaaatcagcaggatttcactgatccacgagcaatgattgctctgatgcggcagttaccttcaatggattccattcaacttacggttttacgcaagggtgcgcgccacgacatttccatcgcgctgcgctaccgactattctgcccgccttactggaagaagagctga

SEQ ID NO: 21284 - DNA, 4563 bp, Escherichia coli
atgaataagaaatttaaatataagaaatcgcttttagcggctattttgagcgcaaccctgttagccggttgtgatggcggtggttccggatcttcctccgatacgccgcctgtagattctggaacagggtctttgccggaagtgaaacctgatccaacaccaaacccggagccgacgcctgagccaacgccggacccagagcctacgccagaaccgatacctgatcctgaaccaacaccagaaccggagccagaacctgttcctacgaaaacgggttatctgaccctgggcggaagccagcgggtaactggtgctacctgtaatggtgaatccagcgatggctttacatttaaacctggcgaggacgttacttgcgtggcgggtaacacgacaattgccaccttcaacactcagtcagaagctgcgcgtagcttgcgtgcggttgaaaaagtgtcgtttagccttgaggacgcgcaagaactggcgggctccgatgacaagaaaagcaatgcggtttcgctggtaacgtccagtaacagctgtccggcgaatacagaacaggtttgtctgacgttctcctcggtgatcgagagtaaacgcttcgactcgctgtataagcaaatcgatctggcaccggaagagttcaaaaagctggtcaatgaagaggtggaaaacaatgctgcgaccgataaagcgccatccactcatacttcaccggtcgtgcccgtcaccacgccgggaacaaaaccggatctgaacgcttccttcgtgtcggctaacgcggaacagttttatcagtatcaacccactgaaatcattctctctgaaggtcgactggtcgatagccagggatatggtgttgctggcgtcaactactacaccaattcaggccgtggcgtgacaggggaaaatggtgaattttcctttagctggggcgaaaccatctcctttggtatcgatacctttgaactgggttcagtgcgcggcaataagtcgaccattgcgctgactgaactgggtgatgaagttcgcggggcgaatattgatcagcttattcatcgctattcgacgaccgggcaaaataatacccgtgttgttccggacgatgtacgcaaggtctttgccgaatatcccaacgtgatcaacgagattatcaatctctcgttatccaacggtgcgacgctgggggaaggtgagcaagtcgttaatctgcctaacgaatttattgagcagtttaatacgggtcaggccaaagagatcgataccgcgatttgtgcgaaaaccgatggttgtaacgaggctcgctggttctcgctgacgacgcgcaatgttaatgacggccagattcagggcgttatcaacaagctgtggggcgtggatacgaactacaaatctgtcagcaagttccatgtattccatgactccaccaacttctatggcagcacgggtaatgcgcgcggtcaggcggtggtgaatatctccaacgcggccttcccgattctgatggcgcgtaatgataaaaactactggctggccttcggcgaaaaacgcgcctgggataaaaacgagctggcgtacattacggaagcgccttctcttgttgagccggaaaacgttacgcgcgataccgccacctttaacctgccgtttatttcgctggggcaagtcggtgagggcaaactgatggttatcggtaacccacactacaacagcattttgcgttgcccgaacggttacagctggaacgggggcgttaataaagatgggcagtgtacgctcaacagcgacccggatgacatgaagaacttcatggagaacgtgctgcgctatctgtccgacgataaatggaagccggacgcgaaagccagcatgaccgtaggcaccaacctggatactgtctattttaaacgtcatggtcaggttacaggaaacagcgctgcgttcgacttccatccggattttgcgggcatctctgttgagcatttaagtagctatggcgatctcgatccgcaggaaatgccgctgctgatccttaacggctttgaatatgtgactcaggtgggtaacgatccttatgcaatcccgctgcgtgcagataccagcaaaccgaagctgactcagcaggatgtgaccgatctgatcgcctatctgaacaaaggtggatcggtgctgatcatggaaaacgtgatgagcaatcttaaggaagagagcgcgtctggttttgtgcgtctgttggatgccgcaggtctgtcgatggcactgaacaagtcggtagtaaataacgatccgcaagggtatccgaaccgcgttcgtcagcagcgcgcaacgggcatttgggtctatgaacgttatcctgccgtagatggtgcgctgccgtacaccatcgatagtaagacaggggaagttaagtggaaatatcaggtagaaaacaaacctgatgacaaaccgaagctggaagttgccagctggctggaagatgtagatggcaaacaggaaacgcgttatgcctttattgatgaggccgatcataaaacagaggattctctgaaggctgcgaaggagaaaattttcgccgcgttcccggggctgaaagagtgtactaatccggcatatcactatgaggtcaactgcctggaatatcgtcctggcacgggggttccggttactggtggcatgtatgttccacagtatacgcaactaagccttaacgccgacactgcaaaagcgatggtgcaggctgcggatttaggcaccaacattcagcgtctgtatcagcatgagctctacttccggaccaatggtcgcaaaggtgagcgtctgagcagcgtcgatctggaacgtctgtaccagaacatgtcggtctggctgtggaacgatacgagctatcgttatgaagaaggcaaaaatgacgagctgggctttaaaacgttcaccgagttcctgaactgctacgccaatgatgcctatgcaggcggcaccaagtgttctgcagatctgaaaaaatcgctggtcgataacaacatgatctacggtgacggtagcagcaaagcgggcatgatgaacccgagctacccgctcaactatatggaaaaaccgctgacacgcctgatgctgggccgttcctggtgggatctgaacatcaaagttgatgtcgagaagtatccgggagcagtatcggaagagggacagaacgttactgaaaccatcagcctgtactcgaatccgaccaaatggtttgcaggtaacatgcagtcaactggcctgtgggcaccggctcagaaagaggtcaccattaagtccaatgcgaacgttcctgtgaccgtcaccgtggcgctggctgacgacctgaccggacgtgagaagcatgaagttgcgctgaaccgtccgccaagagtgactaaaacgtactctctggacgctagcggtacggtgaagttcaaggtgccttacggtggcctgatttatatcaagggcaatagctctaccaatgaatctgccagcttcacctttactggcgtggtaaaagcaccgttctataaagacggcgcatggaaaaacgatctgaactcaccggctccgctgggtgagctggaatcagacgctttcgtctataccacaccgaagaagaacctgaatgccagcaattacactggcggactggagcaattcgctaacgatctggatacctttgccagctcgatgaatgacttctacggccgtgatagcgaagacggtaagcaccggatgtttacctataaaaacttgccgggccacaaacatcgtttcaccaacgatgtgcagatctccatcggtgatgcgcattcgggttatccggtaatgaacagcagcttctcgccgaacagcaccacgctgccgacgacgccgctgaacgactggctgatctggcatgaagtcggtcataacgccgcagaaacgccgttgactgtaccgggtgcaactgaagtcgctaacaacgtgctggcgctgtacatgcaggatcgttatctcggcaagatgaaccgtgtcgctgacgatattaccgtcgcaccggaatatctggaggagagcaacaaccaggcatgggcacgcggcggtgcgggtgaccgtctgctgatgtacgcacagctgaaggaatgggcagagaaaaactttgatatcaagaaatggtatccagatggcactcctctgccagagttttacagcgagcgtgaagggatgaaaggctggaacctgttccagttgatgcatcgtaaagcacgcggcgatgaggtcagcaatgacaagtttggcggcaagaattactgtgctgaatccaacggtaacgcagcggacacgctgatgctgtgtgcctcctgggtcgcccagacggatctttcggagttctttaagaaatggaatccgggcgcgaatgcttaccagctgccgggggcgagcgagatgagcttcgagggcggtgtgagccagtcggcttacaacacgctcgcgtcactcgatctgccgaaaccggaacagggaccggaaaccattaatcaggttaccgagcataagatgtctgccgagtaa

SEQ ID NO: 21285 - DNA, 1614 bp, Escherichia coli
atgaagcactctgtttcagtcacgtgttgtgcgctgttggtcagcagcatttctctttcgtatgctgcagaagttccgagcggcacagtactggcagagaagcaggagctggtgcgccacattaaagatgagcctgcgtcgctggatcccgctaaagccgtgggcctgccagagattcaggtcattcgcgatctgtttgaaggtctggtgaatcagaacgaaaaaggggagattgtccccggcgttgcgactcagtggaaaagtaatgacaaccgtatctggacttttaccctgcgcgataacgcaaaatgggcggatggcacaccggtaacggcgcaagattttgtctacagctggcaacgtctggtggacccaaaaacattgtcgccatttgcatggtttgccgcgctggcgggaatcaacaacgcacaggcgattattgatggtaaagctacgcctgaccagcttggcgtcaccgcagttgatgcccatactttgaaaattcagcttgataaaccgttgccgtggtttgtgaatttaaccgctaactttgccttcttcccggtgcaaaaagccaacgtagaaagcggtaaagagtggacgaaacccggaaatctgatcggcaatggcgcttatgttcttaaagagcgcgtagtcaatgaaaaactggtcgtggtaccgaatacccattattgggataacgccaaaacggtactgcaaaaagtgaccttcctgccaattaatcaggaatccgcagccactaagcgttacctcgcgggggatattgatatcaccgaatccttcccgaaaaatatgtatcagaagctgttgaaggatattccggggcaggtttatacgccgccgcagctcgggacctattattatgcgtttaacacgcaaaaagggccgacggcagatcagcgcgttcgtctggcattaagtatgacgatagatcgccgcctgatgaccgaaaaagtattagggacgggcgaaaagccagcgtggcattttacaccagatgttaccgcgggatttacgccggaaccttcgccgtttgaacaaatgagtcaggaagaactgaatgcgcaggcaaaaactttgttgagcgcagctggttatggtccgcaaaaaccgctgaagctgacgcttttgtataacacttcagaaaaccatcaaaaaattgcgattgctgtagcatcgatgtggaaaaagaaccttggcgtagatgttaaattgcaaaatcaggaatggaaaacctatatcgatagccgtaacaccggcaattttgatgttatccgcgcctcgtgggtgggggattataatgaaccctccactttcctgacattattaacgtcaacgcattcaggaaatatttcacgctttaacaatccggcatatgacaaagttctggcccaggcatcgacggaaaataccgttaaagcgcgtaatgccgattacaacgcggcagaaaaaatcctcatggagcaagcaccgattgcaccaatttatcaatataccaatggacgattaatcaagccgtggctgaaaggttatcccattaataatcctgaagatgtggcgtacagtcggactatgtatattgtgaagcattga

SEQ ID NO: 21286 - DNA, 618 bp, Escherichia coli
atggcacagctatatttctactattccgcaatgaatgcgggtaagtctacagcattgttgcaatcttcatacaattaccaggaacgcggcatgcgcactgtcgtatatacggcagaaattgatgatcgctttggtgccgggaaagtcagttcgcgtataggtttgtcatcgcctgcaaaattatttaaccaaaattcatcattatttgatgagattcgtgcggaacatgaacagcaggcaattcattgcgtactggttgatgaatgccagtttttaaccagacaacaagtatatgaattatcggaggttgtcgatcaactcgatatacccgtactttgttatggtttacgtaccgattttcgaggtgaattatttattggcagccaatacttactggcatggtccgacaaactggttgaattaaaaaccatctgtttttgtggccgtaaagcaagcatggtgctgcgtcttgatcaagcaggcagaccttataacgaaggtgagcaggtggtaattggtggtaatgaacgatacgtttctgtatgccgtaaacactataaagaggcgttacaagtcgactcattaacggctattcaggaaaggcatcgccacgattaa

SEQ ID NO: 21287 - DNA, 984 bp, Escherichia coli
atgaatggcgcacagtgggtggtacatgcgttgcgggcacagggtgtgaacaccgttttcggttatccgggtggcgcaattatgccggtttacgatgcattgtatgacggcggcgtggagcacttgctatgccgacatgagcagggtgcggcaatggcggctatcggttatgctcgtgctaccggcaaaactggcgtatgtatcgccacgtctggtccgggcgcaaccaacctgataaccgggcttgcggacgcactgttagattccatccctgttgttgccatcaccggtcaagtgtccgcaccgtttatcggcactgacgcatttcaggaagtggatgtcctgggattgtcgttagcctgtaccaagcacagctttctggtgcagtcgctggaagagttgccgcgcatcatggctgaagcattcgacgttgcctgctcaggtcgtcctggtccggttctggtcgatatcccaaaagatatccagttagccagcggtgacctggaaccgtggttcaccaccgttgaaaacgaagtgactttcccacatgccgaagttgagcaagcgcgccagatgctggcaaaagcgcaaaaaccgatgctgtacgttggcggtggcgtgggtatggcgcaggcagttccggctttgcgtgaatttctcgctgccacaaaaatgcctgccacctgtacgctgaaagggctgggcgcagtagaagcagattatccgtactatctgggcatgctggggatgcacggcaccaaagcggcaaacttcgcggtgcaggagtgtgacctgctgatcgccgtgggcgcacgttttgatgaccgggtgaccggcaaactgaacaccttcgcgccacacgccagtgttatccatatggatatcgacccggcagaaatgaacaagctgcgtcaggcacatgtggcattacaaggtgatttaaatgctctgttaccagcattacagcagccgttaaatcaatga

SEQ ID NO: 21288 - DNA, 447 bp, Escherichia coli
atgcttatcgccgaaggattaatgaccgccaaaaatatcacggtgattaccaacagtctcccggcagcgtttgccctttccgaaaataaagacattactctggtcgtctgtggtggcacggtccgccataaaacgcgctcgatgcatggttccattgccgagcgttcattacaggatattaatgccgatttaatgtttgtcggtgctgatggtattgatgcggttaatggtattacgacctttaatgaaggttattctattagcggtgcgatggtcacagccgctaataaagtgattgccgttctcgattcatcgaaatttaaccgtcgcggttttaatcaggtactaccaatcgaaaaaattgacattattattaccgatgatgctgtgtcagaggtggataaactggcattgcagaagacgcgggtaaaattaattacggtgtag

SEQ ID NO: 21289 - DNA, 321 bp, Escherichia coli
gtgaacgccttatccggcctacgaatggcgcaagaatctgtaggcctgataagcgtagcgcatcaggcatttgtcaccattgccggatgcggcgtgaacgccttatccggcctacgaatggcgcaagaatctgtaggcctgataagcgtagcgcatcaggcatttgccaccactgccggatgcggcgtggacgccttatccggcctacgagtggcgcgagaatctgtaggcctgataagcgtagcgcatcaggcatttgtcaccattgccggatgcggcgtgaacgccttatccggcctacgagtggcgcgagaattgtag

SEQ ID NO: 21290 - DNA, 1401 bp, Escherichia coli
atgaatagcgaaggggggaaaccggggaatgtactgaccgttaacggcaactataccggaaacaatggcctgatgacgttcaacgcgacgctgggcggcgataattcgcccaccgataagatgaacgtgaaaggcgatacccaagggaacactcgcgttcgggttgataacattggcggcgtcggtgcacaaacggtcaacggtattgaactcattgaggttggcggtaattctgcaggtaacttcgcgctgaccaccggaactgtcgaagctggggcttacgtctacacgctggctaaagggaaggggaatgacgagaaaaactggtatctgaccagtaaatgggacggcgtaacgccagcggatacacccgatcccatcaataatccccctgttgtggatccggaaggcccatcagtttatcgcccggaggccggaagctatatcagcaacattgccgcagccaactcgctgtttagccatcgtttacacgaccgtctgggtgagccgcagtatacagattcactgcattctcaggggtcggcaagcagtatgtggatgcgtcatgtcggagggcacgaacgttcaagggccggtgacggtcagctaaatactcaggctaaccgctatgtattgcagctaggcggcgatttggcgcagtggagtagcaacgcgcaggatcgctggcatcttggcgtgatggcaggctacgccaatcagcacagtaatactcagagtaatcgtgtgggttataaatcggatgggcgcatcagcggttacagcgctgggctgtacgcgacctggtatcagaacgatgcgaataagaccggcgcttatgttgacagctgggcgctgtataactggtttgataacagcgtcagttccgataaccgttctgctgacgactatgattctcgcggtgtgacggcctctgttgagggtgggtatacctttgaagcgggaacatttagcggcagcgaagggacgctgaatacctggtacgtccagccacaggcgcaaatcacctggatgggtgtgaaagattccgaccatacccggaaagacggaacgcgcattgaaacggaaggcgacggaaatgtgcaaacgcgacttggggtgaaaacctacctgaacagccatcaccagcgtgacgatggtaaacagcgtgagttccagccttacattgaagcgaactggatcaacaatagcaaagtctacgccgtgaagatgaatggtcaaaccgtaggccgtgaaggtgcgcgtaatctcggtgaagtacgtaccggggttgaggcgaaagtaaataacaaccttagcctgtgggggaatgtcggtgtgcaactaggtgataaaggctatagcgatactcagggcatgctgggagtgaaatatagctggtaa

SEQ ID NO: 21291 - DNA, 222 bp, Escherichia coli
atgacaaacatgatctcatatcagggacttgttcgcaccttccttagtacttcccccaataattggctggtgtttatgcaaaatggtcaagaagtggtaattgatagcggtaaaagcgttagcctcacactgacaatggctccagcttttaaggatgaaggggaactaaccgacatgacagatattacaggcaatctgacggtcctggtggaggcaaaatga

SEQ ID NO: 21292 - DNA, 237 bp, Escherichia coli
atgaaaaagatgatgatagccacactggctgccgccagcgtgctgcttgccgttgcaaatcaggcgctgctggcgcgacgcttgatgccgttcagaaaaaaggttttgtgcaatgcgggatcagtgatggattacctgggttctcttatgccgatgctgacggtaagttttcaggtattgatgttgatatttgtcgtggtgttgccgctgctgtatttggtgacgacacgaaagtga

SEQ ID NO: 21293 - DNA, 873 bp, Escherichia coli
atgataaatgtcgttagtttctccggtggcaggacgtcagcatatttgctctggctaatggagcaaaagcgacgggcaggtaaagacgtgcattacgttttcatggatacaggttgtgaacatccaatgacatatcggtttgtcagggaagttgtgaagttctgggatataccgctcaccgtattgcaggttgatatcaacccggagcttggacagccaaatggttatacggtatgggaaccaaaggatattcagacgcgaatgcctgttctgaagccatttatcgatatggtaaagaaatatggcactccatacgtcggcggcgcgttctgcactgacagattaaaactcgttcccttcaccaaatactgtgatgaccatttcgggcgagggaattacaccacgtggattggcatcagagctgatgaaccgaagcggctaaagccaaagcctggaatcagatatcttgctgaactgtcagactttgagaaggaagatatcctcgcatggtggaagcaacaaccattcgatttgcaaataccggaacatctcggtaactgcatattctgcattaaaaaatcaacgcaaaaaatcggacttgcctgcaaagatgaggagggattgcagcgtgtttttaatgaggtcatcacgggatcccatgtgcgtgacggacatcgggaaacgccaaaggagattatgtaccgaggaagaatgtcgctggacggtatcgcgaaaatgtattcagaaaatgattatcaagccctgtatcaggacatggtacgagctaaaagattcgataccggctcttgttctgagtcatgcgaaatatttggagggcagcttgatttcgacttcgggagggaagctgcatga

SEQ ID NO: 21294 - DNA, 714 bp, Escherichia coli
atgagcacaaaaaagaaaccattaacacaagagcagcttgaggacgcacgtcgccttaaagcaatttatgaaaaaaagaaaaatgaacttggcttatcccaggaatctgtcgcagacaagatggggatggggcagtcaggcgttggtgctttatttaatggcatcaatgcattaaatgcttataacgccgcattgcttgcaaaaattctcaaagttagcgttgaagaatttagcccttcaatcgccagagaaatctacgagatgtatgaagcggttagtatgcagccgtcacttagaagtgagtatgagtaccctgttttttctcatgttcaggcagggatgttctcacctgagcttagaacctttaccaaaggtgatgcggagagatgggtaagcacaaccaaaaaagccagtgattctgcattctggcttgaggttgaaggtaattccatgaccgcaccaacaggctccaagccaagctttcctgacggaatgttaattctcgttgaccctgagcaggctgttgagccaggtgatttctgcatagccagacttgggggtgatgagtttaccttcaagaaactgatcagggatagcggtcaggtgtttttacaaccactaaacccacagtacccaatgatcccatgcaatgagagttgttccgttgtggggaaagttatcgctagtcagtggcctgaagagacgtttggctga

SEQ ID NO: 21295 - DNA, 894 bp, Escherichia coli
atgaagctcttagcaaaagcacctctaaatctgttacgcgcctttgaagcggctggtcgtaccggagcttttgcgttggccgcctctgagttggaactgtcacccagtgcgatcagccatgccatccgcaaactggaaaacttgcttgatgtacgcctttttcagcgcagtacgcgagaaattacgctgacgaaagaaggtgaaatactgcttgagcacatacagcggggatttaacgaattacagcaggggttggcattagtgacggctgatgaatccaggcctttgcgccttcatactgcaccgagttttgcccatcaatggcttttaccacgtcttggtaagttcatacgtgagaacccaagcatcgatctgcgactttcagccagcacagaatatgcacgttttgaacaggatgattttgatctcgatatagtctacggtgaaccccgcccatcaccctatgagaagatcccgcttgctgttgaagaacttacgccactgtgttctccccaactggctgagcggctaaagaaaccagaggatctctatgcgttgacattgattcagtgcgatgtgcagttgtaccagtggaaaggatggtttgaggcgaataagatgacgccacccaataattatggccttcgatttgaccgtagctttatggcgattgctgccgcagttgacggcttgggagttgtgcttgaatcaaaactactggctgaacgtgaaatcgctagcggtaaactggtatgcccacttgtaaacagtaccagcgaaatacattacatcggtcattatttggttttcccccagcaccaacacatgcattctgcgcttgatgtgttcaaaacctggctactgaatgaactcaatctgggtaaaattcgttga

SEQ ID NO: 21296 - DNA, 864 bp, Escherichia coli
atgaataattctgaaggtttgaagtcgtttcagcaatcgcttgctgatctgccgcaatgggtatcagagcggcttctgcagcaaattaaccagttaactaactacgagccagtgatcggcattatgggtaaaaccggtgttgggaagagcagtctgtgcaatgccctgtttgccggagatatatcaccggtcagcgatgtggcggcctgtacacgtgagccactgcgctttcgcctgcaagtcggcgaccgctatataacgctgatggatctgcccggcgtgggcgaaagtggcgctcgcgataccgagtatgctgcgctgtaccgcgaacagcttcctcgcctcgacctggtactgtggctgattaaggccgatgaccgggcgctgacggtggatgaacatttttatcatcaggtgattggagaggtataccggcataaggtgctgtttgttatcagccagtcggataaggccgaacctaccagcggtgggggacagttgtccacggcgcagaagcagaatatcagccgcaaaatctgcctgctgcatgagctgttccagcccgtccatccggtgtgtgctgtgtcggtccgtctacaatgggggcttaaggtgatggccgagcggatgattaagtgcctgccacgtgaggccaccagcccggtggtgtcgcaactccatccttcctttcgcacgacggtagtccgggaacaggctcgtagcgattttggtgaaaccgtcggggccgtactcgatagcatcagtgcctttcccctgatacccgccccggtgcgggccgtcattcaggccgtgcgcaccacggtggtgtcagtggcccgcgccgtctgggatttcttcttctga

SEQ ID NO: 21297 - DNA, 822 bp, Escherichia coli
atgacccgtctggcttcgcgctttggcgcagcaaaccttatccgtcgcgaccgtccgttaacccgtgaagagctgtttcgcgtagtgcccagtgtattcagtgaggacaaacacgagtcccgtagtgagcgttatacctatatacccaccatctccctgctcgacagcctacagcgagaaggcttccagccattctttgcctgtcagacccgcgtgcgtgacccgggtcgtcgtgaacatacaaagcatatgctgcgtctgcggcgggaagggcagatcaccggtaaacaggtgccggaaattattctactcaactctcacgatggaaccagttcgtatcagatgttgccgggactatttcgtgcggtttgtcagaacgggctcgtctgcggtgagtcgtttggcgaggtgcgggtgccacacaagggggacgtggtgagtcaggtgattgaaggcgcgtatgaggtgctggggatttttgaccgggtggaggagaaacgggatgccatgcagtcgttgctgttgccacccccggcacagcaggcactggcaaaagccgccctcacataccgctttggtgaagaccaccagccggtgactgaatcgcagatcctctcccctcgccgctggcaggatgagagcaatgacctgtggaccacgtaccagcgtattcaggagaacctgattaagggcgggctcagtggccgtaatgccaaaggaggacggtcacatacccgtgccgttcgcggtatcgacggggacgtgaaacttaaccgggcactgtgggtgatggcggaagccctgctcacgcaactgcagtga

SEQ ID NO: 21298 - DNA, 858 bp, Escherichia coli
atgacacaggcagaacgccgccatgaccggctggctgtcaggctgtcactgataatcagccgtctggtggcaggggaaacgctgagtgtgcgtaagcttgccgctgagtttggtgtgtcggtgcgcacgctgcggcgtgattttcgtgagcggctgatgtatctggacctggagtatcagtccggatattgccattatcgccattgttgtcatcgtcatcattctgaacaaaaccggggtgtccgacagtctcgcggccctgacccttgccactgttgccgcactgctgacgggaggtggcgcagccggtgctgccagtgtcgcgctgacaccgttcgtcggcgtgccggtgggtattttcgtgggcatttatgtctttgccaaagtggttcgtctgatttcaggaaaaaaataatgaaacgtaaaacactgcctctgctggcgctggttgccaccactctgtttctcatcgcatgcgatgacagaagtgatgacctgaaggccatcagtaaatttaaggacctcaccccaccgcgtttcagtgatgtggtcagccaccaggatgatgtcagcgaagaatggtcacaggttgactacttatccggtcccaccttgcaggttttacgtacccgccagtcgcccgatggctgcgaggatggcagttactactacctcgtggatatgcaggaaaaaaccgtccagccactgatgaatgcgctgtgtattgccgataacatcaaactggaataccaggaggtgacggacccgtataccaaagaaaaatactttgagtacgcccatgacggcaaactgatggggcagctactgataccctcgaaccctgacaatcaggaataa

SEQ ID NO: 21299 - DNA, 468 bp, Escherichia coli
atgacaatactttcactaagtcggtttatgctggcgggtgtactgctcgcgagctttaatgcctctgctatcccggggttctggcagcagggttacggtcagggcaatacggaatacagcgtgaccgaagccagcggaaagacgtttaccatcaactgcacagggaacccggaccagaatggtttctatcagcattcagtctttcttacccttgccgatgacaagatggtcagttcgcacgatgacgacactactatcaccgtagtgatggatcaccagcagtacattattccgtccagcctgggctggcgtaacggcgataacgcctggtttgacttcatcagcaatatctctgaggccgggcagttcgacgtctacgtcaatgaccacaaagcagggaccttcactgcggaccggaagaacgctgagaaagttctgtccactctcggagactgcagcaacgactga

SEQ ID NO: 21300 - DNA, 240 bp, Escherichia coli
atgacccaatccgtgttgctgccaccggggcctttcacccggagacaagcgcaagcggtcactaccacgtacagcaatatcacactcgaagacgaccagggcagtcacttccgtctggtggttcgtgatactgaaggccggatggtctggcgggcatggaactttgagccggatgccggtgaaggtcttaaccgctatatccgcacctcaggcatccgtacagacacggccacccgctga

SEQ ID NO: 21301 - DNA, 459 bp, Escherichia coli
atgacaacacagacgcagcacgacctcgcacccgctaaccaacccgaatttgaactgaccgtcacgccggtccccgatgaacagcgtatcgatttctggccacagtactttggcgctatcccgcagtggctactcctggagccgcatatcttcgcctggatggaccgcttctgtgagggctacagcggtggtatctggtcgttctacaccctcagcaatggcggcgcatttatgtcccccgagcctgacaacgatgagacatggcgtctgtttaactgcctgaacggtaacgatgcccaaatgagtgcagaagcagcaggtattgctgtctgcctgattgcgtatagccaccatgcctgccgtacagaatgtgacgcgatgaccgcacactattaccgcctgcgggagtatgccatgcaacatccagaggctcacgccattctgcgtattatcgactga

SEQ ID NO: 21302 - DNA, 477 bp, Escherichia coli
atgaaacagctttcctttttacccggcgagatgacgccacaggaccggcgtctcattcagcgggcgctcagggctctggaccgccacctgcatgagcccggcgtagccttcacctctacccacgccgtacgtgaatggctgcgactgcatatggccgcgcttgagcgggaagagttccgggtgttgtatctggacaaccagaatcagttgattgcccatgaaacgctcttcaccggcacgattaaccgcaccgaggtgcatccccgggaggtggtcaaacgtgctctgcacttcaacgcggcggcggtgatactcgcgcataaccatccttccggcgagacgacacctagccaggccgacaaaaccctcacgcagcgactggttcaggtgcttcagctggtggatatccgtgtccctgaccatctgattgtcggtggcaggcaaatctattcgttcgcagaacacggtctgctttga

SEQ ID NO: 21303 - DNA, 222 bp, Escherichia coli
atgaaaattatcagtaaacgcagggcaatgacgatataccgccagcatcctgagtcccgaatctttcgctactgcaccggcaaataccagtggcacggtagcgtctgtcattacaccggcagggacgttccggatatcgccggagtcctcgcggtatacgccgaacgccgccaggaccgcaatgggccctatacctgcctgatgagcatcaccctgaactga

SEQ ID NO: 21304 - DNA, 318 bp, Escherichia coli
atgagcaaccctaccaggggcctgcagcgggagattacactgcgcctgggagcccgtctggtgcaggaaggcaaccgactgcattatctggctgaccgggccagcatcaccggcaagttcagtgacatcgaatgccggaagctggatgaaacattcccgcactttatcctccagatggaatcgatgctgaccaccggtgaactcagcccccaccatgcccactgcgttaccctgtaccacaacgatttaacctgcgaagccgacacccttggcagttgcggctacgtatacatcgccatttaccccactcagcgttaa

SEQ ID NO: 21305 - DNA, 342 bp, Escherichia coli
atgaaaactttacctgcaataactcagcgggcggtgaagccctgcctgtcacccgtggctgtctggcaaatgttactgacacgtctgctggaacagcactatggtctgacaataaacgacacgccattctgcaatgaggctgtgattaaggaacacatcgatgccggtatcaccctagccgatgccgtgaattttctggtagaaaaatacgagctggttcgtatcgacaggaagggatttagctggcaggaacaatctccttatctccgggctgcagacattctgcgagcgcggcaggcaactggcttgttgcggcaaagccgtaacaacgtagtacgatga

SEQ ID NO: 21306 - DNA, 339 bp, Escherichia coli
atgagttcagagcgagatctggttaattttcttggcgatttttcaatggatgtggccaaagcagttatagccggtggtgttgcaaccgctattggaagtctggcttcttttgcctgtgttagctttggctttccagtaattcttgtcggaggagcaattttactgacagggatagtgtgtacagttgttttaaatgaaatcgatgctcaatgccatttatcagaaaaattaaaatatgcaattagagatggactaaaacggcaacaggaacttgataaatggaaaagggaaaacatgactccatttatgtatgttcttaacactccacccgtgatatga

SEQ ID NO: 21307 - DNA, 1089 bp, Escherichia coli
atgctaagccagcttaacctgcgttttcacaaaaaacttatcgaggcgctgaaaacgcgtgccggtcgggaaaatacttcggtcaacgccctagccgaacgcttcctcgatgacggcctgaaaacggtcgcgcccggtgacgggtattttcagctcattgccgatccggaggccacggtccggcagctgtaccggcatatcattctgggccagaccttcggcacgtcagcgctctcccgcgacgaactgcgctttgtcctggttcacgtcagggaggccttcctgcgcgggcataataggctggccacactcccggccctggacacgctgctggacatcactggcaacctgctggcctggcaggtggagcacgatcgccctgtggacggtcactacctgaaggggattttccgcctggccgggaaaaactggacggaagagtttgaagccttccgggcagcgctgcgccccgtggtggatcagatgtatgccgaacacctcctgcgtccgctcgagagcgactgttttggcctggcggaggtgccggacgcggtgctggcagaaatcttcaccctgccgcggctgaaagctgttttcccgttgatgctgcgcggcctggactggaacacagaacaggcaagaacgctggcacaggagctgcgcccggttatttctgccgtcacggaaaccattgaggccggcacgctgcgcctggagatccgcgttgacggccagcaccccggagaacgcccgggggcctggtacaccacaccccgtctgcacctgctgatcaccggccaggacttcgtggtgccgtacggctgggaagcgttatccgaactgctgggcctgttcacgctgtatgcccggcatccggaagccctgacgcacggtcaccagggggagcgagtgatgttctccccgcccggaaacgtcacgccggagggcttcttcgggatagacggcctgcggatttttatgccggcggaggcctttgagacgctggtccgggagctcgccacgcggtgtcaagaaggcccgctggcggaggccctgaccgggctgcgctgcctgtacggagatctgtaa

SEQ ID NO: 21308 - DNA, 2226 bp, Escherichia coli
atgaagatactgaggcagctgtggaaccagaaagggcttgatgcggcagttgaagatgtacctgaggatcgatacggtttcggtaatatcgcagaaaatatatcccgttccatccttactcttcctctggaggcttcaaatgttgtcggaatagaaggtgcatggggatcgggtaaaacaagcctccttaatctgatcctgagaaaccttgccctgaaaaaagatgctcacacacatgtgctgcatatttctccctggctgagtggcggcagtccggttgaagcgctctttcttccggttgccacggttatccagcaggaaatggaaatacgctatcccccgaagggcttcaaaaagctctggcgtaaatatctgttgtcaccggaagctcaaaaagtgattgagtatgctcaggatacttcatcgcgcgtccttccactggttcaatatatcggacagttttccagcattattaactggatagcaggcggaataaaggtattttcagacagccgtctggctgttgatcagaaaaccacgacaaagcttcgggctgaaattgcaggacaactggtgagtctggatctgaagttcattgttgtcatggatgatctggaccgactggagccatcccaggtggcggaagtgttcaggcttgtgcgtgcagtagccgatctgccccgctttacccatattctctgttatgacaggcagattatcactcatgccgttgaacatgcgctgaatatcgaagatggcagccgttatctccagaaaatcattcagcttagttttaaattaccccgacctgaagcctttgatttacgtaatgaatttcgccagcgggctgaggctctatatcagcaaattaataatcaaccgccagactctggaatggtaagggatctcatcgcggtgactgatacctatggtgccgcactttcgacgccacgggaaatccatcaggccattaattccctgatttttctttatccggggatgcgggattttgtttatttccctgatttgtgcctgcttcagcttatacgggtgacaaacccggctctgtatgactggacagagcattacctgacagaacggtccgtgattgaaaccggtcagggtatgctttctgacggagagaaagcagacttccgggaggggcttatcagatgtatgaagacgttcagggcatcaaatgcagactcgtttctgacacttgcagactggatcccaggtatcagtggacataatgatgaatatctgaatctttttgagcccgtcagtgaggattttcgtcatatccagacgaccggtaaacgactcagcagcctgacgcactggcgatattattttgccttctcctcaccacagaatgttctgccacctgaattcttcagacagctttttgaacaggctggcgtatcggaaaaacagcagcagctttctgaattgctgctctcaaaaatcaacagtgtgggcagtctgtccggaacctggtttgaacatatactgagcagactgactccaggcctgataagagaacgtaatttcgaagagtgcgcaggactggttcattttttcttcgatcacaccgatgaggtgagcactcgcttcagtatccgtaacccatggttttccctgcgtgaaatggccattaatgaggttgtacggcatctgctgaagcatatgcaggatattgatgagaccagaacgatcacgcttatggaaaaactgatcgttacgggtgcttcgccgttctggatagccgattttatgcgggatcttatctgggaacatggacttgctcagaatgcagtaccttcgccttcagacgctcttttcagtcgcgatattacggaacggttgcgtgacaggtttgcggaacgtatgaatcaaccagaacttcagcaacagcttctcctgcgcaagtctcttctcgggtatctctacgcctggagagacatgagttcaggtgaaaccgtgaagcaatgggtcagagaagttactaccactgatgaaggccttgttaacctgttgatacgattacagaccagtgtcttcagctcccaccgaggggcatatcgccggattgcgcgtgaccaggtcagtccgttctttgatgactggccagcagtcgaagagaagttgaaggttatgctgtccggcaacgagctgactccggagcaggaagcgctcaaaacagcgctggaaaatgacgactga

SEQ ID NO: 21309 - DNA, 900 bp, Escherichia coli
atggcgattgatatctttcagtcacttaaaaattgcgtattcgaccttcagcgcgctgacgttcagaactatcagcaacctcttaagcaattggcccggctcttgaactcagagaatctgcagtcagttaatgcacatctgacccgcaatgttgaacttgatacctttctggccaggagtgaagatactgaatccagcatggctggttccgctgttctacagtggcctgatgagcccgctgatattttgggcctgaagttgctgctgatcgagaaaatggcagacgataacaatttttcctttaatttctgtcatacatttttctatgatcgaaacattattgaatccattcgaaaattcacgtcgtcattagttgccccgttcgtgcgcgattaccagttgtatgtggaaaaccaacatgatcctgagcctgcagtgtttcggccggtttcccgaaaaatttttattgttcatggccatgataatgatgcccttcagtctgttgcccgttttatatcccggataggtcttgaggaaatcattctttcagaacgtcctgacggctccaggacgattatcgagaaatttgaagcagagtcaggggatgtcagttttgccatcgtgctgatgacgcccgacgatagcggcagtgctctggcatctgaaagcacacgtctccgcgcacgccagaatgtcctgtatgagctcggatatttcgccgggaagcttggacgcgggaaagtacttgtactcaggaagggagatatcgaaatcccttcagatcttgccggggttctctataccgagcttgatgagcatggtggatggaaacgcaaactgctgagtgagcttgcgtatgccggtgttccttttgacaaggataaagcattaagcgcctga

SEQ ID NO: 21310 - DNA, 291 bp, Escherichia coli
atgggcgtcaaaatcacaggtttagacaaaatgcagaaacagctaaaagaggttgagagagcaacggaggccttaaacggaagttatgatgttcgttttgatgctaacgatcctagcagcattgagaacgcaattcaggaagcctactccatggtggacgaacgcgcttctggttatgccactaatcctatggtcagtccattaatcgaacacatgaaagaaaatctgcgccaacagattctggacagtgcagaacaacaaagacaggagagcggacaggatggcgattga

SEQ ID NO: 21311 - DNA, 1500 bp, Escherichia coli
atgcgtgtgataatgaagcctttaagaaggactttagtattctttatcttttctgtttttctttgcggaactgtgtctgccagacagatcgagtggcaatcctgtatgaccagcccatacagtgactggtttggtaaagaaagctcttcacctgagttgttatgcggatatctatctgtaccgctaaaatataccgacacaggtaaggatgtgtcagatgaaaatataccacttgtcagactggcgatgacaaagttgccggcaaaaagtaaacgtaaagggagtgttattataataagtggcggacctggattacccggaattaatccttatatcaattttgactggccggtcacaaatcttcgggaatcatgggatattatcggttttgatccacgaggtgtcggtcagtcctttcctgccataaactgccagcaatccaatcaagaaagattggtgaatgtaagtgaaaagcaactaattttacagaaaattaatgcctgtatccataatacaggagctgaagtcattcgccatattggatctcatgaggctgtatatgatattgaacgcatcagacaagctctgggagataaacaactgacagctgtagcatattcatacggtacacagattgcagccttatatgccgaacgctttccatccagtatcagatctatagtttttgacggtgtcgttgatattgatgatttaaatgataatttttcatggaaactcaggcaggcccacagttatcaggaaacgtttgatcgttttgctgcatggtgtgccaggacaaaaagttgtccactttcttcagacaggaatcaggcaatacatcagttccatcagcttttattaaaattacataattctcctttaacagacagcaggggggaaagtatatcttcagatgatctcatatcattaacgacagagcttctgttatggcgctcatcatggccaacacttgcaacggccgtacgtcagttctctcagggtattgtcagcaatgaaattgaaactgcacttaattcttccatagcatcggaaaaagtcagtgatgctctgggtgtaatattatgtgttgatcagagtgatgaacaattatcacaggaacaacgaaaatcgcgaaaaaaagcccttgctgacgcatttccggccgttaattttgagagggaacagtccgatttacctgaattttgtgaattatggccaattcatcgcgatctgcaacagacacgcctgaagaatactgttttaccatccggtttactgtttgtggcacacaaatatgatccgacaactccctggataaatgcccgtaaaatggcagataaattttcagctccgttactgactattaacggtgacgggcatacgctggcgcttgctggcactaatttatgtgtggatgaggctgttgttcgtcacctcctgtttccggggaaatctgaagatataacgtgtcagggaagtggtaccggagacactaactga

SEQ ID NO: 21312 - DNA, 948 bp, Escherichia coli
atgcaaactaagcttctggcaattatgcttgcagcacctgtggtattcagttctcaggaagcttctgcttctgatttcttcggcccggagaaaataagtacagagattaatttaggtacactgagtggcaaaacaaaagaacgggtttatgagcctgaagaaggtggacgtaaagtcagccaactggactggaaatacagtaacgccgccattcttaaaggcgccgttaactgggagctgaatccatggttatctgttggtgcagctggctggaccactctcaatagtcggggggggaatatggttgatcaggactggatggattccgggactcccggaacatggacagatgaaagcaggcatcctgatacacgtcttaattatgccaacgaatttgatttgaacgttaaaggctggtttttaaaagaatctgattatcgccttgctattatggcaggttatcaggaaagccgttacagttttaatgctacaggaggaacttatatttatagtgagaatggtggtttccggaatgaaacgggagcgttacctgataaaataaaagtgattggttataaacaacattttaaaattccttatgtcggtctgacaggaaactaccgttacgataattttgagtttggtggtgcatttaaatacagcgggtgggtcaggggatctgataatgatgagcattatgtaagacaaactacattccgaagcaaagtaataaaccagaattactattctgttgcagttaatgccggttactatattaccccagaggcaaaagtgtacatcgagggtgtatggagtcgtctcacaaataaaaaaggggatacatctctttacgaccgtagtgataatacttcggagcataataataacggggctggaattgaaaattacaacttcattacgacggccggtctgaagtacacgttttaa

SEQ ID NO: 21313 - DNA, 4116 bp, Escherichia coli
atgaattgccaacgttatttttgttttgttaatggcattgttgaaataaggactgctcccgaagaatatcaaaacaagccagttctggttggttcacaaagtgacgggctattaattattgataatcatgcggatattgaggatggtatattttccacacttcatattggtaatggatataatggtgctgttgatgttattaatggtgctgctttacatatggataatcgttcaggaagcgcacctcttattgtaggtgcattcggtaatgatattgcaggaaaacttaatatttctggcagaaacagtatagtatcatatagagatacgcccagcagttctggacataacgaatctatttatgtcggttttgggcctggtgcaacaggatggattaatatttttaatggtggagtatttgaagttttaaatagtactaatatatatgtaggttcagatactcctggtgggggagatggcagtatcgtgattgatggcagcaacagcaagatgaccgcagatttttctgaggcatatgtcgggctttatggtaatggtgatatttccttaaaaaatggaggtcagttatctgccagtaacttatatataggaggtaatggtagagccattgttaatataagcggtactgattccagattaattgcaaatatgataaccatatcaggaagttctggtgcgccgggcatttacatagcagatcaaggaattcttaatgtagataactacatcaatataactacggcaaatgacacaaaagggaaattattcatcaatagcgacatgcctggaactattgaatctaaagggattctttttggtgttgggaaggcagagttgatttttaaacataactctgacaattatgctttttcatcacctttaatttctaaaaacacaggtaatggtataattaatgcagagagtggcgagacgcatctcacgggagataataccgattatagtggtttgttgaatattttacccacggcaagtattgatatcagtagtcaaaaaaatatcggcaagtcagtaattgttaataatggggtgctgcaaataaccagccaggatgactggacattcaataataatatgactggtaacggttatcttaatgttcatactggtggacataattttgctttccagaattcaacgaatacacaggaatttacaggtacgctggcattgtctgatacactctttgacttgagtgacgacaataccactgcactaacttcagcactagtgcttgctggggtcgggagtgtgataactgcaggtactggaactcaggttattaacggattttcatttgacggtggagccgtaaatttcggtgccgtaactcagggagctcagcaaactgaatcccagattcaggttactgacaatctgtatatcaatggaaatggtgctgtacgggtttcaacacccacagatgtgaatggtattccacaggtcattaattcttcactttcattgctggaacaggatgacagtaatgccaccattaaacttgtagatgcaagttccgcagttgtaaaggggaatggtggaaaccttcaactgcaggatgcctccgggcaagtaatatcctcaggtaagcaaaggaatatagttcaacagggaaaaaatgttgctaagggggtatacgattatcgtctgacatcagggccccataatgatggactgtatataggttatgctctgactcagcttgatttgctagcctctggtgttgatgcactcgtgcttgatgctgcaggtacaactggaaatgcagcagacatgagtgcccgtatcacaggtgccggagacctggctttcaacagtcagaaaggagaaaccgtttctctgtcgaatcaggataatgattacacaggagttacagctatccgcggtggtaatgtcctcatgaacagcaacagtgttctgggacagaccagcgagattcgtctggctactgatacccggctggacatgaacggtcatagccagactgttggtaagcttaatggtgctgcaggttctgtactgaacatcaatggcgggaatttgaccctgactgatgatggcgtatctgccggtactctgactggaggtggcttcctgaatatcagcggcggcgtcctcgatattacaggaggcaaccacacttttgctgtcagcaccataatagcaaaagatgcaactgtccgaatgaacgatgtttccggactgggtactggtaacatcagtaacgctgggacattatctcttactcatgcctcaggcttgctaagtaataatctgagtggttctggtacagtatctttgatcaatagtgatacccagatttcaggaaataacagtaactactcagggctgtttgtagtagataccagctctcagttgactgccactggagcgcagaatcttgggattgcttccgtgagtaaccgtggaatcttgcagctgaacaacacaacagactggcaacttataaataatgttactggaaccggtaatgtccgtaaaaccggttccggttcactgactgtccgaagcaatgctgcctggagcggacagacagatattgatgacggctctctgattcttgggcaatctgatgcacctgtcatgctcgccagtagcctggtcaatattgcaaagaacggtaaacttaccggatttggtggcgtagtagggaacgtaaccaatagtggaagccttgacctgcgatcggcggctccgggaaatattctgacgattggaggtaactacaccggtaataatggcacgctgctcattaacacagtgctggatgatagctcttctgcaaccgacaaactggtaattaaaggcgatgcgtccggtaagacccgagtggctgttacgaatgttggtggttcaggcgctaatacgctgaatagtattgaagttattcatgttgatggtaatgcagctaacgctgaatttattcaggccggacgtatagcggccggcgcttatgactacactcttggacgtgggccgggaagcaactatggaaactggtatctgagcagtagtaaaaatactccagaaccaaggcctgatcctgaacccactccggaagggcatgataacaacctgcgcccggaagccagctcctataccgcgaatatagctgcggcaaacaccatgtttgtgacccgccttcatgaacgtctggggcagacgcaatacgtcgatgcaattaccggagaaccgaaagcaaccagtatgtggatgcgccatgaaggaggacataaccgctggcgcgacggttctggtcaactgaaaactcaaagtaatcgttatgtgattcaactgggtggtgatatcgcacaatgggattggggtggaactaaccgctggcatctgggggttatggctggttacggtaacaaccatagcagtacaggtgcagtacgcaccggataccattcaaaaggcagcgtaaatggttacagtaccgggctgtatgctacctggtatgctgatgatgagactcataacggagcttatctggatacctgggctcagtacggctggttcgataaccatgtgaaaggtgacggactgccgggtgaatcctggaaatcaaaaggacttaccgcctcactggaaacaggttatgcctggaaaatcggggaattcagcagcaactatggcaatctgaacgaatggtatgttcagcctcaggcccagcttgtctggatgggggttaaagctgatgaactctatgaaagtaacggtactcttattgaaagcaccggagacggtaatgtccatacccgtctgggcgtgaaaacctggattaaaaggctcaataaaatggatgatggtaaatcacgtgagttcagcccatttgtggaggtgaactggttgcataatacccgtgattttggggttcgtatgaacggcgaaccggtgtatcaggatggtacccgtaatatcggagaggtcaaaactggtgtggaaggtcaaataaatccccatctgaacctgtgggggaatgtgagagttcaagttggtgataaagggtataacgacacctcagccatgctgggtgtgaagtatacattctga

SEQ ID NO: 21314 - DNA, 270 bp, Escherichia coli
atgtattttatgacaaaaaaaatgttaactttcgtgcaaactcccaaagaagggctctcttttgctatgactacttatctgaatttgtttgtgaaattgcttatttttctttatattcaaaataccaaagcatgtctatccataaacaatgttaacaataatagcaagaacaagttgcgtagtggtgtttcttactacatcatcaacttaaagatgagtatgttatttactgaacagatagttaccatatataataaattgatattctga

SEQ ID NO: 21315 - DNA, 5310 bp, Escherichia coli
atgaaagaattaaaaaagatcaatagatatataatgtgtttctttttgggatctcgcttagcatatgccgaaaatattgacggcagcagtaccattagcaatagggatatttcaggatcattaaatatagggattaataaagatgcaaatattgatattaacggcaccgtaaatattaaagattatttttcggtggctacttgcaatggtcaatctagcacctgccctgaaggtggattaaatgcatctgcaaagattgataaatcagcaagtgttggtgcaagtgttactattgttggtgactcttcaaagggggaattaaatatagatggtggtagcactctatatacacagcaattatgggtctctgggaatgataatgacaagaccagcaatgtcagtgatgacagtaatgggtcattgagcattaacaatggaagcaatgtttttgttgtatcatctcaagatgatacgccatttaaaaccaactcagtaaaatggaaccaaaatattatttcacaaggaaataatataacagatgggacggtttcctccggggatttagtcttgggtaaaacaggcaatggcattattgacatagataacaattcaaaactagatgtaaaaaatgatgtagttgtatctacgggggtagatggtattcctaatgaaaaaccttcggagataaatataaaaaatgaaagtaatttctcagttcatggggacatgaaaggaggtatttctgctgcaggcaagttaaatttaaatatggataatagttccaacctgcatgttgataagaatattgctgtgggcattgggcgtgaatcaaatattactgtaagcgcgtctagagaaagctctatattttcagatgggaattttactgtagctacaggaaacaattcgaatgctaatctaaaattagatgcctcaaacctgtcagtgaatggagtctctaccatcggaagtggagatggctccataactaaatttgatattaagaacggctctgttgtaacaagcagcagtgatatgactttggctaaaggtaaaggtacacaggctaatataaatatatcctcttcggagttaaatactggctcgctatcagttggtgagggggataatgctgatgtcaaaatgaccggttcaggagcttctgtcagcagtaaaaagaccttcactgttgcaaaaggtaacaatgcatcagcgacgctgaattacactggttcaaagatagatatcggtagtggttatatcggagagggtgagtctgctaagacccagctggagctgaataattcagcactgactgccagtggtaaggtatttatcgggcagggaaatacaacccaaacaaacctgacattaaatgataagtcgtcagtaaatgtgagcggcgagatgtcagtggcccagggaagttctgcttcagtagatgtgacagccactaatgcagtgctgtctgctgactctctgtctctggggggaggtgaggctgctaaagtcacaatgaccggttcgggagctactgtcagcagtaaaaataccttcactgtcgcaaaaggtaataatgcatcagcgacgctggattacactgattcgaaaatagatatcggtagcggttatatcggagagggcgaggctgctaagacccagctggagctgaataattcggcactgactgccagtggtaaggtatttatcgggcagggaaatacaacccaaacaaacctgacattaaatgataagtcgtcagtaaatgtgagcgacgagatgtcagtggcccagggaagttctgcttcggtagatgtgacaatcactaatgcagtgctgtctgctgactctctgtctctggggggaggtgaggctgctaaagtcacaatgaccggaaacagggcaacgattagcagcggcaatactttcacggtcgcaaaaggtaataacgcatctgcaacactggactactctgattcaaaaattaatatcggtaatggatatatcggtgggggtgaaaaagcccagacagtgctgacgttgaaggattctgcgttagctgcaaccggtgatgtaattatgggacaggggcaggaaactcagacagacctgacgctaagcccccagtcatctataaaagtatccgggaatatgtctattgcgcaaggtaatgccgcttcagccaaagtgattgtggacaatgcagatttatctgcgaactccatgtcgattggtgaaggcgatacagcagcagtgacaatgaccggaaacggagcaacgattagcagcggcaatacttttacggtcgcaagaggtaataacgcatctgcaacactggactactctgattcaaaaattaatatcggtaatggatatatcggtgggggtgaaaaagcccagacagtgctgacgttgaaggattctgcgttagctgcaaccggtgatgtaattatgggacaggggcaggaaactcagacagacctgacgctaagcccccagtcatccataaaagtatccgggaatatgtctattgcgcaaggtaatgccgcttcagccaaagtgattgtggacaatgcagatttatctgcgaactccatgtcgattggtgaaggcgatacagcagcagtgacaatgaccggaaacggagcaacgattagcagcggcaatacttttacggtcgcaagaggtaataacgcatctgcaacgctggactactctgattcaaaaattaatatcggtaatggatatatcggtgtgggcgaaaaatctcatacattactaaaactagacaactcaactttccatgccgctgggaatattgatataggtaaaggcagctccactatagctaatgtttctgtcggggctggtagtaacatgtcaataaaagggaatgctagtattggcgttggagatcaggctaaagcaaaattttcagtaaaagatagtgtgctgaatataggtagtagcctggttctcggacaggggaatagtaccgaagcagaaatgtctgttgagcattctcagctttatagtggcggcctgttgcttgggacggctaacaatgcagttgtttctatgagcgctaataattcagaaatatctgttgtaggggattatacagtagcaaaaggtgatggttcagaagcaacgttgatttacaaaaactcagatattaatcttgggaatggtatactaggtgcaggttccggagtcaaaacagatttatcattggataacagtaaatttgttgcatctgatggaatcatcatcggtaaaggtgataatgccataactaatctttctatatctgatcactctgtgtttaaaggagaacgtataaatattggtaatggttcatattcaaaaaattctataagtataactggaaattccatatttgatttcggatcatctcaggaatcaaccattggtgaaggtgattacagccagtcgttagtcaccattaatgatgcatcagtttatggtgatggttcattaactttggcaaaaggtaataatagttttgcagtacttaatcttcaggataatgcagtaactaatgccaacaacatttcacttgctacaggactgggcagtaaagcaatcgtgaatgttagtaatatgaattccggacagttcaatcctgtatctatgggagcaggagatggttatgcggaagtaaattttgatggtgttaatggctatacactctcaactaatttcatttgtatggattccggttcatgtgcagacactgtcataaatgtaaacagagggacagtttctctgtcaggaacaaatgactggaaagggcagataaatgtttatgacggaacccgactggatgcaagggggaatgatgccgttgatggtatactgaatgtcagcaaagaagcacaggttgactttaacggatactcgcagcatatgacagggatagataataaagggatgatttatctttctgacggaagtgcttcatcagatgtgtatctggataaagattatgttgcacatgatggttccggtgtacagttcgggattttcgggcagaaagaggcggatgtgatgcatgttaaaggtgatacatccgggagttcaggtatagttgtcacgacaaacagtaaaaataaaataaagaaaggtggcgacattcttcttgttgaggttaatggggactcatcaggtagtttttaccttaactcactgattaagaatggtaaggagtataaggtgacaggtgactacattgatgtgggggcctgggagtatgcgctgaacaagaaaaggaagaattggtatctgagtgtggatatgcgtcctgagccaggtgcgtttataaacaatagtaaaagtatgttagatatgtttgctctacaacggtatgacatacccgggcaacatcgttatcctacattgtttgaaaacttatataacaatgggatgtggattcaatttaacaacaactcaggtagtaatagtgaggtgtatgataatctcaagaccagttatagtttaaatactatgatgattggcggggatatatacaattggactgatggatataactattcacatatcgggataatgggcgggatggggagtgccgctaacaaaacaacgtcaacaaataataaaagagctaccggaaatgtagacggttatactcttgggctttatcatgtatttcaacaaaatatcagtgatggactaaatgagtcagaacgtcaggggctgtggacttattcgtctatacaatacatggattatgataacagcgtcagttcaacaaataatttcaaggctaattatggtgtaaatggttttcgcctgacaggtgaggttggttatctaaaaaatataggtggcatacaaccaagcgatttctacgttgaacctaagttatacctttcgcatactgagttgtctggaggtgtagttgaagatcttcagggagggaaaataacttatccgaattcgctaactattattgaaccaggagtatttttctcttatcgaaaaactcatgaatcgacttccaatgatgaagcaatgtttaaagattatataaaacaatctgtagtcgatgcatggtttggtggggggtattcatttaaaactggaaattatagtcgtactaactttgattcagatatggttgaatataatacatcggataatttcgctcttaagagtggtgttgaatttgaatttttgaaggatgcacgtcttttattaacatcctcatactcaataaataatgatcgcaacttgagttttattcttggtggcaattattatttttaa

SEQ ID NO: 21316 - DNA, 234 bp, Escherichia coli
atggtaagatatcatggcgaatttacatactatgtttatcaacaatctggacgttactttttttgtaagaagctaacgaaaaagagagatacatcaaattgtaatcatcttcatataattcgagaattatccttcaatgaggacgagttagaattaatagatttcagcacagacggtttggacgcaaatgataaagaaataatcaggggaatgattgatgagttgaaaaaataa

SEQ ID NO: 21317 - DNA, 693 bp, Escherichia coli
atgtatagagttaatcatattatgagaacaataaatgaaatgagttcttatactccgcacatgaaagtaaacagaattgctgaacggttgagtaaggtgcaaaaaatatctttttgcatctctgttatttctttttttcttcttgccataattactttgacatatggaccgtttaatacaaaaagtaacttgagttttattagcgcattatctctttattttattaatgtcattatgggagttacatatttatcagttcctgtaattaatacaataaagtatatatataattttaaaggggaggtggtcaatgaattaatatatgacattgatagtgatgagcaacatattgaagcattgttaccttattcattagaagagttgacatatgtgtcaaactgtatacaggtaagaattcccaaaataaaatcaaaatgtttcttatggggaggcgggaaaacagcaattatatcaattttatgcctatcgtattcggctatttgtatcgttaatggaggtagcatagatggtatttttgttggggagactggtgataaaattattgtcgccatcatgttttttatactttacacatcattgatgaatatgtttttcaaacaaaaattgctatatttacaaaatttaaaaatgataatagatatgactataaagataaaaagaaatttcacatga

SEQ ID NO: 21318 - DNA, 210 bp, Escherichia coli; identical to SEQ ID NO: 5053

SEQ ID NO: 21319 - DNA, 2265 bp, Escherichia coli
atgcaaaggaaaactctattgtcggcctgtattgcattagctctgagtggtcagggttgggcggcagatatcacagaggtagaaaccaccacaggtgaaaagaaaaataccaatgtgacttgtccggcagacccaggaaaactcagtccggaagagcttaaacgcttaccctctgaatgctctcctttagtcgaacaaaacctgatgccatggctttccacaggcgctgctgcgttaatcacggccttagccgtagtggaactaaacgacgatgatgatcatcatcatcgcaacaattctccactcccaccgacaccccctgatgatgaatcagacgacactccagttcccccaactcctggcggagatgagataataccggacgatccggatgatacgcctacacctcccaaaccggtttcgtttaataatgacgttattctcgataaaacagaaaaaacgttaactattcgcgattcagtttttacttataccgagaatgctgacgggactatatctctgcaagatagcaatggtcgtaaggcaacgattaatctttggcagattgatgaagcgaataacactgttgcccttgaaggggtgagcgcagatggcgcaacgaagtggcaatataatcacaacggtgagcttgttattacgggtgataatgccacagtaaacaacaatggcaaaaccaccgttgacggtaaagattccaccggtacggaaatcaacggtaataacgggaaagtgattcaggacggcgatctggatgtcagcggcggcggtcacggtattgatatcaccggtgacagcgcgacggtggataacaagggcaccatgaccgtcaccgatccggagtccatgggtatccagatcgacggtgacaaggccatcgtcaataacgaaggcgagagcaccatcaccaacggtggcaccggcacgcagattaacggtgatgacgccacggcaaacaacaacggcaaaaccaccgttgacggcaaggattccaccggtacggaaattgctggcaataacggaaaagttattcaggacggcgatctggatgtcagcggcggcggtcacggtattgatatcaccggcgacagcgcaacggtggataacaagggcaccatgaccgtcaccgatccggagtccatcggtatccaggttgacggcgaccaggccatcgtcaataacgaaggcgagagcactatcaccaatggcggcaccggcactcagatcaacggtaacgacgccaccgcgaataacagtggaaaaaccactgttgatggaaaagattccacgggtaccaaaatcgcgggcaatatcggcattgtaaatctggatggtagcctgactgttacaggcggtgcgcatggtgttgagaacattggtgacaacggcacggttaacaacaaaggagatattgttgtttccgatactggatcgattggcgtgctcatcaacggtgagggggcaacagtatccaatacgggtgatgttaacgttagcaatgaagcgacagggttcagcatcacaaccaacagtgggaaggtttcgctggcaggcagtatgcaggttggcgatttctcgaccggggtagatcttaatggcaacaataacagcgtgacgctggcggcaaaagatctaaaagtggtcgggcagaaagcgacgggcataaacgtttctggcgatgcgaatacagtgaatatcactggtaacgttctggttgataaggataaaaccgcagacaatgcggcggaatatttcttcgatccatccgtgggtatcaacgtttacggcagtgataataacgtgacgctggatggaaagttaactgttgtatcagacagtgaggttacttctcgtcagagtaatttatttgatggcagcgcagagaaaacgtcaggtctggttgtgattggcgatggcaataccgttaatatgaatggtggacttgaactgattggagagaaaaacgcgcttgcagatgggtcgcaggttacttccttgcgcacaggatatagttataccagcgttattgtcgttagtggtgagtcgtcggtatatctgaatggagatacgacaatcagcggagaattccctctggggtttgccggggttattcgggtacaggataaagctttgctggaaattggcagtggcgctacgctaacaatgcaggatattgacagttttgaacatcatgggacaagaaccctggatttgcccctatatttccagacatctgttatcacttaa

SEQ ID NO: 21320 - DNA, 372 bp, Escherichia coli
atgaaaaatcctactgatcctgaggaattagccaatatttttaataaaaaacataaagaacacatggatgatcctctattccatctaatccgaagcaatactttgaaacccacacctgtatatgctaattattttgataacactactgatttcagaccagcacgtgaacgtatcttcatatgtggggagacactcaaaggtgaagaccccagcaaatacattagacaaaaatatgggcatcatgggcccggggtagatcataatcaacaatttgataatggtattatggggctaaattccctgaaggaagcacgtgataaaaataataaaataatttattcctcagggcttagttgttttcaactacattaa

SEQ ID NO: 21321 - DNA, 1239 bp, Escherichia coli
atgaaagcaattgacaatcagattagaaacatctcttcaagccatcaagataagcattcagataaagttaacagtcatcaacaccatggcaaggttgataaaacacatcgtgcaaagatagttgaatttgataaactggataatgattcgcaaatagataacgattttggcctgcatatcatctatttcctgcaacatggtcactggaaggtaaatgatcgtagtcaccagatggagaaagtatggttttataatagtgaaccttctatagatattcaagaatataatagattcgccgacaatactactgatacgtttatctttacaattataccagacaataaccatgtgttaaaattatcgtctcccattaccgttactgttgagtgtaagggcggttattattttattaattcctctggagataaatcagatataatttataaagttgatgggctttctatcatagcgagaaatttctttactcttcttagtggtaatttcaaacctgactggcgttgggatgtctctaaagagacgtttactaaggaaaagtttgatagctatgttaaatctgtgttttcaaaaatagacttctataaacagtgtggtgtgattaacccacaaaatgccaacacggcttattttggcgatacagatggaagagtaggcgctgtactttatgcattgctcgtttcagggcatataggcatcagggaaaagggttggagtttattatgtgaattattaaaacacgaagagatggcttcatctgcatacaaacataaaaataataaagtgctctacgatttattaaatacgagagacatgatcttgaatgagttgcatcaacatgtttttttaaaggacgatgcgataaccccttgtatcttccttggggatcatacaggcgatagatttagtactatttttggtgataaatatatccttactttgctaaattctatgcgaaatatggagggtaataaagatagccgtattaataaaaatgtcgtcgttctggctggaaatcatgaaatcaattttaatggtaactatactgcacgactagcaaatcataaactctctgccggtgatacgtataacttaattaaaacgctcgatgtttgtaattatgactcagaaaggcaagttttaaccagtcatcacggaataataagagatgaagaaaaaaatgttattgtctcggtgctttgcaggttccatttaatcagatga

SEQ ID NO: 21322 - DNA, 732 bp, Escherichia coli
atggaggctcgtgttaccgttgctggcatggggctggtgatggaggtgcaggattacttcgatggcgaggccgatagactggcgaaggcgtggctggccgagtacacaccgcaaatcaagtcgttgaaagatgagcgtaaagaggcctatcgtcaaatcgtcgaaatgagtaccgaaccgcaggatgtggatctggtcaggccggcgaacaagtttgaaatgaccagggtgcgtgaaggtgaaaaggaagctgaccttccagtctggaaacaccatttgttgtgtgacgaaagcgggaactatccggctctgttgaaccattgggaaaccaaggtttttgagatcgaaaccaaacgtgaaggatttgctttctggtatcgtaatccacagtacacagggcagtcgtcactgggaatcgcttatgttgaagctgaacagtacaagattgttcgtcccgatttcctgttctttgccgaacaggatggcaaaatggttgtggacctggtagatccacatagcctacatctggctgatgctttgcccaaactggaaggacttgcgctatatgccgaacatcattctgatgcttacaggcgaatcgaatctgtcgccgaagtaaagggtaaattacgagtgttagatttgaaacggcaggatgtgcaggatgctgttgctaccgctgaaaatgcagaaacgttatttagtagcggacttgctgatgactatcagtaa

SEQ ID NO: 21323 - DNA, 627 bp, Escherichia coli
atgaaaacatatcaaggtactcatggagtacatatcctcgaatatcagagtaagattaataaattattatgttatttgactaaccggtatcctaggttaattgctgtacgtgtcgatctccactatcccaaaatagttgataacggtgacaatatctgttgcttccctaacctggaacctggggtgatatcccggatgcgtgaatccctcagagctaagctggaggctgaccgtacccgtaaggtgcgtgaggataaacgcatttaccgttgccctttatttattatatgggcgaaagagtattctgaatcaggtaaatgccactatcacatttgcctgttgttcaacaaagacgcttactaccacctcggggattacgatcaggacgataaccttagagggatgatcacaggagcctggtacagcgccctgagactggagagagacgatcaccctggtctggtccattttcctgaaaactgtaagtatgtgctagacaccaatagtactgacttccagcagaactaccaggcgctgttaacccgactggactacctgaccaaagttgaaagcaaagtgtttggtgaaggagaccgtaacttcggctgtagccaaatcgaactgtaa

SEQ ID NO: 21324 - DNA, 699 bp, Escherichia coli
atgagaggtaaaatactactttaccagttaaagtatcgctggcaatcactctctatttttggttgttttttatgcaaaatgacattattcaggtatcaaaaaataatttatgacaccggagtgcatcagatgcgttcatttttttacaccatatgcagtagcgaacagcaagaaagcattacagatcatcactcacttgctgagatatgccaaaaatttaatattctacctgaacatgttgtgatcgagcaggtagatattaaagaggttgtttcagagcaacgtttactcagacaattgattcatcatgaaatgaaccggcaggacacgcttgtcattccagatctaagctgtcttggcagaactgtggaggacttacagaatattttatttttttgccttcaaaaagaaatgtttatctacagctaccatccagcttcaaggatagagccttctgctgaaagttgcttgtcttttttgattgctcgtcaggatacgattgacattcacaatctgaaatcaactaaaagccgatatcgacatgttaagaaaaaattaggacgaaaggagggaagcaaataccgacgtgatatcacaatacttaagaaaggtggatttactcaggctgagattgcaaagaaattgagtatcagtttatcgactgtgaagcggcactggaataacggaatcatcggttaa

SEQ ID NO: 21325 - DNA, 855 bp, Escherichia coli
atgtctaatagtgttactaattttgagatgagcagcgttctaccaggaaaaaaaccttgtcaaggcaaaaacaatgagtcacaggtagtacagactactcccataaaaaaacactcagtcacgttcaaaaatcaatcttcattaggagtaattgatcattatgccagactaacaaataaatctcactcttccgtaatagcggaagttgtggatttggctatccctatattagaaaaatgcaatcgtcataactggtcaataaatgaaataaaaaatgacctgttaaagttctctataaaagaaagcatcaatcgaagccgaggtaaaacagaagtaactctggaagagtactgttcgttaatctggaaaacgaacatcatgagtccattaaaaatccccattgcagattactttcaactgaacgctaatgatgaattcatggggaaagatgaaaaaacagttatacgtgaaaggctatcctcgctaagggaaaattacgatatggaaaaagccatttacatttacaatcaaagacattttgatgtaaagcatcaaagtgtctcaggatattcaaacattattcttattcatagaacaacctttgagggttattactttgatgccgggcaggctctactcttgtcaacatcccaattgattatattcgggataaatgaagttcttagaagaaaggggattgttatgccttatccggttgtttgttggattgatatttaccatgtcaatgaaatggtggttatgctgccagtgctccgcaaaacagatgtttccaaccgtgttaatgtaccggatgacatcattataaacccatactcacaagagagcagaacctaa

SEQ ID NO: 21326 - DNA, 225 bp, Escherichia coli
atgagcgcattcaaactcccggatacatctcaatcacagctcatttcaacagctgagttagctaaaatcattagctacaaatctcaaaccattcgtaaatggctttgtcaggacaaattgcctgaggggctacctcgcccaaaacaaatcaatggccgccattactggttacgtaaagatgtcctcgattttatagatacattttctgtacgagaaagtctgtaa

SEQ ID NO: 21327 - DNA, 441 bp, Escherichia coli
atggcaaccccagcaactgtatccatagaacccactctggcagctatcagagctcgctggtgtattaattcaagtaaaacaactcaatcctttaacgatcctgcgtccatggaagaggttgtcgagtatctcaaaggaacatactcagctcttcgcaagtctgtcgcatgcgccaaactgaaaattttacatcttaaacaaagaatgcaaaatgctactaactttctcgcgcgtctgatgtcatgtaaaaatcaggcatccagatcgcatcacagtacggctaaatcagctaaaagtgccttatcatcagattcaggtgatggtagtgaccccgaccccgagcccgaaacgtttccttctgccttcattactacccctactaattcaataatgcttaaagctttctttgccaatatctcaatcactgaggtggcaaaatga

SEQ ID NO: 21328 - DNA, 1326 bp, Escherichia coli
atggcgctttcaagacaaaaatttaccttcgaaagacttcgcagattcaccttaccggaagggaaaaaacaaacttttctttgggatgcagatgtaacaaccctggcatgccgagcaactagcggagcaaaagcctttgtattccaaagcgtatatgcggggaaaacccttcgcatgactattggcaacattaacgactggaagattgatgatgcgagagccgaggcaagacggttacaaacattgatcgatacagggatagatccacgaattgctaaggctgtaaaaatcgcagaagcagaatccctgcaggcagaatcacgtaaaacaaaagtgactttctccgtcgcctgggaagactatcttcaagaattgagaaccggtatcagtgcaaaaactaaacgcccatattctactcgatacattgccgatcacattaacttgtccagtcgtggaggcgaaagtaaaaaaagaggccaaggcccgacttcggctggaccattggctagtttgctcaacctgccgttatcggagctaaccccagattacatagcagcgtggctgagtacagaaaggcaaaatagacctaccgtcactgctcacgcttatcgcctactacgtgctttcatcaaatggagtaattatcagaaaaaatatcaagggatcattcctggcgatctggcacaagattacaacgtaagaaaaatggttcccgtgtcagcgagtaaagctgatgattgcctgcaaaaggaacaactaaaaagctggtttagtgccgtgcgtagcctcaataatcctattgcatcggcctatctccaagtacttttgctcactggtgctcggcgtgaagaaattgcgtcgcttcgctggtcagacgtagatttcaaatggtcaagcatgcgaattaaagacaagatcgaaggtgaacgtatcatccctctcactccttatgtttctgaattgttaaatgtactagcgcaatccccaaattctgacgtaaataaggagggttgggttttcagaagtaacagtaaaagtggcaaaattattgagccgcgttcagcgcacaacagagcattagtgctggctgagttaccacatatcagccttcacggtttacgtcgtagttttggtactttggccgagtgggttgaagttcccactggtattgttgctcaaattatgggacacaaacccagcgctcttgccgaaaaacactatcgccgtcgtccgttagatctgttacgaaaatggcacgagaaaattgagacatggatcttaaatgaagcaggtattaccataaaaaacaacgttgatatgcgttga

SEQ ID NO: 21329 - DNA, 888 bp, Escherichia coli
atgtcacattataaaacaggtcataaacaaccacgatttcgttattcagttctggcccgctgcgtggcgtgggcaaatatctctgttcaggttctttttccactcgctgtcacctttaccccagtaatggcggcacgtgcgcagcatgcggttcagccacggttgagcatgggaaatactacggtaactgctgataataacgtggagaaaaatgtcgcgtcgtttgccgcaaatgccgggacatttttaagcagtcagccagatagcgatgcgacacgtaactttattaccggaatggccacagctaaagctaaccaggaaatacaggagtggctcgggaaatatggtactgcgcgcgtcaaactgaatgtcgataaagatttctcgctgaaggattcttcgctggaaatgctttatccgatttatgatacgccgacaaatatgttgttcactcagggggcaatacatcgtacagacgatcgtactcagtcaaatattggttttggctggcgtcatttttcaggaaatgactggatggcgggggtgaatacttttatcgatcatgatttatcccgtagtcatacccgcattggtgttggtgcggaatactggcgcgattatctgaaactgagcgccaatggttatattcgggcttctggctggaaaaaatcgccggatattgaggattatcaggaacgcccggcgaatggctgggatattcgtgctgagggctatttacccgcctggccgcagcttggcgcaagcctgatgtatgaacagtattatggcgatgaagtcgggctgtttggtaaagataagcgccagaaagacccgcatgctatttctgccgaggtgacctatacgccagtgcctcttacccagcaatag

SEQ ID NO: 21330 - DNA, 228 bp, Escherichia coli
atgatgaaaagagtgtccatgaacgagtggataatgcccgtattgatttacgctcaaaatactatgttaaacctaaagctgaccatccctggcttacgcgccgaacgcaaagtcatcagcaagttaagcccccgaagttacctaaaaagaagcctgatcccgataaaaaagattgaaaccaagatcgattcggttgagtgcatatccattcatagggtagattcttaa

SEQ ID NO: 21331 - DNA, 2097 bp, Escherichia coli
atggaattgaatattacttcaaagtctaatccgtttggtgatacgacagcagaaaatgataaaaagatgttgagtaatgctttcattgaaactgctgactttaggactctaattgaaactgatgacaggaccattgttgttggtagacgagggacaggtaaaagtgctttatttattcagctaaatgagcattggaagaaagacaaaaaaatattaatcctgagtttctcaccagacgattctcaaattattggtttcagatcaatgttgaaaccatttacaggatcatttaatttagcaagggcagcaacaagactattatggcgatacgctatgctaatggagatagcatcatatatatcatctcattacaaattgtcatctcaaatatcatcagaaacattgttgaatgaacatttgaaaaaatggaattctgcacaaggtgacattttaagaaagtgtaggcttgtcgcaaaggagtatttagatgaaaataacccagaagaatcaattggtgatcttcaattcaatttgaatatctcagaaatagaaaataatatagtatcacttcttgaacgctcagacaggaaagttgtcatattaatggataagctagatgaggcgtatgaaccggataatataggaattggaatcattgcaggtctagcatatgcatctattgaattaaatcaaaaagcaaaatgcattcgtccaataatttttttaagggataatatatttaggtcgctatcaaaggaagatcctgattactcgagaaatatagagggtcaagtcataaggttgcattgggactgggcacaactcctaatgctgtcagctaaaagaatgaaagtagcatttaagctagatattgagaaagatcaacgagtttgggatagatgcacagcggatgatcttaaagggaggaatggttttaagcgatgtttgcaatttaccctttaccggcccagggatttactatcattgttgaatgaagcttttttttccgcattcagagagaatagagaaactatcataaacactgacctagaatatgcagccaagtcaatttccatggccagacttgaagatctctggaaagagtatcagaagatctttccttcaatacaggttataactagtgcatttcgtagcattgaacctgaattaacagtttatacgtgcttaaaaaaaatagaagcatctttcgaattaatcgaagaaaatggagatcctaaaataacgtctgaaatacagttgttaaaggcaagtggaattctccaaagtttgtatagtgtaggatttgttggtattcgtgataaaaacacctcatcctattcattttgccatgacgggcgaactccagataaaggttttgaaagtaatgagaaattattaattcatccatgttactggcttggtttgaatctaaatcgtaatgcacttgctccagaggaagcagaggagataaatgacgaatatgatattaatattatttcagataattcagccattagaaataaaacaataggtcaaataactactcatctagatcagataccgataggaaatgaaggtgccactgaatttgaacaatggtgtttagacgcactaagaatagtatttgcatcccacctaacagacatcaagtcccatccaaatggtaacgcagttcagagacgagatattataggcaccaatggtggcaaatctgatttttggaaacgagtattggaggactataaaacaagacaagttgtttttgatgctaaaaattttgaagaattaggtccatctgagtatagacaattacaatcatatttaacaggtccgtatggaaagctcggttttataattaatagagatgagagtgaggtattgaaatcaggaaaagatttagattggacaaaggaaatgtatcaatcccataattcattaataataaagttacctgcgaaatatatatctaaactgctgcagaaattaagaaatcctgaaaaacatgacgctatagatagacagatggggaaacttttaactttatatgaaacatcatatatggctattaaaagcacccaaaagaaaagaagaaaataa

SEQ ID NO: 21332 - DNA, 3009 bp, Escherichia coli
atgcctgtcgactttctaacctctgaccaaaaacagaattacggttgttatgctgcagaacctaatgacgtgcaactggcgcgctattttcatcttgatgaacgggatctggccttcattaaccaacgacggggcaaacataataggctgggcattgcgcttcagctcaccacagcccgttttctgggaacatttctgacggatttaactcaggttctgcctggtgttcaacattttgtcgcggtacagcttaatatccaccgtccagaagttctctcccgctatgctgaacgggacactacccttagagaacatactgcattaattaaggaatattacggctatcatgaatttggtgattttccatggtctttccgcctgaagcgtctgctatatacccgggcgtggctcagtaatgagcgaccgggtctgatgtttgattttgccactgcatggttgcttcaaaataaggtattactgcccggagcaaccacactagtacgtctcatcagtgaaattcgtgaaagggcaaatcagcggctgtggaaaaagctggccgcactgccgaacaaatggcaggcagctcaagtgatggagcttctggtcattccggaaggtcagcgtgtatcagcactggaacagttgaaaaaaggccctgttacagtcagtggacctgcgtttaatgaagcgctggaacgatatatccgattacgaagtcttgagttttcccgactgaacttttccggtctgcctgccattcaactgcgtaatctggctcgttatgctggcatggcgtcggtaaaatatatcgctcgaatgccacagcagagaaagcttgctgtacttactgcattcgttaaagcacaggaaataacggcattagacgatgccgttgatgtgcttgatatgctaattctggacattatccgcgaagcaaagaaaaccgggcaaaaaaaaagactcaggacactgaaagatcttgatcaggccgcattgttactggcgcgggcatgtgcattgttgctggatgataatacagatgtcccagatctcaggcaggttatcttcaagtgcgtacccaaaaacagactggcagaatctgtaagcaaggttaatgaacttgctcgtccacagaacaataatttccatgacgaaatggttgagcagtacggtcgggttaaacgttttcttccggcggtgttgcgggacctgcatttccgtgcggcaccggcaggtgaacatgtactggctgcgattcattatctggcagaactgaatggttcgaaaaagcgcatccttgatgatgcgcctgaacatattatcaccggtccctggaaacgcctcgtatacgatgcggagggacggatacagcgtgcaggttattcactatgtttgctggaacgccttcaggatgcactgcgccgccgggacatctggcttgaaaacagtgatcgctggggagatcctcgcgagaagttgttgcaaggtgaagagtggcagactcagcgtattcctgtctgtcgggcactgggacatcctgtcgatggacgtaaaggtgtgcaacaactggctattcagctggatgagacctggaaagccgtggcatcacgatttgaaaagaatgcggaagttcatatctgtaatgaaggtaaatatccatccctgactatcagttgtctggagaaacaggaagagccaccatcattgcttcgtctaaataatcggatcaaacagctactcccaccggtagatttaacggaactgttacttgagatagatgcccagacaggatttacacatgagtttgcgcatgtcagtgaatctggtgctcgagcgcaagatttgcacatcagtttatgtgcggtattgatggctgaagcctgtaatatcggactggaaccgctgataaagcacaatataccagcactgacccgccatcggctcagttgggtgaaacagaattaccttcgtgcagaaacgctggtcagcgccaatgcccgcctggttgattttcagtccacactggagcttgctggtcgttggggaggtggagaagtggcatcagctgacggcatgcgctttgtcacaccagtgaagaccatcaactcaggatctaacagaaaatattttggttctggacgaggcatcacctggtataacttcgtatctgatcagtactctgggttccatggcattgtggtacccggtacattacgggattcgatttttgtactggaaggacttcttgagcagcagacagggctgaatccagttgaaatcatgacagacactgcgggtagcagcgatattattttcggtctgttctggctactggggtatcagttttccccccggcttgccgatgcaggtgaggcggtgttctggcgggtgaataaatcggcaaactacggagtactggataagttggcccgaggatatgcagatctgtcaaaagcggagagtcagtgggatgagatgatgcgaaccgctggttcgctgaagttgggtacaattcatgcgtcagaactcattcgctctttactgaaaagctcgcgcccatcaggactggcacaggcaattatggaagtagggcgtgtaaacaaaacgctatatctcctcaattatattgatgatgaagattatcgtcggcggatcctgacgcagcttaatcgaggagaaggccgccacgctgtggctcgtgcgatttgttacggacaacgcggagagatcagaaagcgttatcgtgaagggcaggaagatcaactgggggcgctgggcctggttactaatgcagtggttctgtggaacacgctctatatggaggaagcgttgagctggatgcgccgtaatggcgaagaaattatagatgaagatatcgctcggctatctcccctgatgcacgggcatatcaatatgttgggccattatacattcacgttgccagaggatattttaaaaggggaactgagagctctaaatttaaatataaacaacgaattatctccttaa

SEQ ID NO: 21333 - DNA, 1062 bp, Escherichia coli
atgaatactataaaaataaagctaaacctaattgattatgattcaattgtaaatattgaatttccctgtcttctatctgaaatagagatagagttattatctcaattactgaaggggtattctgtaaatgagatttccaagcgaagaaacagaagtatcaaaacagtctcgtgccaaaaaatgaaattatataaaaaacttaacgtaaaaagcgatctgactttatggcgagatgtttttttaagatttaaagcctacctacaacctaaaaatatcatctgtgataattttaatagctctgttttaccagttgtttcatctaaaggggagagtatggcgcactacaacatatattaccaaccgatctataacgcaaaaaatggaaatattgctggatgtgatgttactattgcgttaaaaaattcagatggtagtgcttttgcactagattctgacagaattaattataaccccaatgataacaaagtatcttatttgtttggacatatcaacaaactattctcaccgattaaaaataatcttccgcatggtttttttattacgataaacattaatcctgaagatattcttacctgtgatatcgaaagggagtgtttacattttattaaagttttcggaacggaacggataagacttgtcttgcagttttcaactaaagaagaactttacataataagaagataccagtcttctttaagacgtatcagaaataataatgtttatttatcgcttaatgatttcggtatgggatatgctgagctttcacacttgcaaaacatacctttctcctatgtaaacctacataaaacaatgttccatgatatagaaagcaatagtttaacagatataatagcaactacaattattgatttatcaaaacaactgcatatagatgttattgctgatggtatagaaacgaagaaacaggcaggttatatgattgaaagaggagttaaatatttaaaaggcattgcattatcatcaccgctacctgcagatgcatttgtacgaaaattgttagcttcattaaaacaagtctaa

SEQ ID NO: 21334 - DNA, 411 bp, Escherichia coli
atgattatatttcgatatttaattattattattttaagcgtatacatgacagggtgtactaataataatttaaagaaagaagatatccccgaagatatgttcgcaataatttatggttcggatagcataaaaaaatatgaacacggacagatggagcttacaaaaaatatcaacagtggatgtattgaagccttggtttttttaagtgaagaggaccccgagaaatatagcgattatataaatgattatcataaaattgcagaggggtatcgttttcttgatgataacagaacattcatgaataaagattcaattgaattattggtaagagggttaaatgttaaaaaggatgtcctctgctcaagagtaaagtttgaaagctttcagcaccttaaaaacaaattccaataa

SEQ ID NO: 21335 - DNA, 126 bp, Escherichia coli
atgaaattcgagaatgttatcttactccttgttcttgtcattatgttttattttgtaataacaaatttaattgaagcgaatgattactacaaagaaatacatgtatattccgatgtatacaagtga

SEQ ID NO: 21336 - DNA, 396 bp, Escherichia coli
atgttttctaaaggaaaaataaaggaaagtgattcgaccacgacaattatttcaaaaaatacttcgtttgttggcgatattagttctggtgaaaaaataataattcacggaaaaattaatggtaatataaatactaacaatggtgtggtatttattgataaaggaggagttgttaatggtagggttttatgtgaaaaaatgattttaaatggtgaattgtatggtgaatgctgttgctccacgttagatgtttatgaaaatggttttttacaaggagaagttagctatcgatttctggagattcgtaatggcggatgtattacagggattgtaaacaaggtgactgacgaagtgcaaaacaatgtatctgagttagtaaaagcgagagaaagttaa

SEQ ID NO: 21337 - DNA, 414 bp, Escherichia coli
atgtttaataggcgcgtcttatttctgtctgttttttcctgtgctgtattcatgttatcaggttgttcatctaatagatttgcctctagggatgcaaatgctacgtatgttaatacgcagctaaaaataatacctcgatcccaggagaaaatacaagctcaatcacaatgctcaaggagcttttcgctactgcaaaaattaaacacggataagtttagcatgtatagaaatcagttcgatgagataaatgatgcatactttttttataaaagaaatgttgatttaatgaataaagactctaaagagttaatggcaagcgttcttgattctaaactagatatggtatgtgtacgagtcgataacgcctcatttgtaggtatttatgggaaaatgaaaaaagttatggacttataa

SEQ ID NO: 21338 - DNA, 603 bp, Escherichia coli
atgtattgtataaatactgattgcacatatacaaagattgcaatagagcagctactgcacgaaaagtattttgatgacaggcgttattgccatagtattaagatctatgatttaaggttttttaaaatagaggatgttgcctacaaattaatacagttatttaaggagagaagaaaagaaaatataatatttctctgttccgataggtttatacacagcaaagaaaaaccaagaaacattttttttctggatacaaaagatagcatacgcaactggagtagacatttaaaaaaacttcgttattgtaatagtaacttgcttatatgctttttatttttatgtggcctctaccatatatctgtatttacaggaaaaaaacaggtgattattgcctgtataaaaaaaggattttcttttgctgaaattgtgaattttcttaacattaatgcgagaacattagttaattatcttggggggcttacaacttattttattcttccatatagtgattctttatataaatatattatagataatattatagcatcatctaccgaagagtatcatattcttttgacaaatcaaaggagatattatgtttaa

SEQ ID NO: 21339 - DNA, 1005 bp, Escherichia coli
atgtccgatttatacaaaaaacactttctgaaactgctcgactttacccctgcacagttcacttctctgctgacccttgccgcacagctcaaagccgataaaaaaaatggcaaggaagtacagaagcttaccggtaaaaacatcgcgctcatcttcgaaaaagactcgactcgtacccgttgctctttcgaagttgccgcatttgaccagggcgcgcgcgttacctatttagggccgagcggcagccagattgggcataaagagtcaattaaggacaccgcgcgggttctcgggcggatgtatgacggcattcagtatcgcggtcacggccaggaagtggtcgaaacgctggcgcagtatgcgggcgtgccggtgtggaacgggctgaccaacgagttccacccgacccagctgctggcggacctgatgaccatgcaggagcacctgccgggcaaggcgtttaacgagatgacgctggtctacgcgggcgatgcgcgcaacaacatgggcaactcgatgctggaagcggcggcgctgaccgggctggatctgcgcctgttggccccgaaagcctgctggccggaagagagcctggtggcggagtgcagcgcgctggcggagaagcacggcgggaaaattactctgacggaagacgtggcggcaggcgttaagggcgcggactttatctataccgacgtgtgggtgtcgatgggcgaggccaaagagaagtgggcagagcggattgcgctgctgcgcgggtatcaggtgaacgcgcagatgatggcgctgaccgacaacccgaacgtgaagttcctgcactgtctgccggcgttccatgacgaccagactacgctcggcaagcagatggcgaaggagttcgatctgcacggcgggatggaggtgacggacgaggtgtttgagtcggcggcgagcatcgtgttcgaccaggcggaaaaccggatgcatacgattaaggcggtgatgatggcaacgcttggggagtga

SEQ ID NO: 21340 - DNA, 759 bp, Escherichia coli
atgccgattattcagtctgttgaacgtgcgttgcagatcctcgacctgttcaacgagcaggccaccgagcttaagatcaccgacatcagcaaactgatggggctgagcaagagtaccctccactcgctgctaaaaaccctgcagcttcacggctatatcgatcagaacccggagaacggcaagtatcgcctcggcatgaagctggtcgagcgcggccattttgtcgtgggctccatcgatattcggcagaaggcaaaaggctggctgacggagctgtcccggcggaccgggcagaccacccatctggggatcctggacgggcgtgaaggggtctatatcgagaagattgaaggcaagctggccgccatcgcctattcacgcatcggccgccgcctgccggtgcacgccaccgccatcggcaaggtgttgattgcctggctgggcgaggccgagctgaacgccctgctggagggctatcagtacactacctttacgcccgccaccctcgcgtctcgcgaagccttaatgagcgccctggcgcagacccgcgagcaaggctacgccctggacagcgaagagaacgagcagggcgtgcgctgcgtggcggtgccggtgtggaaccacgagtcccgcgtcatcgccgccctgagcctgtcgacgctgacctcccgcgtggacgacgcggagctggctaatttccgcgagcagcttcagcaggccgggctcgcgctctcgcgcgcgctgggctacccggcctga

SEQ ID NO: 21341 - DNA, 1611 bp, Escherichia coli
atggaaatcactaacccgatactcaccggcttcaacccggacccgtccctgtgccgccagggcgaggactactacatcgccacctcgaccttcgagtggttcccgggcgtgcgcatctaccactcccgtgacctgaaaaactggtcgctggtcagcaccccgttggaccgcgtgtcgatgctggacatgaagggcaacccggactccggcggcatctgggcgccgtgcctgagctacgccgacggtaaattctggctgctctacaccgacgtgaagattgtcgactcgccgtggaaaaacggccgcaacttcctcgtcaccgcgccctccatcgaggggccatggagcgagccaatcccgatgggcaacggcgggtttgacccgtccctgttccacgacgacgatggccgcaaatactatatctaccgcccgtgggggccgcgccaccacagcaacccgcacaacaccatcgtgttacaggcgtttgacccgcagaccggcacgctctcgcccgagcgcaaaacgctgtttaccggcacgccgctctgctacaccgaaggcgcgcacctgtatcgccacgcgggatggtactacctgatggccgccgagggcggcaccagctacgagcacgccgtcgtggtgctgcgttccaaaaatatcgacgggccgtacgagctgcacccggacgtaacgatgatgaccagctggcacctgccggagaacccgctgcagaagagcggccacggctcgctgctgcagacgcatacgggtgaatggtacatggcctacctcaccagccgcccgctgcgcctgcccggcgtgccgctgctggcctccggcggacgcggctactgcccgctggggcgcgagaccggcatcgcccgcattgaatggcgcgacggctggccgtacgtggaaggcggcaagcacgcgcagctgaccgtgaaaggcccgcaagtagccgagcagcctgcagccgttccgggcaactggcgggacgatttcgacgccagttcgcttgacccggagctgcagaccctgcgcattccgttcgacgacaccctcggctcgctcaccgcgcgcccgggcttcttacggctctatggcaacgactcgctcaattcgaccttcacccaatcgaccgtggcgcgccgctggcagcacttcgccttccgggcagaaacgcggatggagttctcgccggtgcacttccagcagagcgcggggctgacctgctactacaacagcaaaaactggagctactgctttgtggactacgaggagggacagggtagaaccatcaaagttatccagctcgaccacaacgtgccgtcgtggccgctgcacgagcagcccattccggtgccggaacatgcggagagcgtctggctgcgggtggacgtggatacgctggtctaccgctacagctactcgtttgatggcgagacgtggcacaccgtgccggtgacgtatgaggcgtggaagctgtcggacgactacatcggcgggcgcggcttcttcaccggcgcgtttgtgggcctgcactgcgaggacatcagcggcgacggctgctacgcggacttcgactacttcacctacgagccggtctaa

SEQ ID NO: 21342 - DNA, 1383 bp, Escherichia coli
atgacgcaattaaccatgaaagacaaaattggctacgggctgggagacaccgcctgcggcttcgtctggcaggccacgatgttcctgctggcctatttctacaccgacgtcttcggcctgtcggcggggattatgggcacgctgtttttggtctcccgcgtgctcgacgccgtcaccgacccgctgatggggctgctggtagaccgcacccgcacgcggcacggccagttccgcccgttcctgctgtggggggccatcccgttcggcatcgtctgcgtgctgaccttctacacgccggacttctccgcacagggcaagatcatctacgcctgcgtgacctacattctcctgaccctggtctacaccttcgttaacgtgccgtactgcgccatgccgggcgtcatcaccgccgacccgaaagagcgtcacgccctgcagtcctggcgcttcttcctggcggcggcgggctcgctcgctatcagcggcatcgcgctgccgctggtgagcatcatcggcaaaggggacgagcaggtgggctacttcggcgccatgtgcgtgctggggctgagcggcgtggtgctgctctacgtctgcttcttcacgaccaaagagcgctacacctttgaggtgcagccgggctcgtcggtggcgaaagaccttaagctgctgctgggcaacagccagtggcgcatcatgtgcgcgttcaagatgatggcgacctgctccaacgtggtgcgcggcggggcgacgctctacttcgtgaaatacgtgatggatcacccggagttggcgacccagtttttactttacggcagcctcgccaccatgttcggctcgctttgctcctcacgcctgctgggccgcttcgaccgcgtcaccgccttcaagtggatcatcgtcgcctactcgctgatcagcctgctgattttcgtcaccccggcggagcacatcgcgctcatttttgccctcaacatcctgttcctgttcgtctttaataccaccacgccgctgcagtggctgatggcttctgacgtggtggactacgaggagagccgcagcggtcgccgcctcgacgggctggtgttctccacctacctgttcagcctgaagattggcctggcgattggcggggcggtggtgggctggatcctggcgtacgtcaactattccgccagcagcagcgtgcagccggttgaggtgctcaccaccatcaaaattctgttctgcgtggtgccggtggtgctctacgcgggcatgttcatcatgctgtcgctctacaagctcaccgatgcccgcgtggaggccatcagccggcagctgattaagcaccgcgcggcgcagggcgaggccgttcccgacgccgcgacagccgcatcccattaa

SEQ ID NO: 21343 - DNA, 1968 bp, Escherichia coli
atgaccattgagaaaattttcaccccgcaggacgacgcgttttatgcggtgatcacccacgcggcggggccgcagggcgctctgccgctgaccccgcagatgctgatggaatctcccagcggcaacctgttcggcatgacgcagaacgccgggatgggctgggacgccaacaagctcaccggcaaagaggtgctgattatcggcactcagggcggcatccgcgccggagacggacgcccaatcgcgctgggctaccacaccgggcattgggagatcggcatgcagatgcaggcggcggcgaaggagatcacccgcaatggcgggatcccgttcgcggccttcgtcagcgatccgtgcgacgggcgctcgcagggcacgcacggtatgttcgattccctgccgtaccgcaacgacgcggcgatcgtgtttcgccgcctgatccgctccctgccgacgcggcgggcggtgatcggcgtagcgacctgcgataaagggctgcccgccaccatgattgcgctggccgcgatgcacgacctgccgactattctggtgccgggcggggcgacgctgccgccgaccgtcggggaagacgcgggcaaggtgcagaccatcggcgcgcgtttcgccaaccacgaactctccctgcaggaggccgccgaactgggctgtcgcgcctgcgcctcgccgggcggcgggtgtcagttcctcggcacggcgggcacctcgcaggtggtcgcggaggcgctgggtctggcgctgccgcactccgcgctggcgccgtccgggcaggcggtgtggctggagatcgcccgccagtcggcgcgcgcggtcagcgagctggatagccgcggcatcaccacgcgggatatcctctccgataaagccatcgaaaacgcgatggtgatccacgcggcgttcggcggctccaccaatttactgctgcacattccggccatcgcccacgcggcgggctgcacgatcccggacgttgagcactggacgcgcatcaaccgtaaagtgccgcgtctggtgagcgtgctgcccaacggcccggactatcacccgaccgtgcgcgccttcctcgcgggcggcgtgccggaggtgatgctccacctgcgcgacctcggcctgctgcatctggacgccatgaccgtgaccggccagacggtgggcgagaaccttgaatggtggcaggcgtccgagcgccgggcgcgcttccgccagtgcctgcgcgagcaggacggcgtagagccggatgacgtgatcctgccgccggagaaggcaaaagcgaaagggctgacctcgacggtctgcttcccgacgggcaacatcgcgccggaaggttcggtgatcaaggccacggcgatcgacccgtcggtggtgggcgaagatggcgtataccaccacaccggccgggtgcgggtgtttgtctcggaagcgcaggcgatcaaggcgatcaagcgggaagagattgtgcagggcgatatcatggtggtgatcggcggcgggccgtccggcaccggcatggaagagacctaccagctcacctccgcgctaaagcatatctcgtggggcaagacggtgtcgctcatcaccgatgcgcgcttctcgggcgtgtcgacgggcgcctgcttcggccacgtgtcgccggaggcgctggcgggcgggccgattggcaagctgcgcgataacgacatcatcgagattgccgtggatcgtctgacgttaactggcagcgtgaacttcatcggcaccgcggacaacccgctgacgccggaagagggcgcgcgcgagctggcgcggcggcagacgcacccggacctgcacgcccacgactttttgccggacgacacccggctgtgggcggcactgcagtcggtgagcggcggcacctggaaaggctgtatttatgacaccgataaaattatcgaggtaattaacgccggtaaaaaagcgctcggaatttaa

SEQ ID NO: 21344 - DNA, 909 bp, Escherichia coli
atgccgcagtccgcgttgttcacgggaatcattccccctgtctccaccatttttaccgccgacggccagctcgataagccgggcaccgccgcgctgatcgacgatctgatcaaagcaggcgttgacggcctgttcttcctgggcagcggtggcgagttctcccagctcggcgccgaagagcgtaaagccattgcccgctttgctatcgatcatgtcgatcgtcgcgtgccggtgctgatcggcaccggcggcaccaacgcccgggaaaccatcgaactcagccagcacgcgcagcaggcgggcgcggacggcatcgtggtgatcaacccctactactggaaagtgtcggaagcgaacctgatccgctatttcgagcaggtggccgacagcgtcacgctgccggtgatgctctataacttcccggcgctgaccgggcaggatctgactccggcgctggtgaaaaccctcgccgactcgcgcagcaatattatcggcatcaaagacaccatcgactccgtcgcccacctgcgcagcatgatccataccgtcaaaggtgcccatccgcacttcaccgtgctctgcggctacgacgatcatctgttcaataccctgctgctcggcggcgacggggcgatatcggcgagcggcaactttgccccgcaggtgtcggtgaatcttctgaaagcctggcgcgacggggacgtggcgaaagcggccgggtatcatcagaccttgctgcaaattccgcagatgtatcagctggatacgccgtttgtgaacgtgattaaagaggcgatcgtgctctgcggtcgtcctgtctccacgcacgtgctgccgcccgcctcgccgctggacgagccgcgcaaggcgcagctgaaaaccctgctgcaacagctcaagctttgctga

SEQ ID NO: 21345 - DNA, 1143 bp, Escherichia coli
atgccctgggatgcgagagataccatgtcattacgtactgagtttgttttgttcgcctcgcaggacggggcgaacatccgttccctctgccgtcgcttcggcatttcacctgccaccggctacaagtggctccagcgctgggctcaggaaggtgccgccggtcttcaggaccgcccgcgcattccgcaccattccccgaaccgctcatctgacgacatcacggccctgctgcgtatggcccatgaccgtcatgaacgctggggagcccgcaagattaagcgctggctcgaggaccaggggcacaccatgcccgccttcagcaccgtccataacctgatggcccgccatggcctgctgccgggcgcttcaccgggcattcccgccacgggccggttcgaacacgacgcgccgaaccgcctctggcagatggattttaagggccactttccttttggcggtggacgctgccatccgctcaccctgctggacgaccactcccgtttttccctgtgcctggcgcactgtaccgatgaacggcgcgagaccgtgcagcagcagctggtcagcgtgtttgagcgttacggcctgccggaccggatgaccatggataacggctcaccgtggggcgacaccaccggcacctggacggcgctggagctgtggctgatgcgcctgggtatccgggtggggcactcccggccttatcatccgcagacgcaggggaagctggagcgttttcaccgcagcctgaaggcggaagtgctgcagggaaaatggttcgcagacagcggtgaactgcagcgcgccttcgaccactggcggacggtctataaccttgaacgcccgcacgaggcgctggatatggcggtaccgggctcgcggtatcagccgtcagcgcggcagtacagcggcaacacaacgcccccggaatacgatgaaggggtgatggtcaggaaagtggatatcagcggaaagctgagcgtgaaaggggtaagtctgagcgcaggcaaggcgttcaggggagaacgggtcgggctgaaggagatgcaggaagacggcagctacgaggtgtggtggtacagcacgaaagtgggggtgatcgacctgaagaaaaagtcgatcaccatgggtaaaggatgttaa

SEQ ID NO: 21346 - DNA, 351 bp, Escherichia coli
atgaataaagactctactcaaacttgggggcttaaacgagatatcacaccgtgtttcggagcacgactggtgcaggaaggtcatcgtctgcattttctggctgaccgggctggattcaccggctcattcagtgaggtgcagactctacaactggatgaagccttcccgcattttgtcgcacatctggagctgatgctgctctcctgtgagctgaatcccaggtacgcgcactgtgtcacactgtaccgtaacgggctgactggtgaagccgatacgctgggcagtcatgggtatgtatatatcgcaattttgaatcgccacgggtttaacagacacctccgagtcatttaa

SEQ ID NO: 21347 - DNA, 285 bp, Escherichia coli
atgaaacgcaagattattgtcgcttgcggaggcgcggttgcgacctctacgatggcggcggaagaaattaaagagttgtgtcagaatcataatattcctgttgaattaatccagtgtcgggttaatgaaatagaaacctatatggatggtgtgcatttgatatgcaccactgccaaagtggatcgtagttttggcgatattccgttagttcacggcatgccttttatttctggtatcggtatcgaagcattacaaaataaaattctgactatcttacaggggtga

SEQ ID NO: 21348 - DNA, 384 bp, Escherichia coli; identical to SEQ ID NO: 7741

SEQ ID NO: 21349 - DNA, 207 bp, Escherichia coli
atgaataaagaacaatctgctgatgatccctccgtggatctgattcgtgtaaaaaatatgcttaatagcaccatttctatgagttaccctgatgttgtaattgcatgtatagaacataaggtgtctctggaagcattcagagcaattgaggcagcgttggtgaagcacgataataatatgaaggattattccctggtggttgactga

SEQ ID NO: 21350 - DNA, 411 bp, Escherichia coli
atggctcaggttgccatttttaaagaaatattcgatcaagtgcgaaaagatttaaactgtgaattgttttattctgaactaaaacgtcacaatgtctcacattatatttactatctagccacagataatattcacattgtgttagaaaacgataacaccgtgttaataaaaggacttaaaaaggttgtaaatgttaaattctcaagaaatacgcatcttatagaaacgtcctatgataggttgaaatcaagagaaatcacatttcagcaatacagggaaaatcttgctaaagcaggagttttccgatggattacaaatatccacgaacataaaagatattactatacctttgataattcattactatttactgagagcattcagaacactacacaaatctttccacgctaa

SEQ ID NO: 21351 - DNA, 252 bp, Escherichia coli
atgaataagctggtttctgatggcagcgtcaaaaaaataaattatccggtgctgtatgaatccggaataacacctccgttatgtgaagtcagtgcaccagaacctgatgcgggggggaaacgcattgtggcatatgtttataaatcatcacggaatacggtttttgaaaatcctgacattgtaaaaacctgtacggtcagggatttgaagaatgattttgtgaactgcgatgagaaaggagagggacaatga

SEQ ID NO: 21352 - DNA, 228 bp, Escherichia coli
atggtcacagaatatcgaggtaatatcggagatactcagaacagcatccgaggcgaggaaaatattgtaaaagggcagtattctgaactacaaaatcatcataaaacagaagcattaactcagaataataaatataatgaagaaaagctggctcaggaaagaatacctggtgctgatagtccgaaagagcttttagagaaagcaaagagttaccagcataaagaataa

SEQ ID NO: 21353 - DNA, 522 bp, Escherichia coli
atgattacacaacaaattatcagtagtgagttggaagttttaaagaaacatattgactcaggagatattagaattccgtcactatggcagggattaaaacccgggcttatcatcatggggtggatgattttttgtcccttgctaatgtcatttctaataacacaaaagacaagtgaaacactcactgctgtgttagccggaggatggcttggacttattattctgtttattgtggcaaggattagaatgttatatttctctctgccggaagaattcctaaagacatcatccgtaatgagggttatatcatcaaaacttaaagtgtatttcattgtgtatatgggagttatatttttatggtcttttttaggtggagggattatatacggttttggcgcaattttagtgacggttattatggcgttcttgattcaattagatatcggtagatatcaatttgttggtgttattgatgcaatcaatagttacgtcaaaaacaagaagttatcaagagtaaaataa

SEQ ID NO: 21354 - DNA, 519 bp, Escherichia coli
atgaatcatgctgttcagtacgcgccggtcctcattcaggtgcgtgacaatcagcgtctgctcccgtgcttccggtgtcctgccggtatagtcgcggacaatggcctcatacagtgtcatggggatatccgggaaagcctcgcctttcagcatcgccttctgctgcgcttctgccagtttcgcttcctggctgtgactgaactccgtcacggagtgctccggtgcccatgcgccctccagacgtggcacctgagacggtttcacactctcaagcccggacagtgccctttccacatcccggttaatcaggctgtataccgcctcccgcagttccggcgtctgacgcacaatctccttcatgatgaccacatcggcagcactgcgcgtctgctggagacggaaaggctgaccgggcgcgatggcctgcagctggtccgtgtcaccactggccacggcacgaccgccaccggccgcaatcagggcgtatgcccgtgccatctcggtattgcccaccattga

SEQ ID NO: 21355 - DNA, 357 bp, Escherichia coli
atgcagcagattacccagctgattgaggtcatgctcgttggccgcggtggtgaccaggctgtgggtcaggccactcttggcatcgacaccaatgtgggccttcatgccaaagtgccactgattgcctttcttggtctgatgcatctccggatcgcgttgctgctctttgttcttggtcgagctgggtgcctcaatgatggtggcatcgaccaaggtgccttgagtcatcatgacgcctgcttcggccagccagcgattgatggtcttgaacaattggcgggccagttgatgctgctccagcaggtggcggaaattcatgatggtggtgcggtccggcaaggcgctatccagggataa

SEQ ID NO: 21356 - DNA, 528 bp, Escherichia coli
atggcagttcgtggcattaacaaggtcattcttgtcggtcgtctgggaaaagatccggaagtccgttacatcccaaacgggggcgcagtggcaaacctgcaggtggccacgtcagaaagctggcgcgacaaacagacgggggagatacgggagcagacagaatggcatcgcgtggtgctgttcggcaagctcgcggaagtggctggtgagtatctgcgcaagggcgcgcaggtctacatcgaaggtcagcttcgcacccgtagctgggaggataacggtatcacccgttacgtcaccgaaattcttgttaagaccacgggcaccatgcagatgctgggacgtgccgcaggtactcagactcagccggaagaggcgcaacagttcagcggtcagcctcagccggaatcacagccggaaccgaaaaaaggaggcgcgaaaacgaaaggccgtggacgtaaggccgcgcagccggagcctcagcagccgtctgaacccgcgtatgacttcgatgacgacattccgttctaa

SEQ ID NO: 21357 - DNA, 306 bp, Escherichia coli
atgtttttttaccgggggcaggaccccatcgacgggcagctggcgcaggtcattaatggcttccgggatacgtatggtctgagtgttattcccgtttccgtggatggcgtgattaatccgctgttgccggattcccggactgaccaggggcaggcgcagcgcctcggcgtgaaatatttcccggccatgatgctggttgacccgaaacagggcagtgttcgcccgttatcatacggctttatttcgcaggacgacctggcaaaacaattcctgaacgtttctgaagattttaaaccaaatttttaa

SEQ ID NO: 21358 - DNA, 321 bp, Escherichia coli
atggatacacaacggaataccgcgcggcagtttggtgcgcagcatatgatcgagcgcctccacaatggactcattcgcaccattgatgggaatggcttccagcataaagcccatcgtggtgtcattcatgaacaggccggactcctggttgtaatcacggtacggcagcagacggctgaactgcgggaagctcatttcgcccagaacttcattggcctttgcggattcgtcaggcagtttcagtgctgtgacgagggagttaaccgcctgagtgacggcctcaagtgggttattcacatgaattccttagttgaaaaataa

SEQ ID NO: 21359 - DNA, 411 bp, Escherichia coli
gtgcgcgatgcggtacgcagtgtcagttgccgggtggcagaagatgcgcggcgtatccgggcggcgctgaccaccaccggtcagacgttgctgactcgccagacgcgccgctttcgtctggttgtgaaggaaagcgatcacccctgctggctcgatgaagatgacgaaaacctgcccgtggtgctcgatgccatcgtgaaccggggagcacgtttttcgtcggtggaaatgtacctggtcagcgattgtattgagcatatcctgtccagtgggctggcctgcgatgtgctgcgtataccggatgaaccgccccgccgctggtttgaccgtggtgttctgcgggaggtggtccgggaagcccgggccgaaatccgcagcatggcggatgccctggcaaaaatccggaaatga

SEQ ID NO: 21360 - DNA, 252 bp, Escherichia coli; identical to SEQ ID NO: 21351

SEQ ID NO: 21361 - DNA, 168 bp, Escherichia coli
atgtacagctctgacggcccggattttgagtttgtgcagcagaaacgcagagagggtatgagtattcatgaggcggtgtggcagctggcgtggaagaaatcggggccggagatggcttcgctggaggcctggctggaagaacatgagaaatacaggagtgttgcatga

SEQ ID NO: 21362 - DNA, 168 bp, Escherichia coli
atgtacagctctgacggcccggattttgagtttgtgcagcagaagcgtaaagaggggctgagtattcatgaggcagtgtggcagctggcgtggaagaagtcagggccggaaatggcttcgctggaagcctggctggaagaacatgagaaatacaggagtgtggcatga

SEQ ID NO: 21363 - DNA, 165 bp, Escherichia coli
atgctcgataaagttgccacttattatgaaaatgaagtggataatgccgttgctggtttaacctctatgatggaacctttaattatggcaattttaggggtgctcgtaggcggtctggtaattgctatgtatcttccaattttccaaatgggctcagttgtataa

SEQ ID NO: 21364 - DNA, 513 bp, Escherichia coli; identical to SEQ ID NO: 19198

SEQ ID NO: 21365 - DNA, 600 bp, Escherichia coli
atgcgtaaattatgtgctgttattctgtccgcagtagtctggctggttgccgctggtacgccagcgagcgcagcagagcatcagtccacactaagcgccgggtatcttcaggcccatactgatatgccaggcagtgatgacctgaagggcattaacgtgaaataccgttatgaatttacggacacgctggggctggtgacgtcattcagttatgccaatgccaaagatgagcaaaaaacgcattacagcgatacccgctggcatgaagattcagtgcgtaaccgctggttcagcatgatggcggggccatctgtacgcgtgaatgaatggttcagtgcttatgcgatggcaggtgtggcttacagccgtgtttcgacgttctccggggattatctccgcgtaactgacaacaaggggaaaacgcacgatgtgctgaccggaagtgatgacgatcgccacagcaacacgtctctggcgtggggagctggcgtgcagtttaacccgaccgaatccgtggccattgatattgcttatgaaggctccggcagtggcgactggcgcactgacggtttcatcgtgggtgtcggttataagttctga

SEQ ID NO: 21366 - DNA, 780 bp, Escherichia coli
atgaattttacgtttactgactctggatacactgaaacaaataaaaacaatcccccaatcatattcgttcatggatttttcatgaataatgaaatgttcaaataccagtttgacgaactaaaagaaaaacatagagttgtttgcattaatgttcggggattcgatgctctctccgaaaaaattgagccattctcgctctatgacatcgttgatgacattttaaacgtcgcagactcactacaactggataagtttattttaggtggaatgtcgatgggcggatatatatcattacgatttgccctgtcacattcagaacgtttgtcagggctaatccttatggcaactcaggcagagcaggatccgccagaaatcgcgtccagttacatggagttatgtaatggatggcaagacccaatcataaaggaaaatataatcaactcattattacccgtttttttcggaaatgatatctctgaagcagagacatggagacaggtatggctaggccataaacctgaaaatatcataaaggccatgaatgcaatgctggagcgcgacgacatttcagaaagaatccagataatcacaatccccacgctgattattcatggtgccaacgatatggggataccattagagaaagcaattcaaatgcacaaaatgattgcgcattctaagcttgaagtcattcccgacgcaaatcatgctctaaatatcactcatgcaaaggaagtaaatacagcgataaaaaactggctgcaaaacaatcatatataa

SEQ ID NO: 21367 - DNA, 183 bp, Escherichia coli
atgcgaaagttcaaaataattattgaaacgggaatagctggtggagattttgaggatgtattcgaagtggacgatgacgcaacacctgatgaaattcatgacgaagcaaaagaaattttctttaactactgcaattactcatatcacgaaataaaagacgaagaggaagaacaaaatggctga

SEQ ID NO: 21368 - DNA, 516 bp, Escherichia coli
atgagcgagattaattatcaggaagggcatgaaacggcagggcaggcaaaaccagttgcatggcgatatcgctacgtgaaaaaaggcgttacggactctcagggggagccgtgggttggtgactggaaatatgtaccgacaaaagaggattgcaacgacaggccgaactatgaaattcaggcgttattcacggcccagcctgtgccactgacaccagaaggattgattaaagcagtgcgtttctatgaacaggtaaagcgtgagaatccaccagtagaaacaggagcatggaaagatgctgttgattgggtactcaaagaggcctgctgtgctgtcattctgggtaaagccgacaatccactagcatccagtaatcaggttggcgaattaacaatgtgggttaaacgactggtcagtcaactgaaaaaagctaatccagactgcaaattaccggagaaggcgatggactacctgaagcggaacgaactgataagcgcggaggatgttttgcgatga

SEQ ID NO: 21369 - DNA, 261 bp, Escherichia coli
atgaaaatcgaagaattacgtgaaatttttagtgaagatggcctctatactgtgcgcgttgagaatggcgctattgtcagccactgccgtattaaatgtttacagtctcaacaaaggaagagtggagctgcgttaattcattttgtggatgggcttgtgacggatggttttattttgcgtgcaaatgaatttgtcacatcgttgccgtctctgaaagaagctgggattaaggctggtttttctgcttttgaagatgagtga

SEQ ID NO: 21370 - DNA, 219 bp, Escherichia coli
atgcagaaacgagaacccgtcatcatcgcgccagactataccgatgatgaactttatgagtggatgcgccagaaaattaatgcagcgcaggatctgaaatgggccaatgaagccagggctaagcaggctgaaaacctgtccgctctggagcaggatatcaccaggctggaaaaagcagcggcattaagcattgccagaatgattacatacccgcgttaa

SEQ ID NO: 21371 - DNA, 351 bp, Escherichia coli; identical to SEQ ID NO: 9336

SEQ ID NO: 21372 - DNA, 216 bp, Escherichia coli; identical to SEQ ID NO: 17121

SEQ ID NO: 21373 - DNA, 135 bp, Escherichia coli
atgaagaaaggcgatgcggctgaacatgcagagttccatatgaaagacaaccgctgggtgcctggctggatgtgtgcaccacgtccacagacggatgccactgaacacaccgctaacctggctgatgccgcctga

SEQ ID NO: 21374 - DNA, 423 bp, Escherichia coli
atgttcctgaaaaccgaatcatttgaacataacggtgtgaccgtcacgctttctgaactgtcagccctgcagcgtattgagcatctcgccctgatgaaacagcaggcagaacaggcggagtcagacagcaaccggcaggttactgtggaagacgccatcagaaccggtgcttttgtggtggcgatgtccctgtggcataaccatccgaagaagacaaagctgccttccatgaatgaagccgttaaacagattgagcaggaagtgcttaccacctggcccacagaggcaatttctcatgctgaaaacgtggtgtaccggctgtccggtatgtatgagtttgttgtgaataatacccctgaacaggcagaggacgccgggcctgcagagcctgtttctgcgggaaagtgttcgacggtgagctga

SEQ ID NO: 21375 - DNA, 492 bp, Escherichia coli
atggcaagagtatttacacaggaagaacgggaagaagtgaaggcgcgcattgtggaactggtacgcagagatgggcggaaaacgcgtaaacaactggaaaatgaaaccggggcgacaagacatctgatagaagttctgacgaaagagctggtagccagtggtgttgtatatggctcagggtatggaatattcccttcagcgcaggcacgtaaggactggataaaagccatcgaaaagatgtcgaaagcaaagttaaagaaactggctgtggttgatcctgaccttatctggtcattaccagacggagaaatacgccgctacgacaggcgtcaaaacataatctgtagcgagtgccggaagagcgaagttatgcagcgcgtgctggcgttttatcaaggaggtggtgctgtgagtgaaattagctatcaggcttcaattgccgctggcatttgcatcaaaggagaggagcatggaaataaaaccagaagataa

SEQ ID NO: 21376 - DNA, 600 bp, Escherichia coli; identical to SEQ ID NO: 10080

SEQ ID NO: 21377 - DNA, 339 bp, Escherichia coli
gtgctcttcctgtttgaggttatcggtaatgatacgcagacgacggtaggccgggtcgttcagctgagccggatcttcaccaggaaggcgctcaaccgcctgctggtaattaaattcgtgtttcggcttgacgtagcccggacgcaacacgcgggtttcaccaccacgatgacgcagcacttttccttcaacaaccggggagacataggccgccaccggcgtttttccggtaattttgtccagcatcacctcttcggtatggaaattcaccgtacggcggaaaaacagctccagaaacagcgcacgaaatttaactttttgttcggtataaccgagtaa

SEQ ID NO: 21378 - DNA, 222 bp, Escherichia coli
atgaaaattatcacccgtggtgaagccatgcgtattcaccaacaacatccgacatcccgtctttttccgttctgtaccggtaaataccgctggcacggcagtgctgaagcgtataccggtcgtgaagtgcaggatattcccggcgtgctggctgtgtttgccgaacgccgtaaggacagttttggtccgtatgtccggctgatgagcgtcaccctgaactga

SEQ ID NO: 21379 - DNA, 315 bp, Escherichia coli
atggaggagtaccgccgctggcgcaatgagtcctggcgatacgacggaagtgataagtacccgtggtctcagcctgtgctgtatcacatttgcctcgagatgcgttcaaaggggattgaacgccagatgaccgaaggggaattaaaacggcttgcagaacggcagctgacgaaatgggcaaagcatgttagtaacggcctgagcgttccgccagtacggcgacaactggcggcaccaaaacgcccgttgggaccaacgccaattgagttgctgaaacaggaatatgaacgccggaaagcggctgggtttgtttga

SEQ ID NO: 21380 - DNA, 303 bp, Escherichia coli
gtgtttacgcaggttcagtgggagcagaaattcgcccgtcacgtaaatcacgtcagggcgcaggttaaaccagtcagcaagggggtaaaccatgcagcagcaccaggtggcaccgcatcacgggcagttcaggaaattcgggcagcacgtgagcagtgggaacgtgaaaacggatttatcagcgacggaaacggcctggaagctgtgggaactcatgggggaggtttattcgaaccgctggacccagaagaacggggccgcaccttcgaagctctggattgcacagattggcgcgatgactga

SEQ ID NO: 21381 - DNA, 357 bp, Escherichia coli
gtggtgctgttcggcaagctcgcggaagtggcaggtgaatatctgcgcaagggtgcgcaggtctacatcgaaggtcagcttcgcacccgtagctgggaagataacggtatcacccgttacgtcactgaaattcttgttaagaccacgggcaccgtgcagatgctgggacgtgcaccacagcagaacgctcaggcgcaaccgaagcctcagcagaatgggcagccacagagtgctgacgcgacgaaaaaaggtggcgcgaaaacgaaaggccgtggacgtaaggccgcgcagccagagcctcagccgcaaccgccggagggggaggattacgggttttcagacgacatcccgttctga

SEQ ID NO: 21382 - DNA, 357 bp, Escherichia coli; identical to SEQ ID NO: 17246

SEQ ID NO: 21383 - DNA, 366 bp, Escherichia coli
atgatcccgggcggcccattcacgtttccacaatgcctgctcagcggtctgaatcagggacgccagcagttcagcagggacggtcacctggcggttttcgctcacgttattgatgatctccatcaccgcagcggaagaaataccggactcaatccgctgttcttccgggatgtcctccaggcgtgccaggacggtcctgatttcatgaccggtcagagaaatttccataccgtcagccagtgcctgaatctcttccggggaccagacaaccagcatcagcggcgtgttctccgtatactgcgctgccagctcccggcagagcgtttcgcatgttccgtacattctcgtctccttctcaatctttga

SEQ ID NO: 21384 - DNA, 321 bp, Escherichia coli
atgatcccaggcggcccattcacgtttccacaatgcctgttcagcggtctgaatcagggacgccagcagttcagcagggacagtcacctggcggttttcgctcacgttattgatgatctccatcgccacgccggaagaaataccggattcagtccgctggtcttccgggatgtcctccaggcgcgccaggacagtcctgatttcatgatcggtcagggcaatatccattccgtcagagagggcctgaatttcttccggggaccagataaccagcatcagtggcgtgtctcccgaatactttgctgccagcttccggcatag

SEQ ID NO: 21385 - DNA, 261 bp, Escherichia coli; identical to SEQ ID NO: 5349

SEQ ID NO: 21386 - DNA, 171 bp, Escherichia coli; identical to SEQ ID NO: 12692

SEQ ID NO: 21387 - DNA, 315 bp, Escherichia coli
atgacgacaccaaccagacggataagtttctatctgaagccagtcgccgtcaatagtgaacgggaggcgtgtaattacctcgacagcctgccagcctctgaacgcagccgcgcgcaacgcgcggcctttctggccgggctggcactcataaaacgcgatcctgcatttgcctattggttggccgaatggccggaagaaggagctgcgccagccaagaataatattcagagtaaatatgccagcgcacctgccaccggaagcaatcacagcactagcgagataagaaagaacattcagtcatttttcccagagtga

SEQ ID NO: 21388 - DNA, 432 bp, Escherichia coli
atggcaactatccccaaaaaatggttacaacgcaaaattgcagaccttgaatcgtgtcgtgaagacatcccgtttggccttgatgaaaacgatcacaatatgttaatcgcactgaaaatcgcactcacatcgctggaagcgaaacctgttgcatggactgatgatgaggaactgcgtgatgtcaagcagtatggtttcggtgagatatttcagtgtccgccagataaatacgcggacccgcgacgtgttatccctatgtatcgagagccgccagcgccagcagtaccagatggactggttagagcggtgcgtttctatgaacaggtaaagcgtgagaatccgccagtcgaaactggagtatggaaagacgctattgactgggtgaccaaagaggcttgccaagctgtagacattggcatcaaaggagagtga

SEQ ID NO: 21389 - DNA, 135 bp, Escherichia coli
atgaatataattctgtgggatttgcagcatccttttccctccttcggtgaatgcgctgaaaacggtttattccagccgtttcagggtacgcctgataatttgcattttaaataccatttattggttactttttag

SEQ ID NO: 21390 - DNA, 558 bp, Escherichia coli
atgcattatatgaagtggatttatccacgccgcttacgcaatcaaatgatcctgatggcaatcctgatggtcattgtcccaacgcttactattggttatatcgtagaaacggaaggacgttcagcagtcttatctgaaaaagagaaaaaactttctgccgtggtcaacctgcttaatcaggcgctaggcaatcgctacgatctctacatcgacttaccgcgtgaggagcgtatccgcgcattaaatgcagaacttgcccccattaccgaaaatatcactcacgccttccctggcatcggcgctggttattacaacaaaacgctggatgcgataatcacctacgcgccttcagcgctatatcagaataatgtgggcgttaccattgccgcagatcaccctggtcgcgaagtcatgcgtacaaatacccctttggtttattcaggcaggcaggtgcgcggcgatattttgaattcaatgattcccattgagcgtaatggtgaaatcctcggctatatctgggccaatgaattaaccgaagatattcgccgccaggcctag

SEQ ID NO: 21391 - DNA, 894 bp, Escherichia coli
atgacgaatttaaaagcagttataccggtagcaggtcttgggatgcatatgttgcctgccactaaggcgatacccaaagagatgctaccgatcgtcgacaagccaatgattcagtacattgttgacgagattgtggctgcagggatcaaagaaatcctcctggtgactcatgcgtccaagaacgcggtcgaaaaccacttcgacacctcttatgaattagaatctctccttgaactgcgcgtgaagcgtcaactgctggcggaagtacagtccatctgtccgccgggcgtgaccattatgaacgtgcgtcagggcgaacctttaggtttaggccactctattttgtgtgcacgacccgccattggtgacaatccatttgtcgtggtactgccggacgttgttatcgatgatgccagcgccgacccgctgcgttacaaccttgccgctatgattgcgcgcttcaacgaaacgggacgcagccaggtgctggcaaaacgtatgccgggtgacctctccgaatactccgtcatccagaccaaagagccgctggaccgtgagggtaaagtcagccgcattgttgaatttatcgaaaaaccggatcagccgcagacgctggactcagacatcatggccgtaggtcgctatgtgctttctgccgatatttggccggaactggaacgtactcagcctggtgcatggggacgtattcagctgactgatgctattgccgaactggcgaaaaaacagtccgttgatgcaatgctgatgactggggacagttacgactgcggtaaaaaaatgggctatatgcaggcgtttgtgaagtatggactacgcaacctgaaagaaggggcaaagttccgcaaaggcattgagaggctgttaagcgaataa

SEQ ID NO: 21392 - DNA, 894 bp, Escherichia coli
atgaaaaactatgcttttattttaggggcgacaatttcagcccttactgctttgtcggttcacgcagcgaatgaacccaaaaacttcaatgccgtacttcaatgtcgagcagtagaaagtaataccgaacggcttgcatgttatgacaagtcaatatcgccaacgcgcaccaagagtgcagagaaatttgaaagcagagatcaatgcccggatgagaaagataacgataaacgattgtcttgttatgaccgattcttctctccaacctttaaatcatcaacaagctctaaaacgtcaacatcaaagccagcaatcgcagatattcggcaacccgatcgtgcggaattagcagaatgtcagtctgaagttaacggaacaaaaaggcttgcatgctacgacaagatattcccgcaagataagcctgatgataccgagtctatgccagagcaggcagtaaaccatggtaagtggcaaacatctgttactacatcgccggtagacgacacaaaaaatgtagtcctttcactatctagcaatgactacattaggacgccatttggtgagacagtggcacctacaatttatgtggcatgccgtgagaagaaaacggaagtatttattaattgggacgtgtatctagggcttgagcaaacaagcatgttgtaccgtttggataagcaaaaagcagtggagaaaaattggtcaatatctactgatacaaaggctgttttttacaaaggtagtgacattgattttgttagaaccttagcgaaagcagataaaatgttcgcaaggataaccccttataacgaaagcccggttagcgcaacatttgatctgagtggcttgtcggacgcattaaagccacttcaaaaggcatgtggttggaagtag

SEQ ID NO: 21393 - DNA, 333 bp, Escherichia coli
atggcattagttagttgtccagagtgtcagaaagaagtaagtgattcagcgttgcgttgccctgcttgcggcaaacaacttaaaaagccgcgacgttctctttttgggaaagtagttaaatgggctttcatcctgtttaacattttcatgatttactgcctttttgcggggttaggtgggagtggtgaggtaataagcagtgcatcctctgacgcagaaagggccggggcggctattggtactggtttagggttaatggctattggtagtgtttgggttgttggcgacataatcatcggcatcctcgtattccttacaagaccaaaaggatga

SEQ ID NO: 21394 - DNA, 249 bp, Escherichia coli
atgttcagatgtccattttgcggcgctatggcccgcacccgtaccagccgtaaaataaccgatacgacaatccgtcaatatcaccagtgtcagaatctggaatgtagccggtcattcaccacgcttaacagcgtggaaagggaagtgacaaggcgtgcaggtacagcaccgttaccgcctgactttatccccagcgatgccttcccagcatctcattatggcaatacgcaactcagtctgtctgtttag

SEQ ID NO: 21395 - DNA, 1137 bp, Escherichia coli
atggcacttacagacctgactaaatcacttaacgacgccgtcagcagttataacgattcacttaccgaggcggtaaaaagtccgggattcagtattacgatgggcggcaaggtgctgacgcagcttgatgatcggatcatgtcgttgtcactgacggacaacagaggctttgatgctgatcagctatctatttccattgatgacagtgacggtatggttgcactgccgccgcgcggggccgagcttgccgtatcatttggctggctgggtgaaccgctgatttacaaggggttgtacacggttgacgaggtatcccacgaaggcccggcagataccattggtgttactgcccgcagcgctgattttcgtgaagagttcaacgtaaagcgcgaagtatcatggcatgacgtgaccgtagagcgtgttgtgtcggcaatagcgcaccgctacggactgaaggcgcagatcagtgaaatgctcatggatattgagattgatcacgccgaccagacgcaggaaagcgatatgtctttccttacccgcatggcggacatgctgggtgcaattgccaccgtcaagaacggcagtctgctgtttatcctgccgggtggtggtgtgaccgctgacgggaaggcgctaccctctgccagtattgaccgaacgagcggcgaccggcaccgctttcgtattgccgatcgggatgcgtataccggcgtcagggcttactggctggatctcaatttcggcaaaaagaaaaaggtcagcgtaaagcgccgcaagcctgcaaagcccaaaaaagagaagagcagcagccgtgagggcgattacatggagggcgcagacggtaacgtttatgtgctgcgcaaaacctaccagaatgaagaggctgcgaaacgtgcggcagcggctaagtggcaacagcttcagcgtggcgcggcagagttttcgatcaccttggcgcgtggccgcgcagagctttacccagaaatgcacgttactgttagcggttttaaggatgaaatagacaatcaggactggatcattgcgcgcgctgagcacgtcatagacgacagtggttttaccacccggctggagctggaagcaaaaatacctgactggatcgcggaaactgaataa

SEQ ID NO: 21396 - DNA, 1227 bp, Escherichia coli
atgagggattatcactgcgaactcaataacgtaatggtggctaacatgtcagagacacgtttccacggtgtacgcgtccgggagaataccgacctggtgacggccatcaatgacattgaatcaagtgtcattggggtcgttgccgtggcggatgatgccgacgcggaaacctttcccctgaatacccccgtgttgctgacacgggttaacaacgtgctgggtaaggcgggtaaaagcggctccctgtacaaaacgcttaaagccatcgctgaccagaccagtccgaaggttatcgttgtacgcgtagcagcagccacggaagaggaaggcggtaaaacgcagtcgcagctcatcatgggcggcacggcagaagacggcagctataccggcatgtacgcgtttctgactgccgagcagaaggttggttatcgtccgcgcattctggccgtgccgggctacgacacggaagaagtgacctccgcgctgtgcgtcattgcacaaaacctgcgcgcgtttgtttacgccagttgctatggatgcaaaacgatggctgaagccaccgcatatcgtgcgaccttcgcctatcgcgagctaatgcttatctggcctgatttcatcgcatacaacccgcagacaggagaaaacgaaaccttccctgccccggcctatgcctgcggccttcgcgcgctgattgacaacaatcagggctggcacaaatcgctttccaatgtgtcggtaagcaacgtgctgggtatttcacatgatgttttctggtcgcttcaggccgaagacagcgacgcaaatgaactcaacaacaaggagatcacgacgctcatcaagcgtaacggtttccggttctggggcaaccgcgtcacagacaccaaagattatatctttgaggtttatacccgtacggcacagattctggctgacagtatcgcggaggcgcaatttgaatcagtggacgaaccgctaaccccggccaacgtcaaggacgtggtcagcggtatcagtgggaaactcaattcgctggtgacacagggacggctgatcggtgctgaatgctggtttgatatcctggataacccgacaaccggtctccgtcagggtcaggtgcgcattcgctataaatatacgccggttccaccaatggaagatctgacgctctaccagaccttcaccgacgaatactttgaatcggcattttcttcgcttggaggtgcataa

SEQ ID NO: 21397 - DNA, 516 bp, Escherichia coli
atggcggttcctcacaaactgcgcctgttcacctgctttgtgaacggcagcaactgcatcggcaaagtctcttccgtgacgctgccaaaactgacccgtaagactgaagactttcagggcggcgggatgattgggtctgctgcggtagatctcggtctggacagtggcgcgctggacaccacgatggtggttggcggtctggttcagtcgcttttgctgaactactgcggcgatatcgacgagacccgcttccgcttcgccggtgagtattacaccgatggtgaaagcctgctggtagaggtcgaactgcgcggccgcatcaccgaaatggacggcggcgaaagcaagcagggagaagacacctccgtcagttacacgatgaagaacacctattacaagctcactatcgacgataagccgctgtttgagtttgatctgctgaacttcatctacaagaaagacggcaagaatatctaccctgaccgcatcacgtctgcgctgggaatgggtaactga

SEQ ID NO: 21398 - DNA, 318 bp, Escherichia coli
atgagcaaaaaaaacgataacgccattacgctggcaaaacccgttgttcgcggcgatgagaaaattactcaggtaacgatcacggatgagatcaaacaggctggctccctgcgtgggctgaaactggttaacgtgatgaatatggatgtggattcagtagcggtactgctgacccgcgtcacgtcaccgcgcctcaagcagaccgaaatcaacgaaatggatacccgcgattttgtcagcctttcagaagcacttgtcccttttttgacacctgcggggtctggagcatcgagcgaggcggagacggagaatcagtaa

SEQ ID NO: 21399 - DNA, 2967 bp, Escherichia coli
gtgaaaagccttaatatccgcgtcgcgttcagcgcgatcgataaacttacccgcccggtcaatgccgcccgccagagtgcgggcggtttgtctgagtccctcaaaaaaacgcagtccagcattaaagatctggacagtcagtcccgcacgttcaaccggctgcgcgacagcgtacaaaagacctcccgcaaaatcgacgacgccagccggacccttgaaggcctgaatcaggcgcagcgggaaggtacacagctcacagataagcagaaagcccatatggcagcgcttgccgcaaagctggagcgcctgaattctgcacgcacgcaggaaatggtcaagctgcgcgccgcttcacaggcgctgcgcggccacggcgtttcactggtcggcagtgaccgcaccattcagagtgccattcgtcgaactgaacagtacaaccagacacttgagcgggaacggcgacaacttgctgcggtcacgcaggcacgtgtgcgttatgaccagatgcagcaaacggcgggcaaacttcgcggcggtggcacgatggccgttgccggggccactgctgccggttacgtagcgggacgtttcttatcccccgccgttgggtttgatcgggaaatgtcccgcgtgcaggcgctaacccgcatagataaaagctccgttgacttttcagcactacgcgagcaggccaaaaagctgggcgctgaaacgcagttcaccacgactgatgccgccagcgggcaggcgtttctcgctatggccggtttcactccgcaggccattcaggccgcactgcccggcgtgctcaatatggcgctggccggtggtatggatttaggcgaaagcgccgatatcagctcaaatattctgtctcagttccgtctcgatcccaaagaaatggatcgcgtcagtgacgtactaacgggggcgttcacccgcaccaacaccgatctgcaaaatatcggtgaggcgatgaagtacgccgggacaggtctttctaacctgggcgtcagcgtcgaacagaccacggctatgatcggcgtgatggcgaacgttggtctgcgcgggagtatcgccggtacgggtttgcaggccacattttcacgccttgccgcgccgaccggcagagcaaaaactgcgcttaaagaactgggtgtagaagtcgctgatgcgacggggaaaatgcgccctgctgaagttgtgcttaccgatctctataaaaaaatcagcaaatacggcgataccgataagctctctttcttcaaagatattgccggtgaagaagcgtcaaagtcattccaggctctggttatgtcggcagggagcggcgaacttcagaaattgcttggtgaactgaaaaacgccaagggtgaggcacagaaagccgccaaaataatggcggataaccttgatggcgatctcaagaatctggacagcgcctgggaaggcttccgtatccagattaacgatctcgtcaacaaccagcttcgcgccctgacccaggggctgagtaatgttgtggggcatatgacacagtgggcgaaggagaatccgaagctcgcacaatccctgctggttgtcggcggtagcgttctggcgctgaccgccgccattggcggcacatcgctggcgatcggcctgctgatggggccgctggctaaactccagttaggttttaccctgctgacagggggcagaggcatagccggaacgattgccgctctgcgaacgctcggcacggcttccggtccggcgatggcaagcgtgcgcggatgggtgccagttcttggctcgttagcagggaaaatgcggggcgtttcggccatcatacccgctatgcgtagcgcacttatgggggtatttcttgcaccaggtgccgcgctgggagcgctgactaaaaacctcggaatgctcgctcttcgcctgacaggcttaccggccatatggagcatgatcactgctgcggtgtctatgctgggtacagcgctgtcactgctgtttagtccgattggcctgatagtagcggcgtttgttgctgccggggttcttatctggcgttattgggagcctattaaagcattttttatcggtgtctttaccggaataacccaaagcctagctccattacgagaagcctttacgcagttcagcccaatatttgactcgttaagcagcggtattagccaggtctttaactggttcaaatctctactttctccgatggagtccagtaaggagactctggataagtgcgccagtgcaggagcaacttttggtaacgtcctgggcggagcgcttcaactcgttctgacacctgcaaaagctctgctggatactttggcatggatacttgaaaagctcggcgtcatgccagatgaggtggagcgaaccaggaagaagatcgaagatgcgcagcgtatggccgttcttcaggacaaaatagcttttcttcagggcgatatcgcgaaggttgcaccgaaaaaagttgaggtgaataacgttccgcctggcgcaccgcaacccacatcaccgctgaccggtgataacggcactatgcgcaggttgcagagtatcgacagcaacaccaaaacgacagccgacaacacgaagaagatcggccccggcgatatcgtgtttaaaaacctgccgcgtgcgctggccgttcgtggggaatggaaggaatcgcaactggccagcacggtcaggaacaacgggttaagcgcacgccccgcagtggtggctgcatcgcttcccgttaaacaggcggaacttctgccagtcagccgcaacgccagcaatataccggttgccactggaggctttacgggcgaaatccacgtacatttgcacggcgttgaccggcaggacgcgcgcgaaattggccggattgccgccgacgccgtaagtgccgaactggcccgccgtgaacggctcaaccgtggcagcttcaaagacagagattaa

SEQ ID NO: 21400 - DNA, 489 bp, Escherichia coli
atgatgatgatatacgggatgttcgtttttgaactgaaaacgctaccataccagcagttgcgccattcgcttaactggcggcatgtgaaaaatgaccgtatcaaccgatcggcaaaatggcagtacatcggcgccggggagacacagatcaacctggacggagtgctttaccctgaaattacgggcggtgacgtatctcttaccgttctggcaacgcaggcatacaccgggcgtccgtggcctttaatcagtggtgcggggcagatttacggcatgtatgtgctgaccgggctacaggccacgcatacggagtttgaccgttacggaaaggcgaaaaaaatagagttttcgatcagcttccagcgctgtgatgaagacttacgcgagcgcctgcaagcgtcatccgttagcgatctgctttcagggctaaagaacaaggcgacaactgcctataattctgccagtagtacgatatcgggtcttttttag

SEQ ID NO: 21401 - DNA, 1191 bp, Escherichia coli
  misc_feature (1167)..(1176): n is a, c, g, or t
atgatgaactataacgacgaagtaacccgcacacttcccctttctcatatgatttatcgggacagtgagatcgaccaggagaaagctgaaaagctgattgtgtaccattatccattaagcaaaagttatcgctggaagcagtgggaaaaccatcttgatagcgaattaggcaatcgataccatccttatctgatgcgttcctataaagagcagtttggattatttgttgctgttgattcagatcaggatactcctcccgttattaaaaattccgatggaataatcattacaccagaaaggataaagtacgagccatcgcttaatcccatatggattcgtcttatcatgcgtaaaatctctgcatttggttctcattgcaagggtagccactcgttaggccgaccactactacagacggatgcctggaaaagtaaaaccagttgcggtatcaatgccattagtctggactgccgaactcagcaaagaagtgataaagatacaacagaagtcgttttattttatgaaaatgtgccactacgacctgtggatatgaaaagcgaattttcaaccacctctcaggcactgtgggtgtatgacaaaaataaagtgctggttcgctggaagcctgaaaaatcaacaaggcaaaaatttcaagcttatcaggaaatacccaaaaacaagaataagcgtaagcttcgcccttttattgatctctcctcgcctgatgcgttaagaaatagttggccatggatccttaaacccgtacaaaatgaatttattgaacaagccaaaatttttggttttacattaaccgctgttgttctccagttgcgtccactgccacttaagactaaattcaaaacgactgagagggcaaaatttcccggcatacagcttaacaccgaaattaaagtacttgatttacgtttttcgcgaaatattcccccacaacagatagtgacgcagatacaaaaggtgttgaacaaaaagtatcctgatgtacagctggaattattaccggattcagaaccctcatcatttgaaaaattggaaaaagacagctctatatgcatacttgttttgttagatcagatccgtggtataattgatgaccgctatccgttaactcagaatctaagaactaaaattgcgtgccagcatatcaannnnnnnnnngcatatcaacgttaa

SEQ ID NO: 21402 - DNA, 321 bp, Escherichia coli
atggtatcaaatgagacccagtcaagcgggattggggaaaaaattcgagctataagggatgcagaagggctatccagaactcaattctttgaattgacaggtattccggcaggcactcaaaagcattacgagatggggagaagagaaggcgttggtagtgaaatcttgttaaagatcacacaacatccccgctttgcaaaatacacgctctggctcatgacagataagaccgcccctcaagctggtcaaatcgcaccggccctcgcacacattgggccagagtcaactggatcagaccgctccgagaaacaaactggttaa

SEQ ID NO: 21403 - DNA, 231 bp, Escherichia coli
atgcacgatgaaggcccatcactggcaagcctgcttaagcacgggtgccaggttacacacttcaaaaactcacgcggctggctggaaacaccagacggaagattttttaagcccgaaccggcgaaggttcagtttatcaaaggtaaaaataaaccatttatttatacccaaagaataaataaaggcttcctgcttacactggctgaattatttaaaaagctaattaagtaa

SEQ ID NO: 21404 - DNA, 213 bp, Escherichia coli
atgaccagacgtgatcaatatagcttcattttgcatgttcttttacctgctatcgaaaatgaaggcttaaccattaaaacccgccgtgatggtgagttaaccctttctgccactggatcagtaaccacaaattttatcagcaccctgcgccagcactgcattgaagaattgcagcgcccttctattccagcttcccattacggagtcctgtaa

SEQ ID NO: 21405 - DNA, 528 bp, Escherichia coli
atggcaaaaatctatatcgctggccctatgagcggtttgcctggattcaatcggcaggcctttaaccgtgcagccgggcacgtagtgcgacgcggaaacgttgcccttaatccggcgattttgccggatggattagagcaggcggaatacatggatatttgcttcgccatgttgcgttgtgctgacgggatcttcttgctggatggctggcagcagtctgccggagccagggcagagcgcgcgcttgctgaaaagttagggttggatattcagcaccaactgattgatcggctggaggggggggtcatgatttcgcttcatgatggagatgcctctttcgcctcatcttttacgaaggttgtttattctgaggatggcaaacagtgcttttcggctgggtttaagccaaccaaaggtaaaaaattcgttgtcctcctgttgggtgaggtggataaaacagcgattgattatgatcttgaagctgcattaaaccggcttggcttttaccggaaagaagataaccggtaa

SEQ ID NO: 21406 - DNA, 717 bp, Escherichia coli
atgagcaaaattaccagagaacgcgcagcaaaaattgcagcaggcggcggatataactttgatgaggtggaggagctggcgcgtatcgcgctggcatcgctcgaagcggaggagtcagggcgaaatcccgtgctggcctatgcagacagttaccgcgatatggctaagcagggtgttgaatctattcctgtatggagcgtaattaccgatctggaaagaaatatcgccccgctatactccgccccgccagcgccggtagttccggcagagcttcatcctgatacgctgaaactggtgaccgacttcagctccgccctggctgagaagttgtacaaggctcaattaaaatatggctatgacgcggactggaaacaagatggttggccaagccaatgccaggcagactttcaacagcatatagctaagggagacccccgggatgttgccgcttactgtgcatttatgtggtatcacggctggaaaactgagccagcgccggtatcgctgcctgacgagcaacatagcgaacgcttcaactggacacttgggcagtgggctgaacatgttgggggtcattaccagggaaatgatccggcaaactattacgagttcggctcattcatggcggtcgctgcaatgctgtgccaattcggcaccgttcagcaaaaaattggatggaacgcctgccgcgccgccatggttaacgcaggccagtga

SEQ ID NO: 21407 - DNA, 1059 bp, Escherichia coli
atgaagaagcgcacctacaaaaacaaacacactgccagcagtggcagtgccggacagcctgatatctctgacgcgctcagaagcgatccggcgctcagcgccttcacgtttgacgggccatattcagtaacagacggctatgatctgctggacagcatgtgctgcgtcgataatggccggtactacgagacaccaatagactggagagggttaacccgcgcgttcgcacaatccccgctgcatcagtcggcgctttatttcaaacgtaatgtgctgaccgggtgctatatccctcacccgttactctcacgtcaggcgttctctgcgtttgcactggactggtttgtcttcggcaatgcctatcttgagcgtcgatctaatcgcctgggagacccgctcaaacttaagcatgttccggccctgaacacgcgacggggaagcgaccttgatacctactggtttatccggcagtggaaggatgaatacgagttcaaggcgggcgaagtctgccacatcatgaacccggacattcatcaggaaatctacggtatgcctgaatatatgggggcgctgctgtccgccagcctgtcacattccgccgataagttccgcaaactctattacgacaacggatcacatgccggatgtattctctatgttggttcggagaaggtggatcaggaaagcataaaggtggtgcaaaaaacgctgtcgcaggccagagggaaaggctccttcaaaaacgtgctgatccacgcgccgggcggcggcaaggacggcgtgcaactgttgcctttcagccagatatcggcaaaggatgagtttcttaacatcaaatcagcaacgcgcaacgatttgcgcgacgctcaccgcatcccgccgcagctgatgggcgcaatgccggaaggcaacggctcgctgggtgatgttgagaaggccgcgcgcgtcttcgccatcaacgaaatgttacccgtgatggaagcaatgaagggcgtcaatgactggctcggtcaggaagtgatccgctttaatccctacgctctgctcaaagacgagtaa

SEQ ID NO: 21408 - DNA, 1731 bp, Escherichia coli
atgatacaggacgcttttgtacgtcagagggcaaaacaactttactggcagggctacccgccagcggagatcgcgcgcctgatggggattaatcagaacacaatttacgcctggaagaaacgcgatgaatgggatgaaacgccacccgtccagcgcgtcagccagtctatggatgcccgcctcatccagcttacggacaagaaagacaagaccgggggagacttcaaggagattgatctgctgacccggcaactgaaaaagctgtctgacggacaaccggcaggggctggtacgggtaaaaagccgcgcaagcgcaagctgaaaaaccacttcaccgaagaacagatcgtcgcgctgcgggagaaaatacttgattccctttcgtggcatcaacgcggctggtatgagcaacgccaccaccgaaaccgcatgatactgaagtcccgccagattggcgcaacctggtactttgcacgcgaagcgctgcttgatgcgctgcgcgatgatgtgaaatacccgtaccagcgcaaccagatatttctgtctgcatcccgccgtcaggcgcaccagttcaggggattcattcagaagatggcggaagaggtggacgttgagcttaagggcggtgacaaaatcgtactgagtaacggcgcagagctgcatttcctcggcacgtccgcagcgacggcacagtcatatacgggcaacctgaagtttgacgaattcttctgggtcagcaacttcaccaacctgcgaaaggttgcaggtgcgatggcaacgttgaaggggctgacgcgtacctacttttccacgccgtcaggcgagacccatgaggcctacccgttctggacgggcgatcgctggaatgagaaacgcccgaaggcacagcgcaaagcgtttgatgtgggctggaaaacgctgaacagcgggctgttatgcccagataaaacctggcgtcagattgtcaccctgaaggatgtgatagaccacggctgggaatataccgaccttgaagagattcaggatgaaaacagcgaggatgaattccgcaacctgtacatgtgcgagttcgttcgcgatggcgagtcagccttcaaccttaacgcactgattggctgcggggcagatggttatgacgaatggccggactggaagcctttcgcgtccaggccgatgggtaatcgcccggtctggataggctatgacgccaacggcagcagcggcaacggtgacagcggcgcgatttgcgttgtggttccgccactggtgccgggcggtaaattccgtacggtggaaacggaacaggtgcgcggccttgagtttgaagagcaggcaaaagttatcgaaaacttcaccttcaaatacaacgtccagcatgtcggtatcgacgtgacgggcggtaacggtgaggccgtttaccagatagtgaagaagtttttcccgatggcgatgccctacaccatgtcaatgacgtctaagcgcgccctggtgctgaaaatgctacagctgatccgcgccggtcgctgggaatatgaccgcagcgaacgcgccctgatcaacgcctttaactctgttcgcaaggtaaagacgcctggcggattcatcacctatgacactgaccgctcacgcggcgtcagccacggtgatttagcctgggcgaatatgctcgccattattaacgaaccgctgggccaggagagtggcagcggcgggtttgctatggagttctga

SEQ ID NO: 21409 - DNA, 837 bp, Escherichia coli
atggctagcgcagctaaaccagcccgtaagaaattccgcgttgccgtctccggtgccaccgttgacgggcgtgaaattcgccctgagcaccttcgtgatgcagcagcaaactacagcccggacgtgtacggcgcccgcgtcaacgtggagcactacctttcgccgttccccggcagtgatttcggtgcgatgggggatgtgacagcgctgagtgctgaagatatcagcgaaggcccgcttgccgggcgtaccgcgctttacgccgagatcgaaccttctgagcgcatgaagaagctgacggaagaaggtaagaaaatttactccagcattgagctgcacccgcagtttgcacttaacggcaaggcgtatgtcatggggctggcgatgaccgataccccggcgagcctcggcaccgaacgcctgaagtttgccgcgcagcaacgtcagcaggttatgtccttcaacaaccagcagggcgaagccccgatgttcaccgatgccatagaggctgaaatcatcgaactggctgagcagcacagcgacgaaggtaaacagtggttcagtcgcgtcatggggattatcggcaaaggccgtaagtctgacggcgaacagttcagccaggtgcgtgacgccgttgagaatgtcgctcagtcccatgccgaactgctggacagcttcaacgacctgagccgcgcccgcgagcaggaccgccaggccatccagaagctgaccaccgatcttgccgcgctgaccagcaagctgggtagcacagacgccaatttcagccagcgggaacccgccagcggtggcgctaacgcgcagcttgctgattactga

SEQ ID NO: 21410 - DNA, 1050 bp, Escherichia coli
atggataacaatacccgccagctatttgatcagtacatcgcccggcaggcacagctcaacggcgtatcaaccgccgctgttgctgcaaaatttgccgtagatcctacgcgccagcagcgccttgagcaggccgcgcagcaggatgattctttcctgagcaaaattaacgtgtttggcgtcaaccagcagatcggacagaaagtcctgatcggcagtaaagggccgatggctggcgtaaacaacagcgtcatcagtcgccgcaacccaggctcaaatcattcaatggagccgctcgactacatgtgccgcaaggtcaactatgactatggcatcagctatgaacagcttgatgcgtgggcgcacatgccggagttccagccgctgatcagcaaggcaatggcacgccagatgtcgctcgatcgcatcatgattggctttaacggcgttaagtacagcgatccgtctgaccgcgccgctaacccgctgttgcaggattgtggcattggctggctggaaaaaatccgtaaggaagcgccgcaccgcgtcatttctaatgtgactatcacctcgcgcgatgaagataacaaggttgtagcgaaaggcacctacggcaacattggcgctgcggtgtacgacgccaaaaacaccctgatggatgagtggcacaagcgtaacccggataacgtggtgattctggcgggcgacctgctgacgaccagcaatttctcagccatcaacgctttaagccagaccaacccgaataccgaaatgctggccggtcagctgattgtcgcgcaggagcgcgtaggcaacatgccgacctttatcgcgccttacttcccggttaatggcgtgctgatcacaccgttcaaaaacctgtcgatctactaccagcgtggcggtctgcgccggacgattaaagaagagccggagtacaaccgtgtcgcaacgtaccagtcctcaaatgatgacttcgtcattgaagactacggcaatgttgcgttcattgacggcattcagttcgcccaggctgaagcggcaggcgagtga

SEQ ID NO: 21411 - DNA, 858 bp, Escherichia coli
atgttaacaccggcacaaaaacattttcagagggtcatggcagaacgccggggccaggcggatgaagaatccgatatccagcgcaccgcgcatgagcaaattctgcatcgcctgcgtatggacttgtcccgcctcagcggcgtgcagtccgaagaaaccaaagccgaaatgaaaaaatccatgctgcctgaatatgagggatggattgaaggcacgctcgacggcgacagcgggcggcaggatgaagtcattaccaggctgatggtctgggcgattgactgtcgtgactatgcgcttgcgttgagactggggcgctatgtagtgcgccacgggctgacgctgccggataacttcaaccgcacggcggcaacattcctgaccgaagaaatgagcaaaccagtactgacgcttgccgctgctgatgccgacgctgatttatcggccagtaccgcagtgcttgatgaagtggcggagattgtcgccgacagtgatatgccggatgtggtgcgcgccaagttgtgcaaggcccgtgcgcttgcccgccgtggcgcgactgatatcacgaccaaagcggaagcgctggcgctgttccgtgaggcgctgacgcgcaaccccaacgccggggtgaaaaaagagatcgccacgcttgcccgtgaagttaagaagctgtctgcggatagcggcacaggtgaaagcgacgcggccagcaccgacaaaactgacgttactgatgagcctgtccctgaaaagagcaccaccgccagcgcagcaggtaaagcgacggcgcgtaaaaccacgactaagacggcaacaggcaaagcgacaaagcgcaagcctgccagccagaaaaagaactaa

SEQ ID NO: 21412 - DNA, 525 bp, Escherichia coli
atgagcagccttgtggcaaataagcgcgttttgcctgccgacagcgatacgcccgatgttgatgatggtgataccaccgtcagcgccggggacttctggccggtgattaaactggccgatctccgtctggccgcgcgtatcactggcggtatcactacgtccaggctgatgcacgtcaccacggaagcggtagcccatgtcaccgcgcagttgcttgactggcgtgccggtcaggttaaagcaggttttcacacgctggaagatgtgccttcagtcctgccgtcaggtgatacggaaaagctggttatcaacggtgaaaacgtgaaggtgtaccgcttccgccgcgcagtctattcgattgccagggcgctggtacttgaaagctatcgcgacgttgataccacggcgaaaggcgacaaagacgccgctgcacttgacctgcaacgggatgatctctggcgggatgcccgctggagtatcgctgacattcgcgacaccccgcgactctatgcggagctttgctga

SEQ ID NO: 21413 - DNA, 201 bp, Escherichia coli
atgaaagtgaaggcattgcagggggatacggtggatttgctttgctggcgtcactacggcaccacgcagggcgtgaccgaaaaagtgttatctgccaatcccggactgagccagcaggtttttcttgatgccggtcaggagattgaactgccagaaatcgcgcacaaagcgacacaggagatggtgcagctatgggattaa

SEQ ID NO: 21414 - DNA, 303 bp, Escherichia coli
atgggattaagtttctttcagcgcctgaatgactggctgacattcacgatgtcagcgatggtcacgagtatcggcgttatgacactgagcgaaaagattgcgctggccggtcttcttgtcgggatggtttttggtgcccgtggatggctctatcgcgcccgcatcgaacgagggcagaagcgtcgaaacgaactgattaaccagatccttgagcaggcagaacacaggcagatgagtgagtcagagcgccgggcgcttgaccttctgcaacagaatgagccggaagatgaaacagcttattaa

SEQ ID NO: 21415 - DNA, 546 bp, Escherichia coli
atgaaacagcttattaaaaaatgctccattgcggccattgttgcgctgggtatcacgctcagtcctggcgcgttgcgcaccacgcctgaaggccaacaaaagattgctggctgggaagactgccggaatacgccctactactgcacggctggtgtgctcacggtcggaattggttcgacggggcgcgttgagaagcgggagtacagtgacagcgagatcgccggtcgatggattaacgatatgcggcacgctgaaaactgtattaaccagaattttgaaggcgggcatatgccacagtccgcctttgaggccatgacggatgccagtcttaatgtggggtgtactggcctgatgtggttcacggacagccagaagcgaaaacagcgcacgaccatctggaagaaggcgcaggcgcatgaatggcaggcgatgtgtaaccggctgacggactttgtaaacagcggcggtaaacgcagccagggactggttaaccggagaacggattttaaggcgtggtgcctgcgtgacgtggaggctggaaagtga

SEQ ID NO: 21416 - DNA, 438 bp, Escherichia coli
gtgaagattacagccattttatgcgcgctgctggcgctggcctctggtggcctgctctggcagacacatcagcgcggtaaagactccgtccgcaatgaagtgctttcccgcgaggtgaagagtaatggtgaggtgcttggagagctgcgggcactgactgctgacgcccgcgaagtccttgcacagttgcgggcaaccgaacagcaaagaaacgcccagggagaaaagcgacgtgaaaacatgcgcgatgccatcaaagacgatacgtgtgccaacactgttgtgcctgcttctgtcagtaacagcctgcaacaccgtaccgccgcagccgcaaatgaaaatcgtgcacgaaccggtgccggaaagcctgacggcagcaacgccagcgccggaactgaccgccccggtaacgtggggcgcgatagctatctggagtga

SEQ ID NO: 21417 - DNA, 471 bp, Escherichia coli
atgctgaaagctgactcactacgcgagaccctgacccgcgctaacaaatggtgcagggccaatcctgaagccttcaccgtatttgtggaagaagggaatatcgagacgaccggcgaaacaccatcgtttatgtaccgctataccctggtgctgtttgtgatgaattttgccggtgatattgatgatttcacgttgccgttaatggcatggctctggcacaaccagcccgatctgctgctgaacccggagaagaacaggaacattaaatttacgacccttatcaacaacgacgataccgccgacatcctgtttgaaatgccgctgcgcgagcgcgtgaaggtcactctggatgcaaaaggcattcctcgcgcggagcatttgccggaaccgaaaccgcgtattccttcagcggccggtgactggagcgccatctttgaggatgtgacgtgggaggctgacgcgcatgagtaa

SEQ ID NO: 21418 - DNA, 639 bp, Escherichia coli
atgagtaacgatctcttccgtgagctggatcaggtcttcagcgacatactggcgggcacctcgcaagccggacgtgttcgcaccgcccgtgcggttggtcaggcactgcgaaagagccagcaacagcgcatcaaagcgcagcaaaacccggaaggttcgccatatcctgcccgccgtcgccgggtgctgcgttctcagcagggtattgtatttgtctggcagggtgagatccgccgcctgaaaaactggcacggtggtcggggaaaatacgggcgaaccattaccggctttgacgaagagcgaaacgatattcgcacgttttaccgcagcgatattgagcgttacatcgagatcaatacgcgctcagtgcgccgcagcactgcgaagaaggtgccgatgtttcagcggctgcgcagttatcgctttctcaaaatgcgcgctgatgcaggcggcacatctgtgggttatgacggcgtggccgcgcgcattgcgcgtgtgcaccagtacggccagcgcgatcaggtcgggccgggtgcttttgctaaatatccggtgcgtgagctgctgggctttaccgctggcgatgaacagatgattacggaacaggtggttaacaacctggggagtgcagcacgatga

SEQ ID NO: 21419 - DNA, 582 bp, Escherichia coli
atgagcgctgaactgatccgcctgctggaaaatatcctccgcgtcggcgttgttattgccgttgatgaagagagctggcgcgtgcgcgtgcaaagtggcgaacttcagaccgactggctacgctggaacaccatgcgcgccggggcattcagtatctgggtgccgccttcagtcggtgaacaggtctggctgggctgtatcggtggcaatcctgaaacggcggtcattatcggcagtctctacagccgtgattaccctgcgccgggcagcagcctgaaagagattgtgctgacagcgccagacggtgcctctttccgctatgacgcagaagccagcgcgctggaagcgcagggcatgaagacagcacatatcaaagcctctgccagcgtcacgcttgaaacaccgattgtggaatgcaccaaccatctgaaagcgcggacgttcgaactgtcggagggtggcacgatgaagggcaatgttacccattctggcggatcgctttcgtctaacggggtgacggttcattcgcacgtgcatggtggtgtgcagggtggcagcagcaacaccgggggaccgaaatga

SEQ ID NO: 21420 - DNA, 369 bp, Escherichia coli
atgacagtccgctataccgggatgaacccggacggcacgggccagcttaccgataccgatcaactgtggaattcagtccgcgacatactgaccacgccgctggcaagtcgggtgatgcgccgggattacggcagcatgatccccgatctgctggatgagccacaaaacgaagtgacccgcctgcaatgtatgagtgcggcagtgatcgccctgacgatgtgggagccgcgtattgccctgaacggcatcaatatcagttattcaaaggatggcgctgtcaccgctgaactggtcggcattatcaccgaaaccatgcagacggctggcacagcgctgacgctcaggagtggcactaatggcaacagttga

SEQ ID NO: 21421 - DNA, 897 bp, Escherichia coli
atggcaacagttgatttatcgcagctaccacagccgcaaattatcgaagtgctggacttcgaagtcattctcagcgaggtgaaagccgtcatgctcgcggcattcccgcaggaacagcagggttctgttgccgctgcgctggagctggaatccgaaccgctgaacgtgatcgcccaggtggttgcttaccgtgaaatgatgctcaggcagcggattaatgacggtgcagcggcgtgcatgttgagccatgccgtatcgtccgatcttgataatctcgcgggcaacctgaacaccgaacgcctgatcatcaccccggagacggcaactactgacgcggtaacggaaagtgataccgcacttcgtttgcgcgcgcaggctgcgtttgaagggcttagcgtggcagggccaaccggcgcatatgaatattttgccaaaagtgccagcggcaaagtggcggacgccaaagcgatcagcccgtcgcctgccgtggtggtggtctctgtgctgtccaccgaatgcgacggcactgccagtgcggaactgctggcgacggtggataaagtgctgtctgctgacgataagcgccccgttgccgatcgtctgaccgttcaggcagcggagatagtgaattatcagattaatgcgctgctgtatttttaccccggccctgagtctgagcctatccataccgccgcgcaggacgcgcttcagtcctggctgaatcaacagggcaagattggtcgtgatgttgcccgctcagccattatggcggcgctgcatgttcagggtgtgcagagggtggagctgctggagcctgccagcgatattgtgatcgccgatacgcaggcagcgcggtgtgagtccttcacgatcgagaccgggggcacagatgaataa

SEQ ID NO: 21422 - DNA, 615 bp, Escherichia coli
atgaataacaacatgctgccgccttcggccagcggttttatgcgcagtacggagaaggtcacggagcggcttaccgatattcctgttgacctgcgcaagctatggaacccggacgaatgtccggctgatcttctgccttatctcgcctgggcgctgtcagttgaccgctgggataagaactggtcagaacagactaaacggcaggtgattaaagcctcctggctggttcaccgtcagaaaggcactatttctgctttgcgccgagtcgttgaaccgttcggctttctgttgcgcgtgatcgaatggtggcagagcggcgaagagccgggaaccttcaagcttgaaatcggcattcaggaacagggtattactgaggaaacctatcttgagcttgagcgccttattgacgatgccaagccgagaagccgccaccttacaggcctgtctctttcgcttcagtcgcagggctatatcgaagccggagcggggtgttatatcggcgatacgctgaccgtttatccctattttcctgaaaccatatccgtaggcggtgctgactacaccggcgcggcagtccatttaattgataccgtggagatcgcaagtggcgactaa

SEQ ID NO: 21423 - DNA, 285 bp, Escherichia coli
atgctacttgcagccaagctcaccgacaaaggcacccagcacgacggttattacgagaccgtcatcacagccgggtcatccactgtctttattgatggtctccccgcagcccgccagggagatccgctgacgccgcatgctaaaccgaagcatccccctcatccccgtaaaatcgccagaggttcttcaaccgtctttattgacggtctgcccgccgccagaagcggtgatgctgttgactgcggcggcgtggttattggtggcggtacggtaaatataggctga

SEQ ID NO: 21424 - DNA, 444 bp, Escherichia coli; identical to SEQ ID NO: 15094

SEQ ID NO: 21425 - DNA, 138 bp, Escherichia coli; identical to SEQ ID NO: 3480

SEQ ID NO: 21426 - DNA, 531 bp, Escherichia coli; identical to SEQ ID NO: 12243

SEQ ID NO: 21427 - DNA, 777 bp, Escherichia coli
atgcgtcagtatcgtttattgtcacctatgattaaggtagtcatagtattattttcccttttattctctacagcacaagcaggcttagtgatcggtggaacgcgttttgcgtatccggaaaatcagtcctcaatatctgttgaactcaaaaacacttcagacagagatatgttagtcaagattgctgtctcccctgatgatgctcgtcagttgacgggaacggttgaatctttgccctcatattctgaaacggtatttatcgcaactccgccactgtttgttttgaagcctgacaaaaatacaaaaataagaattaatcgtgttggtggcagtttacctgccgaccgggaaagtttatttatactgaatgttgcagcattaccaacgttggaaaatagtcattcagtcaaaactgataatcaattgcaaatagcagtccgcaatcgtatgaaaatattctatcggccatcaaatttgtctgaagacccgaatatgtcatatcaaaaattacgctgggcacgaaaaaatgaaattgttaccgtttataatccaggccccagatatgtgacactctataacctacatgttgatggtaaagttatagatggtggtatggtcgcaccatttagccatcgccaacaatcatggtgtaaatcgcaaggggtttgtgaaatagcatggcagacattggacatttataataatgtattgccaattttgaaagtaaaattaaatccttcacagttggattttactggctttgcatttagtcaataa

SEQ ID NO: 21428 - DNA, 534 bp, Escherichia coli; identical to SEQ ID NO: 12239

SEQ ID NO: 21429 - DNA, 573 bp, Escherichia coli
gtgaaaacgggggctgaagccatccgggcgctggccacacagctcccggcgtttcgtcagaaactgagcgacggctggtatcaggtacggattgccgggcgggacgtcagcacgtccggattgacggcgcagttacatgaggttctgcctgacggcgctgtgattcatattgttcccagagtcgccggggccaagtcagggggcgtattccagattgttctgggggctaccgccattgccggatcattctttactgccggagccacccttgcagcatggggggcagccattggggccggtggtatgaccggtatcctgttttctctcggtgccagtatggtacttggtggtgtggcgcagatgctggcaccgaaagctagaactccccgtacacagacaacggataacggtaagcagaacacctatttctcctcactggataacatggttgcccagggcaatgttctgcctgttctgtacggtgaaatgcgcgtggggtcgcgggtggcttctcaggagatcagcacggcagacgagggggacggtggtcaggttgtggtgattggtcgttga

SEQ ID NO: 21430 - DNA, 549 bp, Escherichia coli
gtgaaaacgggggctgaagccatccgggcgctggccacgcagcttccgtcgtttcgccagaaactgaatgagggctggtatcaggtgcgcattgccgggcgtgatgcaggcgaaaatgaattatctgcccgtcttaatgagccgctggaaaatggtgccgtgattcacatcgtgccgcgtatggcgggagctaaaagtggcggtgtgtttcaggtggtgctgggggcggcgctgattgcggtggcatggtggaaccctgtgggctggctgggtgctgcggctgtatcgggcatgtatgcggcaggggccagtatgattctgggtggtgtggcccagatgctggcaccgaaagccaggacgcccacggcagccagtacagataacggcaaacagaacacctatttctcctcactggataacatggttgctcagggcaatgttctgcctgttctgtacggtgaaatgcgtgtggggtcgcgggtggtttctcaggagatcagcacggcagacgaaggtgacggtggtcaggttgtggtgattggtcgctga

SEQ ID NO: 21431 - DNA, 1140 bp, Escherichia coli
atggttttgcaatccacgcgctggttggcgctcggctatttcacatacttttttagttacggcatttttctacctttctggagcgtctggcttaaagggattggtttaacgccagaaaccatcggcctgttattgggggcgggtctggttgcccgtttcctcgggagtttgctcatcgcgccccgcgtcagcgatccttcccgcctgatttccgccttgcgcgtgctggcactgctgacacttctctttgctgtcgccttctgggcgggggcgcacgtagcgtggctaatgctggtgatgattggctttaacctctttttctcaccgctggtaccgttgaccgatgcactggcgaatacgtggcaaaagcagttcccgcttgattacggcaaagtgagactgtggggctcggtggcgtttgtcattggctcggcgctgacgggcaaactggtcagtatgtttgattatcgggtgatcctcgcgctgttgacgttgggcgtggcatccatgctgctcggctttctcatccgtccgacgattcagccacaaggggcaagccgccagcaggagagcaccggctggtctgcgtggttggcgttggttcgccagaactggcgctttctggcctgcgtttgtttattgcagggggcacatgcggcctattacggttttagcgccatttactggcaggcagctggctactcggcctcggcggtggggtatttgtggtcgctgggcgtggtggcggaagtcattatttttgcgctgagtaataaacttttccgccgttgtagtgcacgcgatatgctgttgatctcggcgatttgcggcgtagtgcgctggggcattatgggagcaacgacggcgttgccgtggttgatagtggtgcaaattctgcattgcggtaccttcacggtctgccacctggctgccatgcgctatattgctgctcgccagggtagcgaagtcatccgtttacaggcggtttactctgccgtcgcgatgggcggcagtatcgccatcatgaccgttttcgccggtttcctgtatcaatatctcggccacggcgtgttctgggtgatggcgctggtggcgcttccggcaatgtttttgcgcccgaaagttgttccctcatgctga

SEQ ID NO: 21432 - DNA, 123 bp, Escherichia coli; identical to SEQ ID NO: 8077

SEQ ID NO: 21433 - DNA, 1266 bp, Escherichia coli
atgtctcaaaataaggctttcagcacgccatttatcctggctgttctttgtatttacttcagctatttcctgcacggcattagtgttattacgcttgcccaaaacatgacatctttggcagaaaagttttccactgacaacgcgggcattgcctatttaatttccggtatcggattggggcgattgatcagtattttattcttcggagtgatctccgataagtttggtcgtcgggcggtgatattaatggcagtaataatgtatctgctattcttctttggtattcctgcttgcccgaatttaactctcgcctactgtctggcagtgtgcgtaggtatcgctaactcagcgctggatacgggtggctaccccgcgctcatggaatgctttccgaaagcctctggttcggcggtcatactggttaaagcgatggtgtcattcgggcaaatgttctatccaatgctggtgagctatatgttgctcaataacatctggtacggctatgggctgattattccgggtattctgtttgtactgatcacgctgatgctgttgaaaagcaaattccccagccagttggtggacgccagcgtagctaatgaattaccgcaaatgaacagcaaaccgttagtctggctggaaggtgtttcatcagtactgttcggtgtagccgcattctcgaccttttatgtgattgtggtgtggatgcccaaatatgcgatggcttttgctggtatgtcagaagctgaggcattaaaaaccatctcttattacagtatgggttcgctggtctgtgtctttatttttgccgcactgctgaaaaaaatggtccggcccatctgggctaatgtatttaactctgcactggcaacaataacagctgccattatctacctgtacccatctccattggtgtgtaatgccggagcctttgttatcggtttctcagcagctggcggcattttacagctcggcgtttcggtcatgtcagagtttttcccaaaaagcaaagccaaagtcaccagtatatatatgatgatgggtggactggctaactttgttattccgctgattaccggttatctgtcgaacatcggcctgcaatatatcattgttctcgattttactttcgcgctgctggccctgattaccgcaattattgtttttatccgctattaccgcgttttcattattcctgaaaatgatgtgcggtttggcgagcataaatttagcacccggttaaacacaattaagcatagaggttaa

SEQ ID NO: 21434 - DNA, 153 bp, Escherichia coli
atgctgacgaaatatgcccttgcggcagtcatagtgctgtgtttgacggtgctgggatttacgcttctggtcggagactcgctgtgtgagtttacggtgaaggaacgtaatattgagtttaaggctgttctcgcttacgaaccgaagaagtag

SEQ ID NO: 21435 - DNA, 153 bp, Escherichia coli; identical to SEQ ID NO: 14875

SEQ ID NO: 21436 - DNA, 1236 bp, Escherichia coli
atggaaaagggaatcactaagccgagcattctcatcgttgccgatgatttcacgggagccaacgacgcgggggtaagcctggcgcaggtggggcatacagttgatgtggcctttgaaatgccttatcgcggtgatgccagcgtatgggtgattaacagcgacagtcgggcgatggatcctaagctggcggcgatgaaaataacctcgctgatgagtcatctccctctggcgaataacccgccgctcgtgattaaaaagatagattccacgctgcgaggcaatatcggcgcagaaattgaagccctgatgaaggcatgcggtataacgggcgcagtggttgcccccgcatttcctcaggcgggaaggaccacagtggccggtgagtgttgggtaaacggtgtgcggataacggaaaccgagtttgctagcgatccgaaaaccccggtattgagcgcccgaattgcggacatcatccggttgcagacggccattccatgccagcccgttacggtttctcagctcagccatttgtcttatgagcaaccgtggattggcgtgatagatgcgcagacggacagcgacctggatcgcatcgctgccgctgtgatgcaggctaaacaaccgctgctgctggtcggctccgctggtatttgtgatgccgttgcccggcgctccgcgattatgccgccacccaccgtgctggccattattggttcaatgagcgaaatcgctcaacggcagatcgccacacttcattcacacccacgtatcacacagatatacgtcgatgttgaacacattctggcaggcaatgccagtgactatgacgcgcgtattgtgcaggccttgcagaaaggcgaccactgtattgtccacacctgtaacgattctgtagcaaggcatcagatcgacaccctttgccagcgttggcagatgagtcgcgctgcacttggggaaaaaatttgccggtttcttggcgaacttacccggcaagttctgctttgcgcaatgcccgatgcgctttatctctctggtggtgatgtcgcaatggcaacagccagtgcgttaggcgcgaccggatttcgtattacggggaaggtggcgcaatgcgttccatacggtcactttctgggcggcgtctggtcccgttcggtgatgacgaaagccggtgggtttggcgatgagaccacgttgcatcaggttctgaattttatcgaggagaagcgtagtgaataa

SEQ ID NO: 21437 - DNA, 1665 bp, Escherichia coli
atgagtgaggcagaagcccgcccgactaactttatccgtcagatcatcgatgaagatctggccagtggtaagcacaccacagtacacacccgtttcccgccggagccgaatggctatctgcatattggccatgcgaaatctatctgcctgaacttcgggatcgcccaggactataaaggccagtgcaacctgcgtttcgacgacactaacccggtaaaagaagatatcgagtatgtcgattcgatcaaaaacgacgtagagtggttaggttttcactggtctggtaacgtccgttactcctccgattattttgatcagctccacgcctatgcgatcgaactgatcaataaaggcctggcgtacgttgatgaactgacgccggaacagatccgcgaataccgcggcaccttgacgcagccgggtaaaaacagcccgtaccgcgatcgcagcgttgaagagaacctggcgctgttcgagaaaatgcgtaccggcggttttgaagaaggtaaagcctgcctgcgtgcgaaaatcgacatggcttcgccgtttatcgtgatgcgcgatccggtgctgtaccgcattaagtttgctgaacaccaccagactggcaacaagtggtgcatctacccgatgtacgacttcacccactgcatcagcgatgcgctggaaggtattacgcactctctgtgtacgcttgagttccaggacaaccgtcgtctgtacgactgggtactggacaacatcaccattcctgttcacccgcgccagtacgaattctcgcgcctgaatctggaatacactgtgatgtccaagcgtaagctgaacctgctggtgaccgacaagcacgttgaaggctgggatgacccgcgtatgccgaccatttctggtctgcgtcgtcgtggttacactgcggcttctattcgtgagttctgcaaacgcattggtgtgaccaagcaggacaacaccattgagatggcgtcactggaatcctgcatccgtgaagatctcaacgaaaatgcgccgcgcgcaatggcggttatcgatccggtgaaactggttatcgaaaactaccagggcgaaggcgaaatggttaccatgccgaaccatccgaataaaccggaaatgggcagccgtcaggtgccatttagcggtgagatttggatcgatcgcgccgatttccgcgaagaagctaacaagcagtacaaacgtctggtgctgggtaaagaagtgcgtctgcgtaatgcttacgtcattaaggcagaacgcgtggagaaagatgccgaaggcaatatcaccaccatcttctgtacttatgacgccgacaccttaagcaaagatccggcagatggtcgtaaagtcaaaggtgttattcactgggtgagcgcggcacatgcgctgccggttgaaatccgtttgtatgaccgtctgttcagcgtgccgaaccctggtgctgcggatgatttcctgtcggtgattaacccggaatcgctggtgatcaaacagggctttgctgaaccgtcgctgaaagatgcggttgcgggtaaagcattccagtttgagcgtgaaggttacttctgcctcgacagccgccattctacggcggaaaaaccggtatttaaccgcaccgttgggctgcgtgatacctgggcgaaagtaggcgagtaa

SEQ ID NO: 21438 - DNA, 1077 bp, Escherichia coli
atgaaagcactggctcggtttggcaaggcttttggtggctacaagatgattgatgtcccacaacccatttgtggcccggaagatgtcgtgattgaaattaaagccgcggcaatctgcggcgcagacatgaagcactacaatgtcgatagcggttcggatgagtttaactctatccgcggccatgagttcgcaggttgtattgcgcaggttggtgaaaaagtcaaagactggaaagtggggcaacgcgtcgtgtcggataacagcggtcacgtttgcggcgtttgcccggcctgtgaacaaggtgattttctgtgttgtacagaaaaagtaaaccttggtctggataacaatacctggggcggtggtttttccaaatattgtcttgttcctggtgaaattctcaaaattcatcgtcatgcgttgtgggaaatccctgatggtgttgattatgaggacgcagccgtacttgaccctatctgtaatgcctataaatccatcgcgcagcaatcgaaattccttccaggtcaggatgtggtcgtcatcggcactggcccactcgggctgttctccgtacaaatggcgcggattatgggggcggtaaatatcgtcgtcgttggtctgcaagaagatgtaacggtccgcttcccggttgcaaaagaactgggtgcgacggcagtagtaaatggttctaccgaagatgtggtggcacgctgccagcaaatttgtggcaaagacaatctggggctggtgattgaatgctccggtgccaatatcgcattgaaacaagccatcgaaatgctccgcccgaatggggaagtagtacgcgttggaatgggcttcaaacctcttgatttctcgattaatgacattaccgcctggaacaaaagcatcattgggcatatggcctatgactccacttcatggcgtaacgctatcaggctattagccagcggcgctatcaaagtcaaaccgatgatcacgcatcgtatcggcctgtcgcaatggcgcgaagggtttgatgcgatggtcgataaaactgcaatcaaagtgatcatgacttacgactttgatgaataa

SEQ ID NO: 21439 - DNA, 954 bp, Escherichia coli
atgaagaaactattgattcgattaatacctgatgcaatatatgaggctctggaaaagacagctctgcattctgaacgctccctggaagcacaggccagatatatccttagttgctccgtagataatgaaaaacaattaactggtggtgaacgctatcaaagagaaataaccgcgcgtcttaatcaagcgttatcagaagctaatgaggtcataacagccattaatcttgttcccgcaagaattgcagaacaattaggccatcatgacgccatagaatccgaaaattggttcaccggaaatgctgttcctagctttacagagcttgacgaattaagcgatatctttggatgctctccagattggttaaagtttggcgaaaatgtaccttatccaaagagttctaaaggaaggataaactggaatcgtggcggagaaaaagatatcgatgcacttttagagcctgacaacaaaggtcgtaaagtctcatctattcatattttcagggtaaatgaatctggcaatatactaatactgagagaatttgaaaacagcataactacagattttttctcaacaaacctttacttatcagacaaagaaaaaataggacagggcggattccacgacctggtcgatttccttgtaattttacaatccctttatttaaaatatataaatagcaatctgttagtgaaaagctataacattagccaatatgtactggattcctgttataagagcggagaaaagcaccccataactatatgtagtgcaggtgagacaagtacctggtgggaagacatatggcatgaagacatgatagctcaatcgaggaataatgagtcctacttctgggatggtgacaaacctcttattgatagccttcataaagaacttcaaaaaaataacagattaaagccaaacagtgagttagatatgccactaattggttaa

SEQ ID NO: 21440 - DNA, 1935 bp, Escherichia coli; identical to SEQ ID NO: 12932

SEQ ID NO: 21441 - DNA, 321 bp, Escherichia coli
atgatcccgggcggcccattcacgtttccacaatgcctgttcagcggtctgaatcagggacgccagcagttcagcagggacggtcacctggcggttttcgctcacgttattgatgatctccatcgccacgccggaagaaataccggattcagtccgctggtcttccgggatgtcctccaggcgcgccaggacggttctgatttcatgatcggacagggaaatatccattccgtcagcgagggcctggatctcttccggggaccagataaccagcatcagcggcatgtctcccggatactttactgccagctcccggcatag

SEQ ID NO: 21442 - DNA, 927 bp, Escherichia coli
atgccaaactggtgctcgaatcgtatgtatttttctggtgaaccggcacagatcgctgagattaaacgactggccagcggtgcagtcacaccgctttatcgccgcgccacaaatgaaggtattcagctgtttctggccggaagtgccggacttctgcagatcactgaaaatatccgctctgagcagtgccccggagtgacggctgccggacgtggtgctgtatcactggaaaatatcgcgttcacccgctggctgacacacctgcagaacggtgtactgctggatgagcaaaactgcctgatgctgcatgaactctggctgcagagcggtactggacagcgtcgctgggaagggttaccggatgatgtcagggaaactatcactgtgcatttcaccgcaaaaagaggtgactggtgtgacatctggggtaacgaggatgtatcggtgtggtggaaccgtctgtgtgacaacgtactgccggaaaaaaccatgccgtttgacctgctgacggttttgccgacccgcctggatattgaagtgaatggctttaacggcggtgttctgaacggtgttccttctgcatatcactggtatacagaacggtatggcgtgaagtggccttgtgggtatgacctgaatatcagcagtcagggggaaaacttcattcaggtggatttcgacacgccgtggtgtcagccggaaagcgacgttgttgcagaattaagccgccgtttcggctgcacgctggagcactggtacgccgaacagggctgcaatttctgtggctggcagttgtatgagcgcggagagcttgttgatgtgctgtggggggaactggaatggtcttccccgacagatgacgatgagctgccggaagtcaccggacctgcgtggatagtcgacaatgtgacgcattatggcggatga

SEQ ID NO: 21443 - DNA, 5271 bp, Escherichia coli
atgttgagtttcagcgttgttaaatcggcaggcagtgccggaaactattacaccgacaaggataattactatgtgctgggcagcatgggagaacgctgggctggtcagggggctgaacagcttgggctgcagggcagcgtcgataaggatgtttttacccgtcttctggagggcaggctgccggacggggcggatttaagccgcatgcaggatggcagtaataagcatcgtcccggctacgacctgaccttctccgcccccaaaagtgtctccatgatggccatgctcgggggggataaacgtcttattgatgcacataaccaggccgtggattttgctgtccgtcaggtggaggcgctggcttccacacgggtgatgacggacggacagtcagaaacggtgctgaccggtaatctggtgatggcactgtttaaccatgacaccagtcgcgatcaggacccacagttacacacgcatgtagtggtggctaatgtcacgcagcataacggcgagtggaagacactgagcagtgacaaagtggggaaaaccggattttccgagaacgtgctagcgaaccggattgcgttcgggaaaatatatcagagtgagttacgtcagcgcgttgaggcgctgggttatgaaaccgaagtggtcggtaagcacggtatgtgggagatgccgggcgtaccggtggaggccttttccagtcgttcacaggctatcagggaggccgtcggtgaagacgcctcgctgaaatcccgggatgtggcggcactggatacgcgaaaatccaaacagcacgtcgatccggaaatcagaatggctgaatggatgcagacgctgaaggaaaccgggttcgacatccgggcatatcgtgacgcggcggatcagcgtgcggagatccgcacgcaggcgcccgggcctgcttcacaggacgggccggatgtgcagcaggcggtgacacaggcgattgccggattaagtgaacgaaaagtgcagttcacgtatacggacgtgctggccaggacggtcggcatactgccgccggaaaatggtgtgattgaacgggcacgcgccggtatcgatgaggccatcagccgtgagcagcttatccccctcgaccgtgagaaggggctgttcacatcaggaattcatgtgctcgatgagctgtccgtccgggcactcagtcgtgacatcatgaaacagaaccgggtgaccgtacatccggagaaaagtgtcccccggacggctggttacagcgatgcggtcagtgttctggcacaggaccgtccgtcgctggccattgtgtccgggcagggcggtgcagccgggcagcgtgagcgggtggctgaactggtcatgatggcccgggagcaggggcgggaggtgcagattatcgctgctgaccgtcgctcgcagatgaacctgaagcaggatgaacggctgtccggtgagctgataaccggacgtcgtcagctgcaggagggcatggtcttcacgccgggcagtactgttatcgtcgaccagggcgaaaaactctccctgaaagagacgttaaccctgctggatggtgccgcacgtcataacgtacaggtcctgataaccgacagcgggcagcgaaccggtacaggcagtgcgctgatggccatgaaggatgccggggtgaacacgtatcgctggcagggcggagaacagcgaccggcaaccatcatcagtgaaccggaccggaatgtccgctatgaccggctggccggagattttgcggccagcgtgaaagccggagaagagagcgtggcacaggtcagcggggtacgggaacaggccatactgacacaggccattcgcagtgagctgaaaacacagggcgtgctcggacacccggaggtgaccatgaccgccctgtcaccggtctggctggacagccggagccgttatctgcgggatatgtaccgaccggggatggtgatggagcagtggaacccggagacacgcagtcatgaccgctatgttatcgaccgggtgacggcgcagagtcacagcctgaccctgcgggatgcgcagggcgaaacgcaggtggtgcgtatttcctccctggacagcagctggtcgctgttccggccggaaaaaatgccggtggcagacggcgagcgactgagggtgacagggaaaattcccggactccgcgtctccggcggtgaccgcctgcaggtggcatccgtcagtgaagatgcgatgacggttgttgtgccggggcgggctgaaccggccaccctgcctgtggctgattcaccgttcacggcactgaagctggagaacggctgggtggaaacgcccgggcattccgtcagtgacagtgcgacggtgtttgcctccgtcacacagatggcaatggacaacgccaccctgaacggtctggcccgcagcggtcgtgatgtccggctgtattcctcactggatgaaacccgtactgcggaaaaacttgcccgccatccctcctttacggtggtttctgagcagataaaggcgcgggccggtgagacatcgctggaaaccgctatcagtctgcagaaaaccgggctgcacacgccggcacagcaggccattcatctggcccttcctgtgctggaaagtaaaaacctggccttcagcatggtggacctgctgacagaggcgaagtcgtttgctgcagaaggaaccggttttactgaactgggaggggaaatcaatgcgcagataaaacgcggtgacttactgtatgtggatgtggcaaaaggctatggcacaggcctgctggtttcccgtgcgtcgtatgaggcagaaaaaagtattcttcgccatattctcgaaggtaaggaggcggtcacgccgctgatggagagagtacccggcgaactcatggagacgttaacgtcgggacagcgtgccgccacccgtatgatactggaaacgtccgaccgtttcacggtggtacagggttatgccggtgtgggtaagaccacacagttccgggcggtgatgtcagccgtgaacatgctgccggcgagtgagcgtccccgagttgtggggctggggcccacgcaccgtgcggtcggtgagatgcgcagcgccggcgtggatgcacagacgctggcgtcctttctgcatgacacgcagctgcagcagcgcagcggagaaacgccggatttcagcaacacgctgttcctgctcgatgagagctcaatggtgggcaataccgacatggcacgggcatacgccctgattgcggccggtggcggtcgtgccgtggccagtggtgacacggaccagctgcaggccatcgcgcccggtcagcctttccgtctccagcagacgcgcagtgctgccgatgtggtcatcatgaaggagattgtgcgtcagacgccggaactgcgggaggcggtatacagcctgattaaccgggatgtggaaagggcactgtccgggcttgagagtgtgaaaccgtctcaggttccccgtcaggagggcgcatgggcaccggagcactccgtgacggagttcagtcacagccaggaagcgaaactggcagaagcgcagcagaaggcgatgctgaaaggtgagacttttccggatgtccccatgacactgtatgaagccattgtccgcgactataccggcaggacaccggaagcacgggagcagacgctgattgtcacgcacctgaatgaggaccggcgcgtactgaacagcatgattcatgatgcacgggaaaaggccggtgagctggggaaagagcaggtcatggtgcctgtcctgaacacagcgaatatacgtgacggggagctgcgtcgtctctccacctgggagaataacccggatgcccttgccctggtggatagtgtgtatcaccggattgccggtatcagcaaggatgacgggctgataaccctggaggatgcggaaggtaacacgcggctgatttcgccccgggaggcggtggctgaaggtgtcacactgtacaccccggacaaaatccgggtggggaccggcgaccggatgcgcttcacgaagagtgaccgggagcgcggttatgtggccaacagcgtctggacggtgacagcggtttccggtgacagtgtcacgctgtcagacggacagcagacccgggtgattcgccccggccaggagcgggcagagcaacatattgacctggcttatgccatcaccgcccacggtgcgcagggggcgagtgaaacctttgccatcgcgcttgaaggcacggaaggtaaccggaaactgatggccggctttgagtcagcctacgtggccctgtcgcgtatgaagcagcatgtgcaggtgtacaccgataaccgtcagggctggacggatgccattaacaatgccgtacagaaaggaactgcccacgatgtgctggagccgaaaccggaccgggaggtcatgaatgcgcagcggctgttcagtacggcacgggaactgcgggacgtggcggcaggccgtgccgttctccgtcaggcagggctggccgggggagacagccctgcacggtttattgcaccgggacgtaaatatccgcagccgtatgtggcactgccggcgtttgaccgtaacggcaagtcagctggtatctggctgaacccactgaccacggatgacggaaacgggctgcggggattcagtggtgaaggacgggtgaaaggcagcggggatgcgcagttcgtggccctgcagggcagccgtaacggagagagcctgctggctgataatatgcaggatggcgtccggattgcccgtgataatcctgacagcggtgtggtggtgagaattgccggtgaaggtcgtccgtggaatcccggtgccatcaccggtggccgcgtgtggggggatatcccggataacagcgtccagccgggggccggaaatggtgaaccggttacagctgaagtgctggcacagcggcaggctgaagaggccatccgccgtgaaacggaacgtcgcgcagatgaaattgtccgtaaaatggcagagaacaaacctgacctgccggacggcaaaacagagcaggctgtcagggagattgccggacaggagcgtgaccggactgccacttctgaacgggaagccgcgctgccggagagtgtgctgcgtgaatcacaacgggagcgggaagcggtccgggaggttgcccgggaaaatctgctgcaggagcgtctgcagcagatggagcgggatatggttcgtgacctgcagaaagagaaaaccctgggcggagactga

SEQ ID NO: 21444 - DNA, 546 bp, Escherichia coli
atggaagtcaacaaaaagcagctggctgacattttcggtgcgagtatccgtaccattcagaactggcaggagcagggaatgcccgttctgcgaggcggtggaaagggtaatgaggtgctttatgactctgccgccgtcataaaatggtatgccgaaagggatgctgaaattgagaacgaaaagctgcgccgggaggttgaagaattacggctggccagcgaggcagatcttcaccccggaacacttgaatttgagcgccatcgcctgactcgtgctcaggcgacggcgcaagaactgaaaaatgccaaagaatcggctgaagtggtggaaaccgcattctgtactttcgtgctgtcgcgtatagcaagggaaatatccagtattctcgacggtattcctctgtcggtgcagcgacgttttcctgagctggataaccggcatattgatttcctgaaacgggatatcatcaaagccatgaacaaagcagccgcgctggatgaactgataccggggttgctgagtgaatatatcgaacagtcaggttga

SEQ ID NO: 21445 - DNA, 327 bp, Escherichia coli
atggcgctgacaccggcagaacggcaaaggagacgcagggaacggttgaagaaggaaggcacatcaagacgggactggattctagaacctgacgagttacgtatgttgggggaaatttgtgtattgcgtagaccagggcgagttccatattcggagaacgaagtcattggtttgctgatcaggaaaaactataaggagctgcagaagcagctatctactacttgcccgcgatgtggtcaaaaaatgcctgtttcagaatgcatttttgatggcgaagggtcatgccaccttacaaccacgaggctgaaacttgcgctcaaagtgtga

SEQ ID NO: 21446 - DNA, 234 bp, Escherichia coli; identical to SEQ ID NO: 20521

SEQ ID NO: 21447 - DNA, 165 bp, Escherichia coli; identical to SEQ ID NO: 20520

SEQ ID NO: 21448 - DNA, 288 bp, Escherichia coli; identical to SEQ ID NO: 20519

SEQ ID NO: 21449 - DNA, 327 bp, Escherichia coli; identical to SEQ ID NO: 20517

SEQ ID NO: 21450 - DNA, 192 bp, Escherichia coli; identical to SEQ ID NO: 20516

SEQ ID NO: 21451 - DNA, 3996 bp, Escherichia coli; identical to SEQ ID NO: 20515

SEQ ID NO: 21452 - DNA, 597 bp, Escherichia coli; identical to SEQ ID NO: 20514

SEQ ID NO: 21453 - DNA, 249 bp, Escherichia coli; identical to SEQ ID NO: 20513

SEQ ID NO: 21454 - DNA, 711 bp, Escherichia coli; identical to SEQ ID NO: 20512

SEQ ID NO: 21455 - DNA, 291 bp, Escherichia coli; identical to SEQ ID NO: 20509

SEQ ID NO: 21456 - DNA, 660 bp, Escherichia coli; identical to SEQ ID NO: 20508

SEQ ID NO: 21457 - DNA, 243 bp, Escherichia coli; identical to SEQ ID NO: 20534

SEQ ID NO: 21458 - DNA, 204 bp, Escherichia coli
atgtctgaagcagccgtatcaactcttgaacaactcgattcaaatttgagagatattgacgccgttctggatctggttagcgtcaccctggcttctccagaagccagcctacatattggtgaggtttcacgactcatcaacatgtcgcgagagattgcccagcattgtcagaaaactatcgctgttgagcgttcacatcattga

SEQ ID NO: 21459 - DNA, 1122 bp, Escherichia coli
atgcgcatcgccgggttagcttacccaggcaaaaaaataatagctatgttcaaaaccactaatattcatggcgcgcaactcgtttgcgcagattctctgcaatttatcaaaaccatccctgataactcggtcaatttgattgcaacagacccaccatacttcggcgtaaaggctaacgcatgggataaccagtgggatagcgatgctgactttttggggtggattgatgaatttttggcagaattttggcggatattggcccctaatggcagcctgtatatgtttaccggctctcgccttgcgtcaaaaattgaattattaactcgcgaccgtttcaatgttctgaaccatatcatttgggctaaacccagtggtatgtggcgcggttgtcataaagaaagtttaagggcttattttcctgccactgaaagaatattatttgcagagcattacggcgcgtcaggttatgctaaaggtcagtcaggttatgcttcaaaatgtgcagatttaagaaaaaatattttttctccactaattgatgctttttcgctggctcgccgtcagttagatatatcagccgcagacattaattcagcaacaggaaagcagatgtgttcgcactggttttcttattcgcagtggcggcttccatcattaagtgattttaataaactatgcgaattatttcgcaggaaggcagattcactcggtgtcccgtgtccatatccttttaatgttgattattcagaacatgaaaagcgttatagcgatctgaaattgcgttatgaggaagtaaagaagcagtatgatgatttgaaggctcagtatgaaaatttgcgccgcccatttcatgttactgctgatgtaccttataccgatgtatgggagtttcctcctgtgcaatattatcctggcaagcacccatgtgaaaaacctgcagcgatgatggaacatattataaaaagtagttcccgccccggagatatcgttgccgatttctttatgggatcaggctctactattaaagccgcgctgaagttaggtcgtcaggcaatcggtattgagattgagggtgaacgttatcttcagacagttgatgaagtgaaaaagttatttgagtaa

SEQ ID NO: 21460 - DNA, 498 bp, Escherichia coli
atgcagtcatcattacgcaaagctgtcgcaactgctattggtggcggggctattgccatagcatctgtgctcatctctggtccgagcggcaacgatggtctggaaggtgtgagacataacccctacaaagacatcgttggtgtatggactgtatgttacgggcatacaggaaaagacattatgctcggtaaaacgtataccgaagcagaatgcaaagctctcctgaataaagaccttgctactgtcgccagacaaattaacccgtacatcaaagtcgatataccggaaacaacgcgtggtgctctttactcgttcgtttacaacgtgggtgcaggcaatttcagaacatcgacacttcttcgcaaaatcaaccagggcgatatcaaaggtgcatgtgatcaactacgtcgctggacatatgctggcggtaagcaatggaaagggctgatgactcgccgtgagattgagcgtgaagtctgtttgtgggggcagcaatga

SEQ ID NO: 21461 - DNA, 468 bp, Escherichia coli; identical to SEQ ID NO: 20547

SEQ ID NO: 21462 - DNA, 312 bp, Escherichia coli
atgaaaatttatattgccgggccaatgactggatatgagaactttaatcgtgacgcctttaataaagaggcagatcgtttgtcacgacatggtcactctgtcttgaatccagccactttgcctaatggtctgacacaacgtgaatacatggatatttgctttgcaatgcttcgttgtgctgatgctattttgatgcttcctggctggaaagcgtctgctggagcaactgctgagtatcattacgcatacaagatggagatgccggtattcactacgctgaattacccgccagcttgttcctctgtagcataa

SEQ ID NO: 21463 - DNA, 597 bp, Escherichia coli
atgaaagagttgcaaaaaattaattcaataatggaaagattaagtgctcttgagcgtaagctggacgattgtggaaagctgtgtgttgaaaagcaaaatgagctttaccgggaattttttacaatcgtaagtgagctgatgccaattgttaataactgcctgatgacatccagattttttaatgtcgatgctactacatccagaaaattttctgtgaaaattcaagaaagagtttctggtagtgtgacaagagagatggctgaacagttggtggcaatgagcaataaaacaaaaagaaaaaaggcattgcttgtaacagcaaatcagctttcagggcgcgttgactttcaggtcagacagggtgggcgtgtactggtaaatgatgcgttcgttggacgtagctttagtccttactcgataaaatatgatgttgatgcagatgatcaggatatcagcatttcctggaaatctgagacagcagggattgtattaacagcagagttgttgagtgatgataaaaatgatgtccagcatcatttggacgaaaagaatcatatttctgaaatttgtatgaagccacgcagcatcactaattaa

SEQ ID NO: 21464 - DNA, 177 bp, Escherichia coli; identical to SEQ ID NO: 20548

SEQ ID NO: 21465 - DNA, 546 bp, Escherichia coli; identical to SEQ ID NO: 21444

SEQ ID NO: 21466 - DNA, 237 bp, Escherichia coli
ttgaacagcgcggtaataccgcgctgttttttagccatcacaggggggatggagatgaaaaaaaatagcgatgaatatcagcgctggcagataacccaggccgataagagagaaaaagagagctatcaacgttctttccagaagtggaaaagtattatttttcagtctgttttcattggagttctggcgctttgcgtcattttagcgcttttacatgtatctggagatatacaataa

SEQ ID NO: 21467 - DNA, 438 bp, Escherichia coli
atgagtaaaattattgattttcctaccggaaaaaagagggagaaaagggccaaagcaatccgagcgcgtcgtaataaagaagcgcagcagcggagcgaaataaccccctcccaattttggtgggttaagaaaataaagttactcaccgtgattaaacagtcggcacgttttctcttaatatatttagggttattaactgccgacatccttatctatctcctttttattctaggaaaactcctaaaattctttacgatgattggtatcatcgcggtgcttctgtttctggtcgtggaatataggaatgattggcattatacgcaatctgcattccatgccgcagcaatatttgttggcctgatcgccctgcgcatcgggcatgacaaactactgaatggcctaataaggcttaaatcctatctatccagaaaagggtga

SEQ ID NO: 21468 - DNA, 318 bp, Escherichia coli
atgcggaagataataattgcatccgtggtgatactggcatcgtcttattccgttgccagcttcgcaaaagatccatgcaagacattagcttgcatggctgcaaaatcaggtggcgagtttgggagtgttggcgatagtgattgctctggtgctatcgctgacttcttcaatatcgtgaagaaaaacaagcatggctttcttcctaatcacacagcagatgcgcgtaaagaatttcttatggaatgttcaggcgcggagcagaataccgccgctgttagcagggttatttcaatgtttggacgtatcaggaaaggttaa

SEQ ID NO: 21469 - DNA, 438 bp, Escherichia coli
atggctattagcgaatcatctctaggcaagcagatacttgaaaagataaatgatcatgatcgtttaaattctaaattgcttttaaaaatgaaaattttaaacgtgcttgtgttcgttattctttttgcaataggagataagtttaacgaactagttatatgtgcgattgctttcgtggttttctttgtgctaaccggtgtgtatttgaagtgcaagatggttatttcatcgtcgttaatatttgattatttcgaacgtagtgctgttgacgaggggtttagaaacttttttatggggttatttaacagcaaaaggtttcttacgatccgggatgatagaaagaaaattcatgattatatttatgagcaagataagaagtttgaagaattgaagaaaatagaaactattaatcatggtatgaatggacgtagtgagtaa

SEQ ID NO: 21470 - DNA, 282 bp, Escherichia coli
atgaaagatttaacactcaaatttgccgacagggccgacttttcggcctttatggagagtattggctattatgatgacgagtcgatgcaggatgatattcttattgacgtgataggtaacgtgtacaaagaaaccggagaactgactgaagatggcgaaccggtatgtgttaaggaagacggatattttgtaaacgtgcgcatcattaatgattcgcaaatatcgtcattattcgatgaatacgtggttgctgttgagcatcaacttcgtggctggatgtga

SEQ ID NO: 21471 - DNA, 990 bp, Escherichia coli
atgaaacaacgctctcttctaaaaaatgctccggatattaatcgcattatgagtaataatcatcatgcacctgaacatcagccggtatcacctatggttggtgatttaaaacgtcaactgagttcattaaccggtaatagcataactttgccagtatgcggacgtaatgttaactttaagttagagacgatccccgcagataaagtagaaatggcaacaatggtatggctaggtaatgagcgtgatcaagatttattaaatgaatcttctctagctgatttaattccatcttttctaacttctgggcaacaaaatccggctttcgcaagaaaagtgtcaggtattgttgaagtagctgatggttctcgaagacgtaaagcagccattataactggatgcgattatcgtgttcttattggcgatttagatgatgaacaaatgcaatggttatcgcagataggcaacgactatagacctatcagcgcctatgaaagggggaaaagatacctgcgaaggctccatgaatttgacggtaacgtaaaatctttagctgaagccgaaggcgtggatagaaatattatcagccgatgtattaatacagccggtttacctaaagatatattggcaatatttaaccatcctggtgagttatcagccagagcaggagacgctctttttaaagcatatcagggacaggaagcagccatgaaaaatgctgcatctcagttgctgaggatgaaaaaatcaggtgaaagtttagatgcgcaaagaataatacaggctcttcatgatttcattattgttgagaaaaacaattcacatggagagaaaagggaaaagaaatatggagacggtgttgtggcgaaatatgggaaaaatttcacaacattaaaattagataacagaaaaataccatcgcacctaatgagtaaaattgaatctattcttgaggaggcgtttggaaattcttccgatgtaaaaaataactaa

SEQ ID NO: 21472 - DNA, 1170 bp, Escherichia coli
atgtctttgaaaaagttattacaagattgtgttacgcgcggtcaagaaatgacccaagcaattgctatagctcaattcggtgatgatagtcctgaagctcggcgtatcacgcgtagatgggggataactgaagtagcagatttaattggtgtaactcctcaagcaataagagatgctgagaagaacgggcgtttacctgcacctgactttgaaatgagaggaagagttgaacgtcgtgccggttataccatagatcaaatcaatagtatgcgagctgtttttggcaacccaaaccaacggccacaagataaaaacccagttgtgcttgctgttatgtcacacaaaggcggagtttataaaacatcgtctgcagtacatcaggcacaatggctagcattacaaggtcatcgtgttcttttagttgaaggtaacgatcctcagggaacagcctccatgtatcacggttatgtacctgatttacatatacatgccgaggatactttactgccattttacttgggcgaacgcgataacgctgaatatgctataaaaccaacatgctggcctggactggacattattcctagctgcctagctttacaccgtatagaaacagatctcatgcaatatcatgctcagggtaaattgcctcaccctcctcacctgatgctacgcgcagctatagaatcagtttgggataactacgatgttatcgttatagatagtgctccaaacctcggtacaggaaccattaacgttgtttgcgcagctgacgttatcgttgttgctacccctgcagaattatttgattacgcctctgttctacagtttttcacaatgcttctcgatctcctagaaagcgttgacctaggcggatttgagccgaccgttcgcttgcttctgactaaatatagtctcactacaggaaatcaatcacgatggatggaagagcaaataagaaatacatggggatcaatggtattacgtcaggttgtacgcgttaccgatgaagtaggtaaaggtcagataaaaatgcgaacagtatttgaacaagcggcaaaccagcgttcaacacttaatgcatggagaaatgccgtctctatatgggaccctgtttgtcgagaaatttttgatgatctaataaaacctctctgggagaacgaagaatga

SEQ ID NO: 21473 - DNA, 1170 bp, Escherichia coli; identical to SEQ ID NO: 21472

SEQ ID NO: 21474 - DNA, 990 bp, Escherichia coli; identical to SEQ ID NO: 21471

SEQ ID NO: 21475 - DNA, 783 bp, Escherichia coli
ttgatttgccgttttatcgatacccactgccattttgatttcccgccgtttagtggcgatgaagaggccagcctgcaacgcgcggcacaagcgggcgtaggcaagatcattgttccggcgacagaggcggaaaattttgcccgcgtgcaggcgttagcggaaaaatatcaaccgctgtatgccgcattggggttgcatccggggatgttggaaaaacatagcgatgtgtctcttgatcagctacagcaggcgctggaaaggcgtccggcgaaggtggtggcggtgggggagatcggtctggatctcttcggcgacgatccgcaatttgagaggcagcagtggttactcgacgaacagctgaaactggcgaaacgctacgatctgccggtgatccttcattcccggcgtacacacgacaaactggcgatgcatcttaaacgtcacgatttaccgtgcactggcgtggttcacggtttttccggcagcctgcaacaggccgagcggtttgtacagctgggctacaaaatcggcgtaggcggtactatcacctatccacgcgccagtaaaacccgcgatgtcatcgcaaaattaccgctggcatcgttgttgctggaaaccgacgcgccggatatgccgctcaacggctttcaggggcagcctaaccgaccggaacaggctgtgcgggtgtttgacgtgctttgcgagttgcgcccggaaccagaagatgagattgccgaagtgttgcttaataatacgtatgcgttgtttagcgttagtgggtag

SEQ ID NO: 21476 - DNA, 606 bp, Escherichia coli
atgactatgacaagactgaagatttcgaaaactctgctggctgtaatgttgacctctgccgtcgcgacaggctctgcctacgcggaaaacaacgcgcagactaccaatgaaagcgcagggcaaaaagtcgatagctctatgaataaagtcggtaatttcatggatgacagcgccatcaccgcgaaagtgaaggcggccctggtggatcatgacaacatcaagagcaccgatatctctgtcaaaaccgatcaaaaagtcgtgaccctgagcggtttcgttgaaagccaggctcaggccgaagaggcagtgaaagtggcgaaaggcgttgaaggggtgacctctgtcagcgacaaactgcacgttcgcgacgctaaagaaggctctgtgaagggctacgcgggtgacaccgccaccaccagtgaaatcaaagccaaactgctggcggacgatatcgtcccttcccgtcatgtgaaagttgaaaccaccgacggcgtggttcagctctccggtaccgtcgattcccaggcacagagcgaccgtgctgaaagtatcgccaaagcggtagatggtgtgaaaagcgttaaaaatgatctgaaaactaagtaa

SEQ ID NO: 21477 - DNA, 678 bp, Escherichia coli
atgaagtgggactggattttctttgatgccgatgaaacgctgtttacctttgactcattcaccggcctgcagcggatgtttcttgattacagcgtcacctttaccgctgaagattttcaggactatcaggccgttaacaagccactgtgggtggattatcaaaacggcgtgatcacttcattacagcttcagcacgggcggtttgagagctgggccgaacggctgaacgtcgaaccgggtaaactcaacgaggcctttattaatgcgatggcggaaatctgtacgccgttgccgggggcggtttccctgcttaacgccattcgtggcaacgctaaaatcggcatcatcaccaacggctttagcgccttgcagcaagtgcgtctggaacgcacgggcctgcgtgattacttcgatttgctggtgatttccgaagaagttggcgttgccaaaccgaataagaaaattttcgattatgcgctggaacaggcgggcaatcctgaccgttcacgcgtgctgatggttggcgacactgccgagtccgatattctcggtggcatcaacgccgggcttgcgacctgctggctgaatgcgcaccatcgcgagcaaccagaaggcatcgcgcccacctggaccgtttcttcgttgcacgaactggagcagctcctgtgtaaacactga

SEQ ID NO: 21478 - DNA, 447 bp, Escherichia coli
atgaacacgatttcttccctcgaaacgactgatttaccagcggctttccacattgaacaacgcgcccacacctttccgtggagtgaaaaaacctttgccagcaaccagggcgagcgctatctcaactttcagttaacgcaaaacggcaaaatggcggcgtttgcgattacgcaagtggtgctggatgaagctacattgttcaatattgcggtcgatcctgactatcagcgtcagggactgggaagggcgctgctggaacatctgatcgacgaactggaaaaacgcggcgtggcgacgctatggctggaagtccgtgcctcaaatgctgccgccattgccctgtacgaaagtttaggctttaacgaggcgacgattcgccgcaattactaccccaccacggacggtcgcgaagacgccatcatcatggcgttaccaatcagtatgtaa

SEQ ID NO: 21479 - DNA, 414 bp, Escherichia coli
atgacatcccgacgagactggcagttacagcaactgggcattacccagtggtcgctgcgtcgccctggcgcgttgcagggggagattgccattgcgatcccgccacacgtccgtctggtgatggtggcaaacgatcttcccgccctgaccgatcctctggtgagcgatgttctgcgtgcgttaaccgtcagccccgatcaagtgctgcaactgacgccagaaaaaatcgcgatgctgccgcaaggcagccgctgcaacagctggcggttgggtactgacgaaccgctatcactggaaggcgctcaggtgacatcaccggcgctcaccgaattacgggcaaacccaacggcacgcgccgcgttatggcaacaaatttgcacatatgaacacgatttcttccctcgaaacgactga

SEQ ID NO: 21480 - DNA, 1032 bp, Escherichia coli
atgtctgcatttaccccggcaagtgaagtcttgctgcgtcacagtgatgatttcgaacaaagccgtattctgtttgccggagacttacaggatgacctgcccgcgcgtttagataccgcggccagccgtgctcatacccagcaattccaccactggcaggtgttaaaccgccagatgggggataacgcccgttttagcctggtcgccacggcggatgatgtcgctgattgcgatactttgatttactactggccgaagaataaaccggaagcccagttccagttgatgaatttactttctctgcttccggtgggcacggatatttttgtcgttggcgagaaccgcagcggcgtgcgcagcgccgagcagatgctggccgattatgcgccgttgaataaggtagacagcgcccgtcgctgcggcctctattttggtcgtctggaaaagcagccggtatttgatgccaataaattctggggcgaatacagcgtcgatggcttgacggtcaaaacgctgccgggcgtgtttagccgcgacggtctggatgtcggcagtcagttgttgctctcgacgctaaccccgcacacgaaaggtaaagtgctggatgtcggctgcggcgcaggcgttctttccgttgcttttgcgcgccattcaccgaagatccgcctcactctgtgtgatgtttctgcaccagcggtagaagccagtcgcgcaacacttgctgccaacagtgttgaaggtgaagtctttgccagcaacgtcttttccgaggtgaaaggtcgttttgatatgatcatctccaacccgccgttccacgatgggatgcaaaccagcctggatgcggcgcaaacgctgattcgcggcgcggtgcgtcatcttaatagcggcggcgagctgcgaattgtagcgaacgccttcctgccttacccggacgtgctggatgagacatttggtttccacgaagtgattgcgcaaaccgggcgcttcaaggtgtatcgcgccattatgacccgccaggcgaagaaaggttaa

SEQ ID NO: 21481 - DNA, 651 bp, Escherichia coli
atgaatgcacgaaaagcggtactggcagacaatccggaattgatcctgcgtgtgctacaactgagatttgacgagtcactgtcgtacccgcgcatttctgcgcagaccggtatcagcaaaaccgccattttttctctggtgaggcgatttcaccaggtattcactgactggcctctttccggagaatattcctgcgtgcaactggcccgggctctgttcccggggcgatacccttcagccccgacagtaactcagactgtgaaaacagagaaaaaccgccggaaccgattttcaccggagtttaaatggagacttgttcagcaaactcttttacccggtgcctgtgtcgcacaaatagctcgtgagaacggaatcaacgataaccagctctttaactggcggcatctctggcgtaacggcggcctgcagccgaccggcgaacatgaaacatcgctacttcccgtgacgttaactccggagccggataataaaatcccggcaccagtgcagatacctgaacagataaatacaccgcccgacagtctgtgctgtgagctggttctgccggccggaactctcaggctgaaaggtgaactgacaccggcgttattacagacacttatccgcgaaatgaaagggagcagccactaa

SEQ ID NO: 21482 - DNA, 234 bp, Escherichia coli
atgacggagctggaaagacatttgctgaacgcattagagcaactgcaacaggactatatgcagcggctgaacgaatgggagagcgccttcgtggaattgcagaaaatgttttcgcttacgcaacgggacaacgcgatgctgaacgagcgggtcatgcagttgagtcagcaggtgcagcacttgagcgagcagacagaacgcttgagccagttatacagcgagaacaggagataa

SEQ ID NO: 21483 - DNA, 531 bp, Escherichia coli
atgagcaatcttttacagacgggcgcggagttcgagaaaaagctgaaagagagagccgaatctacagagacaatgctgaacgacgagttcagcaagctcgaaaaatctgtaagcaaggctgtgacatcaaacgagacgaaaatcaaagacgctatagccctgttcacagcttcgacagaggaatcactgaaaaaacaccgggaaggggtgaaagaggcgatgatgcagcacaggaaggacgtgttaaagctggcagggaatacgggcatgatgttactggggatggtcattttcctgtttaccgtgagtggcgggacgctctggtatcttggcgggatgatacaggcgaacctggaagaaatcaggaagcagaacgagaatctggagaagctgaacgcgaagacatggggcgtgcgttatcacgaggggagcaacggacgttttctggtgttgcccgaggggatgaaagccgaaacgaactggacgatggaaaacgggaaacagaatgccgtaaggctggtacaggagtaa

SEQ ID NO: 21484 - DNA, 339 bp, Escherichia coli
atgaaacgcgagaggatgctcacgatacgggttactgatgatgaacatgcccggttactggaacgctgtgagggtaaacagctggcggtatggatgcggcgggtctgtctgggtgagccggttgcccgttccgggaagctgccgatactggcaccgccgttactgcgccagctggctgccatcgggaataacctgaatcagacggcgaggaaggtgaacagcgggcagtggtcttccggtgaccgggttcaggtggtggccgcactgatggccatcgagagagagttgcgcagcttacggcaggtcgtcagggaacatggagcgcgggatgatagttaa

SEQ ID NO: 21485 - DNA, 192 bp, Escherichia coli
gtgactaaacaggaaaaaaccgcccttaacatggcccgctttatcagaagccagacattaacgctgctggaaaagctcaacgaactggacgcggatgaacaggcagacatctgtgaatcgcttcacgaccacgccgatgagctttaccgcagctgcctcgcacgcttcggggatgacggtgaaaacctctga

SEQ ID NO: 21486 - DNA, 543 bp, Escherichia coli
gtgaaaacgggggctgaagccatccgggcgctggccacacagctcccggcgtttcgtcagaaactgagcgacggctggtatcaggtacggattgccgggcgtgatacaggtgaaacggaattatcagcccgtcttaatgaaccgctggcaaatggtgctgtgatccatatcgtgccgcgtctggcaggagccaaaagtggcggtgtgtttcaggctgtgctgggggcggctgttatggcggttgctatatggatgccgggggtaggaattatggcgagtaatctgctgttttctctcggtgccagtatgacgcttggcggtgttgcacagatgctggcccctaaacccagaaccccccgcacacagacaacggataacggcaaacagaacacctatttttcttcactggataatatggttgcccagggcaatgttctgcccgttctgtacggtgaaatgcgcgtgggatcacgtgtggtatctcaggagatcagcacagcagatgaaggtgatggtggtcaggttgtggtgattggtcgctga

SEQ ID NO: 21487 - DNA, 201 bp, Escherichia coli; identical to SEQ ID NO: 8703

SEQ ID NO: 21488 - DNA, 1287 bp, Escherichia coli; identical to SEQ ID NO: 5876

SEQ ID NO: 21489 - DNA, 207 bp, Escherichia coli; identical to SEQ ID NO: 12686

SEQ ID NO: 21490 - DNA, 420 bp, Escherichia coli
atgctctttgccgcgctcatcgtcgaggcggattttgttgttcgccggggtgcgcagcacgttacgcttgtagttctgaatggtcacatggtcggtgtgtgccgagtcgtgttttaccccggcgatataaggtcggtccgggttgccttcctcaaaggcgatgctgacttccgttcccgccagcagcggcagatgcaggccatacgtgtcacctgcatacgggcgcgactggcgcacccacaggctttcataacccggtttccacgtatcgcggtcaaagtcgaggttgacccggtagcgcccgtccttgtcgatatgggcatagatatcgtttttcaccgtgctggtgacccgcgccgggagtgtgccggccattaccgggcgggggataagcgccgggcggtagccgtagcgctctga

SEQ ID NO: 21491 - DNA, 456 bp, Escherichia coli; identical to SEQ ID NO: 7975

SEQ ID NO: 21492 - DNA, 366 bp, Escherichia coli
atgtctatccatttttgctgggattcagtgattgataaaaaagtgtatgaaacctggataacactggcggcagacgtctggaaattgatgctcacaccttattcaccaccaggcggtggcagtgaaaagtattatctgcggtatctgttaatcgggctggctccggaagggaaaataggagtgtggctggagaaacctgacaagcccaatattcgcctgacggataagcagattctgatagaaacggtttcaggtgaaaaaatggaaatgtgtaacggccgaagtgcctataaacatgggtattcttatccggaaagtacaaaaaactttatcaaagataaaaaatatccctatggtaactggtaa

SEQ ID NO: 21493 - DNA, 669 bp, Escherichia coli; identical to SEQ ID NO: 5498

SEQ ID NO: 21494 - DNA, 333 bp, Escherichia coli
atgacgagcaaagaaacctttacccattaccagccgctgggcaacagtgacccggctcataccgcaaccgcgcccggcggattgagtgcgaaagcgcctgcaatgaccccgctgatgctggacacctccacccgtaagctggttgcgtgggatggcaccaccgacggtgctgccgttggcattcttgcagttgctgctgaccagaccagcaccacactgacgttctacaagtccggcacgttccgttatgaggatgtgctctggccggaggctgccagcgacgagacgaaaaaacggaccgcgtttgccggaacggcaatcagcatcgtttaa

SEQ ID NO: 21495 - DNA, 357 bp, Escherichia coli
atgtcagcaggaagtcagtataacccttatctgaaaatttcgtatcaggcaacgccagatcttaatctggccttacgctatcgctatgactggaaagctttccgacagacggatttagatggcaacagggcgcgtaatgatcagcatcagtttgatggttatgtgacatacaaaattaatgattcatggttgtttgcatggcagaccactgaaaatgcatttgttctgcaatataaaatgtcaccggtgttcaccccatatatagaatatgattacttggataaacaaggggtgtataaggggaaagataataaacatgaaaatagttaccgtgtcggtgttctgattaatttttaa

SEQ ID NO: 21496 - DNA, 396 bp, Escherichia coli; identical to SEQ ID NO: 7583

SEQ ID NO: 21497 - DNA, 465 bp, Escherichia coli
atgagctactccacggcacgggccagtgcgaacgagtcgtgggcgtactttatggggcggcgaaaattcgtcgcatcccgtcaggcgagccagatgtttctgtgctggctggaagaggccatcgctcgccgcgtggtgacgttaccttcaaaagcgcgcttcagttttcaggaagcccgaagtgcctgggggaactgcgactggataggctccggtcgtatggccatcgatggtctgaaagaagtacaggaagcggtgatgctgatagaagccggactgagtacctacgagaaagagtgcgcaaaacgcggtgacgactatcaggaaatttttgcccagcaggtccgtgaaacgatggagcgccgtgcagccggtcttaaaccgcccgcctgggcggctgcggcatttgaatccgggctgcgacaatcaacagaggaggagaagagtgacagcagagctgcgtaa

SEQ ID NO: 21498 - DNA, 354 bp, Escherichia coli
gtggctgatttcgataacctgttcgatgctgccattgcccgcgccgatgaaacaatacgcgggtacatgggaacgtcagccaccatgacatccggtgagcagtccggtgcggtgatacgtggtgtttttgatgaccctgaaaatatcagctatgccggacagggcgtgcgcgttgaaggctccagcccgtccctgtttgtccggactgatgatgtgcggcagctgcggcgcggcgacacgctgaccatcggtgaggaaaacttctggatagaccggatttcgccggatgatggcggaagttgtcatctctggcttgggcgtggtgtgccgcctgccgttaaccgtcgtcgctga

SEQ ID NO: 21499 - DNA, 321 bp, Escherichia coli
atgatcccgggcggcccattcacgtttccacaatgcctgttcagcggtctgaatcagggacgccagcagttcagccggaacggtcacctggcggttttcgctcacgttgctgataatctccatcgccgcggcggaagaaataccggactcaatccgctggtcttccgggatgtcctccaggcgcgccaggacggtcctgatttcatgatcggacagggaaatatccattccgtcagcgagggcctgaatctcttccggggaccagataaccagcatcagcggcatgtctcccggatactttactgccagctcccggcatag

SEQ ID NO: 21500 - DNA, 435 bp, Escherichia coli
atgtacggaacatgcgaaacgctatgccgggagctggcagtaaagtatccgggagacatgccgctgatgctggttatctggtccccggaagagattcaggccctcgctgacggaatggatatttccctgtccgatcatgaaatcagaaccgtcctggcgcgcctggaggacatcccggaagaccagcggactgaatccggtatttcttccggcgtggcgatggagatcatcaataacgtgagcgaaaaccgccaggtgaccgtccctgctgaactgctggcgtccctgattcagaccgctgaacaggcattgtggaaacgtgaatgggccgcccgggatcatggcctcgccgtcccggaatgcgtcacccgccgtcaggcggtgattaatcaggcccgcaccctgctgaaaaacaacagacacgaaaacgactga

SEQ ID NO: 21501 - DNA, 435 bp, Escherichia coli
atgtacggaacatgcgaaacgctctgccgggagctggcagcgcagtatccgggagacgcgccgctgatgctggttgtctggtccccggaagagatccaggccctcgctgacggaatggatatttccctgtccgatcatgaaatcaggaccgtcctggcgcgcctggaggacatcccggaagaccagcggattgagtccggtatttcttccgccgcggcgatggagattatcagcaacgtgagcgaaaaccgccaggtgaccgttccggctgaactgctggcgtccctgattcagaccgctgaacaggcattgtggaaacgtgaatgggccgcccgggatcatggcctcgccgtcccggaatgcgtcacccgccgtcaggcggtggttaatcaggcccgcaccctgctgaaaaacaacacacgcgaaaacgactga

SEQ ID NO: 21502 - DNA, 531 bp, Escherichia coli
atggcacacgcacttaagctcggtgataaaatgatttcaatcaatctattacctatgaccctggttaacgagcctgacgcagtctcttttttacttgatgaaataaaggccaatgctctggtgcctgaacaaatcatcgttgaatttactgaaagtgaagtcatatctcggtttgatgagtttgccgaagcggttaaatcgctaaaggctgccggtatcagtgtagcaattgatcattttggcgcaggttttgctggtttgttactcctgtcacgcttccagcctgacagaattaaaatcagtcaggaattgattaccaacgttcataaaagcggaccacggcaggcaattatccaggcgatcatgaaatgctgtacatcacttgaaattcaagtctctgctatgggcgtggcaacaccagaagagtggatgtggcttgaatctgcaggaattgagatgtttcagggagatctgttttccaaagctaaattgaatggtatcccttcagttgcgtggccggagaaaaaataa

SEQ ID NO: 21503 - DNA, 357 bp, Escherichia coli; identical to SEQ ID NO: 21495

SEQ ID NO: 21504 - DNA, 246 bp, Escherichia coli; identical to SEQ ID NO: 4533

SEQ ID NO: 21505 - DNA, 357 bp, Escherichia coli
atgttgaccttgcctgcagcaacgccgttcacggtgatggtcataccgctgaccgacacggtggcttttgttttatccgcagacaccgcacggaagctcttgtcggttgcgccctccggctggaatgccacggtcagcgtagtgctctgccctttcactacggaagcactggcgggtgtcaccgtcatgccggttgtcgccgtcaccgtgctgcgatcttctgccatcgacggacgtcccacgttggtgactttcaccgtgcgggtgatcacttccttcgccgtcaccgccttaccgatactgctgacccagccgcggaacacatcgaccgtgccgttcgggaagcggattttatag

SEQ ID NO: 21506 - DNA, 282 bp, Escherichia coli
atgtccccggtgcaggatgtgtcgccagaaatactcatccacagacagggcccggtcatcggctttaatcagccacagcaccaggtccagttcaggcagaatgtcacggtacagggcttcatactctgcatccctgtcccggctctcgcccaccccgggcaggtcagtgataaccatgctgtaaccgtgaccactcagacggaagcgctgcacttcccgggtgccggcgtgaacatcactgaccggtgtgacctccccctgaaacagggcattacagagtga

SEQ ID NO: 21507 - DNA, 900 bp, Escherichia coli
ttgaaaaaactgaaactgcatggctttaataatctgaccaaaagtctgagtttttgtatttacgatatctgctacgccaaaactaccgaagagcgcgacggttatattgcttatatcgatgaactctataatgccaaccgtctgaccgaaatcctgtcagaaacctgttccattatcggggccaatattcttaacatcgcccgccaggattacgaaccacaaggtgccagcgtcactattctggtgagtgaagaaccggtcgacccgaaacttatcgacaaaacagaacaccccggcccactgccagaaacggtcgttgcccatctcgataaaagtcatatttgcgtacatacctacccggaaagtcatcctgaaggcggtttatgtaccttccgcgccgatattgaagtctctacctgcggcgtgatttctccgctgaaggcgctgaattacctgatccaccagcttgagtccgatattgtgactattgattatcgcgtgcgcggttttactcgcgacattaacggtatgaagcactttatcgaccatgagattaattcgattcagaactttatgtctgacgatatgaaggcgctgtatgacatggtggatgtgaacgtctatcaggagaatatcttccataccaagatgttgcttaaagagttcgaccttaagcactacatgttccacaccaaaccggaagatttaaccgacagcgagcgccaggaaattaccgctgcgcgtggaaagaaatgcgcgagatttattacgggcgcaatatgcccgctgtttaacgtctcaggcggagcacggaggctccgcctgatttacttacttctgctgcacgaaattacggtaagccgccaccacctgaagaaaatcctcaacgccacacagtga

SEQ ID NO: 21508 - DNA, 1449 bp, Escherichia coli
  misc_feature (1404)..(1413): n is a, c, g, or t
atggtcaaaccaaactgggataactttaaagctaaatttagtgagaatcctcaaggtaattttgagtggttttgctacttgttgttctgtcaagaattcaaaatgcccgcaggtatatttagatataagaatcaatctggtatcgaaactaatccaataaccaaagataatgaaattatcggttggcaatctaaattctatgacacaaaattgtcggataacaaagctgatcttatagaaatgattgagaaaagcaaaaaggcttatccaggattaagtaaaatcattttctatactaatcaagagtgggggcaggggagaaagtcccatgaacctgaaggcgataagaacgctgataattatttggaaactgtcggaaatagtaacgatcccaaaataaaaattgaagttgatcagaaagcatatgagtcgggtatcgaaatagtatggagagttgctagtttttttgaatcaccgtttgtaatagttgagaatgaaaagattgctaaacatttcttctcccttaatgaaagcatctttgatttattagaagaaaagcgcaagcacacagaaaatgttttatatgaaattcaaaccaatatagagttcaaagacagaagtattgaaattgacagacgacattgtatagaacttctacatgagaatctagttcagaaaaaaattgtcatcgtcagcggagaaggtggggttggaaaaacagcagttatcaaaaaaatttatgaagcagaaaaacaatacactcctttctatgtctttaaggctagcgagtttaaaaaggacagtattaatgagctattcggtgcgcatggcttagacgatttctctaatgctcatcaagacgaattacgtaaagtcatagtcgtagattctgctgaaaagcttttagaactgaccaatatcgatccttttaaagaattcctgactgttttaataaaggataaatggcaggttgttttcacaacccgtaacaactacttggcagatctgaactatgctttcatagatatttataatataactcctgaaaacttagtaataaagaaccttgaacgcggcgagctaatagagttatctgataacaatggatttagccttcctcaagatgttcgattattagaactaatcaaaaatccattttatctaagtgaatatttgaggttctataccggtgaaagcatcgattatgtgagcttcaaagaaaagctttggaataagattattgtcaaaaataaaccttctcgggagcagtgtttcttagcgactgcttttcagcgggctagtgagggccaattttttgtctccccggcatgtgatactggaattttagatgagttagttaaagacggaattgtcggctatgaagctgctggttacttcattacnnnnnnnnnntcattacacatgatatatacgaggaatgggcattag

SEQ ID NO: 21509 - DNA, 747 bp, Escherichia coli
atgaaatcattgagtaagtcgtcacaaataccgctctatcaacaagtggtggagtggataagagaaagtatttataccggggatctggtggaagacgatcgcattccttcggaataccagattatggatatgctggaagtgagtcggggaaccgttaaaaaagcggtcgcccaactggtaaaagaaggcgtgttgattcaggttcaggggaagggaacatttgtcaaaaaagagaacgtggcatatccgttaggtgaaggattattgtcattcgcggaatcgctggaaagccagaaaatacattttaccactgaagttattacgtcacggattgaaccggctaatcgttatgtggcagagaaattaagaataacgcccggtcaggatattctttaccttgagcgtttacgttcaattggtgatgaaaaagcgatgctgatagagaaccgtatcaatattgagctatgccccggcatcgtggaaatcgattttaatcaacacaatttatttccaacaatagaaagtttgtcgcaaagaaaaattcgttactcggaaagtcgctatgccgcgcgattaattggtaatgaacgcggtcattttttagatatcagtgaagatgcacccgttttgcatctggagcagttagtctttttctcccgcggattacccgttgagtttggcaacgtctggttaaaaggaaataaatactatcttggcaccgtgctgcaacggcgggaagtgagttaa

SEQ ID NO: 21510 - DNA, 477 bp, Escherichia coli
atgggattgctggctaatcatgccggattaaacgggctgttacaggcgttacgcgaaatggtggcctctccgcatgttgagctggcagtgcatttatttgctgatttagccctcgccacgtccttcctcggcgtagcgttaggcttatttgattatctggcagatttgtttcagcgttcaaataccgttggtggacgattgcaaactggtgcaattacctttctgccgccactggcgtttgcactgttttatccacgaggatttgtgatggcgctgggttacgccggtgtggcactggcggtactggcattgattatcccttcgctgttgacctggcaaagcaggaagcacaatcctcaggcgggttaccgggtgaaaggtggtcgtccggcgctggtggtggtgtttctctgtggtattgctgtgattggcgtgcaatttttgattgcggcaggcttgttaccagaagtggggtga

SEQ ID NO: 21511 - DNA, 1056 bp, Escherichia coli
atggtttttttcctgttgtcgttaggtatctgtgtcgcactggtagcgttttcaagtcttgaaacacgtcttcctatgagtaaatcgcgcattttgctcaatccacgcgatattgacattaatatggttaataagagttgtaacagctggagttctccgtatcagctctcttacgcgataggcgtgggtgatttggtggcgacatcacttaacaccttctccacctttatggtgcatgacaaaatcaactacaacattgatgaaccgagcagttccggtaaaacattatctattgcgtttgttaatcagcgccaataccgtgctcaacaatgctttatgtcggtaaaattggtagaccatgcagatggttcaaccatgctggataaacgttatgtcatcactaacggtaatcagctggcgattcaaaatgatttgctccagagtttatcaaaagcgttaaaccaaccgtggccacaacgaatgcaggagatgctccagcaaattttgccgcatcgtggtgcgttattaactaatttttatcaggcacatgattatttactgcatggtgatgataaatcattggatcgtgccagtgaattattaggtgagattgttcaatcatccccagaatttacctacgcgagagcagaaaaagcattagttgatatcgtgcgccattctcaacatcctttagacgaaaaacaattagcagcactgaacacagaaatagataacattgttacactgccggaattgaacaacctgtccattatatatcaaataaaagcggtcagtgccctggtaaaaggtaaaacagatgagtcttatcaggcgataaataccggcattgatcttgaaatgtcctggctaaattatgtgttgcttggcaaggtttatgaaatgaaggggatgaaccgggaagcagctgatgcatatctcaccgcctttaatttacgcccaggggcaaacaccctttactggattgaaaatggtatattccagacttctgttccttatgttgtaccttatctcgacaaatttctcgcttcagaataa

SEQ ID NO: 21512 - DNA, 123 bp, Escherichia coli
atggaaaacaagtctgctcgtgcaaaggtccaggcttttgggggctttttgactgcaatggtcatccccaatatcggtgcttttattgcctggggatttatggtaatggtgccaacttactga

SEQ ID NO: 21513 - DNA, 495 bp, Escherichia coli
atgatagcgttcagacttagtgatgatgagttaaaacttgcagaacataacgctattttaagtggatttaccagtgtcaatgcttttgctaagcataatgtgcttaatattgaaaccaagcctgttaatattccagttaataatgaagcagcaaagctggtatcagtgcgcctttaccctcatgaaatagaacttgttaaacgtaatgctgtccttcacggcatgagcatgagcagagaaattgctattcgtgtgcgtcagtctttgttaaaaaatgaagtctgtctttatcctgatgagattaaagaaatcaggagacttaaaacggaaattaacaaactcggacgcaatgttcattatatcattagtggtgacagattttgtattgttaacgatcctgaattcagaaaggaaattaatgatgcgcttaatatttgtcagcaaacagcgaaacagttagaaactctggtgactgctgtagtgaacagattttga

SEQ ID NO: 21514 - DNA, 327 bp, Escherichia coli
atgaagcgcatgaaaatgatatatggaattacagtcagaggaagtaatttggtctggtgtcaagacatttctctttctctgcaagaaaatcccagatttggtgattttcccgagtgtgtaacaatggattcttttaaaattgaaaaacgtatactggaagatgaattactctatcaggtgttctatctgaaagaacgtgattttataaatatatttgctgaattttcaataaaagaggattcagacctgacagacctttaccacgaattaatgactgacggtaaaaatcctgactattttattgcatttcggaactttggaggttaa

SEQ ID NO: 21515 - DNA, 216 bp, Escherichia coli
gtgttcagtgctctggcagggggaaggtactctacatccaacaatgtgagagagctgttgcgacaggcgatgtatgagcaagcaatggtgacttcctccagtgttaacctggagaaacggatgattaacctgttaatcatcgttctcagagctgtggtcgccgttgcaaacgcgctgattgcaattctggaactgattcgccagttcatcgactga

SEQ ID NO: 21516 - DNA, 180 bp, Escherichia coli
atggattttatgagcattttggggcgctgcttacttcttcctttccctgttgcgatgtttgtcggttgcctgtttcctggcatcgatgatcgcttatccggaatgcttatgagtgttgctgtgggatgtttatcctggtatgtcaccagaccgaaggaccaacagacaaaggccgcgtaa

SEQ ID NO: 21517 - DNA, 648 bp, Escherichia coli
atgattatcgtaatcggtggtgataaaggcggtacaggtaaatcacatctggcaaccaacttaactgtttgcctctcacaacagggaaagagaacggggcttgttgaaacagacctgaatggctcgaccaaaaaatggaataaacgcagagaacaggccggattaccgcccgtcgcgttaaatgaagcctatggcgacatcagtgccaaaataacaaaaatggcggatgtagcagaaatcctcattatagatactgccggatatgacagcacggagttcagaactgcactaaaagttgcagacattgtgattgtcccgatcgacccgcttgcccaggtggaagcagacagtcttcagactgtgacaaaaattgtcagggatgcgcaaaaaataaatcccaagctggctgcacatgtgctcctgtataaatgccagccaaatacgttcagtgaacaacaggaattaagagactctctcaacagccatgattactggcttaaaccaatgaaaagcacggtttcttttctccgggcctttgtaagagcaatgaatcagggaatgggggttcacgagttaaaaagtaatgttagcggtgccagccaagcaaaagcacaaatcgaacttttgctgaaagaactggaactgtaa

SEQ ID NO: 21518 - DNA, 270 bp, Escherichia coli
atggcaaagctggaactaccagaactagaacaaaaccaggaagtgaacgccacaaaatttgttcaggacgcaggaaaacgccccacagagaacaaaacaaaactggcttcattccgcataccgaatgaattgcttgaattcattgataacgaatcaaaaagactgcatcgccccaagacaaagataatcaaagcagcattactggcttatcaggatctggacgaaaacgaactcattaatttgtggttcagagctgacagaaatgattaa

SEQ ID NO: 21519 - DNA, 1254 bp, Escherichia coli
atgaagaaaaaccccgtaagtataccacacaccgtctggtacgccgacgatatccgccgcggagaacgcgaggcggcagatgcgctggggctcacactctatgagctgatgcttcgcgctggcgaagccgcattccaggtgtgtcgttcggcttatcctgacgcccgccactggctggtgctgtgcggtcatggtaataacggcggcgatggctacgtggtcgcgcggctggccaaagcgatcggtattgatgtcacgctgctggcccaggaaagtgacaaaccgttgccggaagaggccgcgctggcacgcgaagcatggttaaacgcgggaggcgagatccatgcttcgaatattgtctggcccgaatcggtagatctgattgtcgatgcgctgctcggcaccggtttgcagcaagcgccccgcgaatccattagccagttaatcgaccacgctaattcccatcctgcgccgattgtggcggttgatatcccttccggccttctggctgaaaccggcgctacgccaggcgcggtaatcaacgccgatcacaccatcacttttattgcgctgaaaccaggtttgctcactggaaaagcgcgggatgttaccggacaactgcattttgactcactgcggctggatagatggctggcaggtcaggagacgaaaattcagcggttttcggcagaacaactttctcagtggctgataccgcgtcgcccgacttcgcataaaggcgatcacgggcggctggtgattattggtggcgatcacggcacggcgggggctattcgtatgacgggggaagcggcgctgcgtgctggtgctggtttagtccgagtactgacccgcagtgagaacattgcgccgctgctgactgcacgaccggaattgatggtgcatgaactgactatgggctctcttaccgaaagcctggaatgggccgatgtggtggtgattggtcccggtctgggccagcaagagtgggggaaaaaagccctgcaaaaagttgagaattttcgcaaaccgatgttgtgggatgccgatgcattgaacctgctggcaatcaatcccgataagcgtcacaatcgcgtgatcacgccgcatcctggtgaggccgcacggttgttaggatgttccgtcgctgaaattgaaagtgaccgcttacattgcgcccaacgtctggtacaacgttatggcggcgtagcggtgctgaaaggtgccgctacgccgcccatcctgacgctttag

SEQ ID NO: 21520 - DNA, 2076 bp, Escherichia coli; identical to SEQ ID NO: 5875

SEQ ID NO: 21521 - DNA, 534 bp, Escherichia coli; identical to SEQ ID NO: 5124

SEQ ID NO: 21522 - DNA, 345 bp, Escherichia coli
atgttgctggcagataaacttattttcgctgatattaaatataacacccagtttagcttaaattatcaactaaaagaaagctttataaacccagtaaccaacaatactatttttatccattatatcgggccaaccaagccctggcatgattgggcctgggattatcctgtatcacaagcctttatggaggcaaaaaatgcttcgccatggaagaatacagcgttgctgaaaccgaacaatagcaatcaattaagatatagcgcaaaacatatgcttaaaaaacatagatatctaaaaggatttagcaactatcttttttattttattgaaaagataaagcattaa

SEQ ID NO: 21523 - DNA, 1275 bp, Escherichia coli
atgcaggcactgtggctgctggctctggaacccgtatccgagaccactgctgaccataacagctatggtttcagaccaatgcgcagcacgcatgacgccattgagtccatttttctgcggatgagccagaaagtatcgcccaaatggatactggagggcgatattaaagggtgtttcgataacatcagccatgactggctgctttcccatattccgatggacaggagactgcttaaaaaatggttgaaagcaggttacatggaaagaggcgtgtttaaccatacgaacagcgggacaccgcagggaggcatcatatcccctgttctcgccaacatggctctggacggactggagaaggaactgatgcaaacgttcaggaaaagtggttatcacagtgcaaagcaccaggtgaattatgtgagatatgctgatgatttcatctgttcaggcagctcccgtgaactgctggaaaatgaggtcagaccactgattgcagctttcatgcgcgaacgagggctggaactgtcggaagaaaaaacagcgatcacacatatagataaaggcttcgactttttagggcagaacgtcaggaagtacaacggtaaaatgctgattaaaccgtcgaagaaaaacctgaagaacttcctctgtaaagtcagagaaataattaaacgcaatccgacgctcccggcatggaaactgataggccagctaaacccggtgatccggggatgggctacctatcaccgacacgtcgtggcgaaagaaacatttaattatgtcgacacccaaatctggcgagctatatggcgatggtgtgtaagacggcatccccggaaaggattgcggtggatcgccggacgatacttctcctttgaaggcaggcgctggatctttaaagccataactccggaagggaaaattctgacactcttccgggcaatggaaacaccgataaagcgccatataaaaatcaaaggcgaagcaacaccatacacccccggaatggaaatctactttgaacgtcgtctggatctaatctggaaaggcaaatcaaagaagatgaagacagtagttcaactctggaagaggcaggggaaacactgtccgcagtgcggacaactcataaccaaccagaccggatggaatatacatcaccggatcaggaaagttatgggcggcagtgacgaactgaccaatcttgagttgttacatccgaactgccaccgacagttacacagcagggaagccggtgctcaccgaaagcacttataa

SEQ ID NO: 21524 - DNA, 429 bp, Escherichia coli
atgctgctgcatcacctggtggcgcagatgggccaccaaaacgcggtggtggtgagccagaaaacccttgccaagatgatgggcgtgacggatcggacagtccgtgcagcaatcaccgaccttgtggccgaacgctggatttccgttgtgaagctcaacggccccggcacggtgtcggcctacgtggtcaatgaccgggtggcatggggccagccccgcgaccagctccggctatcggtgttcagcgccgccgtcgtggtcgatcatgacgaccaggacgaagccctgttgggccacggcgacctgcgtcggatcccgacgctctaccccggtgaacagcagttgccgagtggccccggcgaggaaccgccaagccagccggcattccccggcctagagccggatttgcccgcccgtatcgaggactga

SEQ ID NO: 21525 - DNA, 177 bp, Escherichia coli
atgacccgcccgacactggaaacctatatcgccacgtccggccagtgggccgggatcgtccgtgaggccggcgaggaaatcgcccgcatcgccggctgcgagacccttgatgacgtgcttgacgcagccgccgagcagtggccgggtatcgaccatatcgacctgccggacgcctga

SEQ ID NO: 21526 - DNA, 984 bp, Escherichia coli
atggcggcatacgcgatcatgcgatgcaagaagctggcgaagatgggcaacgtcgccgcgtccctgaaacacgctttcagggagcgcgacacgcccaacgccgacgccagccggacgccggacaacgagcacatggccgccacgtccaccgacgcggctatgggcaagctccgcgaccgactgccggagaagcgccgcaaggacgcggtgctgtgcgtcgagtacgtcatgacggccagcccggagtggtggaagtcggccagcagcgagcaacaggccgagttcttcgaccgctcccgcaagtggctggccgacaagtacggggcggaaaacatcatcgtggccagcgtccaccgggacgaaaccagcccgcatatgaccgctttcgtgacgcctatcacgaaggacggcaggctgtcggccaaggagttcatcggcaacaaggcccagatgcaggccgaccagaccacgtttgcggccgctgtgcgcgatctggggctgcaacgtggcatcgagggcagcaaggcccgccaccagaccatcagggcgttctatgaggcgctggagcatccaccggcccacgccaccatcacgccatcggcggttgaacccaaggtgctgcgaaaggggctgttctcaaaggacgttgagacgccagccgccgtggccgaacggctcacaaaagcggttcggcaggggtatgaacccgccgtcagagccgccgcaggagcgcgtgagatggcttccaaggcgaaggagtaccaaggtaccgcccaaaccctgcgcgaccgcctgaagccgtttgaggagcttctagggccattgtccaagcccatgcgggaaaaggccgtggcgatcatcaaggccgtgggcgaaaagctccaaaccgaacagcgtcagcaggtcgaagaagctaaggcccgcaagctggccgaacggcaggccagaggccacgggaaaggccggggcggcatcgagcggtag

SEQ ID NO: 21527 - DNA, 522 bp, Escherichia coli
atgagtaaatattctctcagctttaagcttgaggttgtgcagcactatctttccggcatggaagggcagaaagcgactgcaaagcgttttggtatcgatcacagtgccgttcgtaagtggactgctgcctggaagcttcatggcgaagccggacttaccacccggcatttcgcctattctcccgtctttaaagagtccgttatcctgcatatgcgtgagcaccggttgtctgttcgcgaagtctgtgcaaaattcactattccggccttctccacggtccttctgtgggaacgcctgtatgatgaagggggattagaagccctcactgacagccgacgcgggagaaaaacgatgccagaacgccctgaaaataacccggcaccttctttacaggctcctcttaaccatgatgaacgagaggaacttgaacaactgcgtgttgaagtggcttatctaaaaaagttgcaggccttgctcagggaaaaaagcacgtcaaaacgcgggataaaacgcagatcgtga

SEQ ID NO: 21528 - DNA, 840 bp, Escherichia coli
gtgaatgagttaaggccggacttccctcttgcgcgcttgttaaaagcggcagggctggcgagaagtacgttctactggcaactggcgagcggtaaaaaaccagacaaatatgccgatgataagcggcagattttaacgctgttccataaacataaaggacggtatggatacaggcgaatcacgctggctatccgccgggaaggaagcttactgaaccataaaaaggttcagaggttaatgaaggcgttagatttaacctgctgtatcagaaggaagaaatacaactcttacagaggccggtatgggaaagtggcgggtaatgtgctgaaccggcagttcagtgcggataagcccaaccagaagtgggtaacagatgtcacggaatttaaaatcagcggaaaaaaactgtatctgtcccccgttctggatctgtataacggagaaatagttgcgtatcagatggcgtcccgtcctcttctgtcgatggtggatgacatgctgttgaaggctgtatctgtactgggtaaagacgaatacccgctgctccactcagatcagggctggcaatatcagatggcgcattatcagaaccggcttaaggaggctggtctgaaacagagcatgtcaaggaaggggaactgtcatgacaatgcggtgatggaaagcttcttcggcacgctgaaatctgagtgtttttacctgatggaacacaagaatatcagcgagttgcgcatggctatcgataattacatccactattacaaccatgaaagaataaaacagaaactgaaaggcctgagtccggtagagtaccgaacccaggccctgatagccgcttaa

SEQ ID NO: 21529 - DNA, 825 bp, Escherichia coli
atgaagacaatatggatattattttgtttgctgattacatggcttagtagtaccagtgtacaggcaagtgttacgtttggtagtgttgatgtgctgtatggcgcgagcggtcaatctgatcctacgatagagttttattttactataatttcaccaagaaatggtgcttatacagcgaaatattatgacccgcatgctgtccccagaaataatgattatctggtaacagatcagtggtctggccccggagctgctcccattatacaaatagttggctttggtaatgcaggcgcatcccaatgccctggtttgcccagtggtcgaaattgtcaatatctgacattcagcattactattgatgccgcagatgattttggttgcccctggctggcatcggtatacagtgtggtcacggactacggcgcttcttatcgcgcaccaacggccaatagtacggtatgcccgactgtgcctgtagatacatttgatgtttcctggagtgagaatcgtgtcaatcataatcttggcattagccttcattctacgggagggtttattgaaaaaactgtctctacctatttaatggaatctaataaattatgcgatagcagtgttatggataggcgcggtgactattgtcggttcgtttctggtttaatcactttctcttcgtatggatgtgacaacgctaaagtgacggtgacgccaatagagcaagcagttactgataaaaaactccacgatatagtagtgcgagtagatacaagtagtatgcaaccgatagattcatcttgtcgctttcagtatattttaaatgagttgtga

SEQ ID NO: 21530 - DNA, 552 bp, Escherichia coli
atgacaagaaaccaaacctactacaccagatatacagcggggagtttactggggctagtgttgttagctcaaggaacagcgacgagcgcgaaaaacaaccttcatttcaccggaaatttgattgataaatcatgcacgttggtcgctcctggaggattactggcagaagttcgctttccgacgattagctcaagagatctgagtacacaaatgcagtcaggtaaagtctcaatggcttttgagctagaaaactgtaaggggtcttcacaatcacaaaatagcgttaaggtgacatttacgggcacagaggataccggacaacctggatttttagctcttgattcagactcacaggcgcaaggtgtgggtattggtattgagacagtggatggtgtcccagtgaagatcaataataactctggtgcgacgtttgttttgagtgatggcagtaatacattgctttttaacacctgggttcaggcaaaaagtgggcgagatgtgacgctcggtaatttcactgctacagcgacggcaacttttgagtatttataa

SEQ ID NO: 21531 - DNA, 480 bp, Escherichia coli
atgaaacagatcgcattttttatcatgctggtaagttacgcaacggtggttagctcatctccagatataacgtttcatggcaatttgatagcgccgccaacatgcatcgtcagtgaaaataagacgattgagattgcatttaatgaggtcattattagtgacatctctggtgataactataaacgagaagtgccttatagcgttgaatgtgactctgagaataccgatacgggaatacaaatgaagctgacctggacgggagtagaaactgattttaatgactctgcggtagagacggacgtggtggggctgggggtcgaattgcagcaaaacggtcagcgttttcaacagggaaaggcgataaatatttcaaaaactaatctgccgaaactacatgcggtactggtgaaaaaaagcggagcggtgctcagtgaaggggcatttgaagcctatgccacattacaggtggattaccaatga

SEQ ID NO: 21532 - DNA, 507 bp, Escherichia coli
atgaaaaatattctactgactatggttggggggctgctgatctgcactacggtaggggaattgacttacgcaggcagtaagccagtaaatatggttttacgtgtacaggtagatgggcctccaccatgtaccgttacggggagcgatgtcgattttggggatgtgctcatcaggcgtatagatggcagccagtatttgcagccagtaacttacaagctggactgcgggcaacgacttactggtgcggatgacttacgtatgcagttgcagggtcctacaagcgtcatcaatggtgaaactgtgcttaatacaggtattgatgggtttggtattcgtattcaaaacgctacgaatgactcgcttattacggtaggaagcagtgcttggctaccatttagcatcgataaccaaccaacgcttgaagctgtacccgtgaagcagaatggggtatcgctggtatcttctgcattcagtgctactgcaactatggtggttgattatcaatga

SEQ ID NO: 21533 - DNA, 255 bp, Escherichia coli
gtgctggcgagcctcggtgggctggtttcctgtgcggcaaaggttcatttcaaagaagcaggcaacgccatgaatgaattaattgcgaatcatgacttcgactttcgccagttagttaatggatataacacctttccttcatgcgctttgtgctgtggctgcgcagctactgattggtctttttaccgggaactgggcttacggggcgatagccggttgatcttacccagcaatagtggacacgcggctaagtga

SEQ ID NO: 21534 - DNA, 639 bp, Escherichia coli
gtgttcgctgaatacggggttctgaattactggacctatctggttggggccatttttattgtgttggtgccagggccaaataccctgtttgtactcaaaaatagcgtcagtagcggtatgaaaggcggttatcttgcggcctgcggtgtatttattggcgatgcggtattgatgtttctggcatgggctggagtggcgacattaattaagaccaccccgatattattcaacattatacgttatcttggtgcgttttatttgctctatctggggagtaaaattctctacgcgaccctgaagggtaaaaataacgaggccaaatccgatgagccccaatacggtgctatttttaaacgcgcgttaattttgagcctgactaatccgaaagccattttgttctatgtgtcgtttttcgtacagtttatcgatgttaatgccccacatacgggaatttcattctttattctggcgacgacgctggaactggtgagtttctgctatttgagcttcctgattatttctggtgcttttgtcacgcagtacatacgtaccaaaaagaaactggctaaagtgggcaactcactgattggtttgatgttcgtgggtttcgctgcccgactggcgacgctgcaatcctga

SEQ ID NO: 21535 - DNA, 168 bp, Escherichia coli
atgatgaaaacgatgcgtattgctgcgatcccgggagacgggattggcaaagaagtccttcctgaagggattcgcgtgttacaggctgccgctgagcgctggggcttcgccttgagttttgagcaaatggagtgggcgagctgcgagtattacagccatcacggttaa

SEQ ID NO: 21536 - DNA, 285 bp, Escherichia coli
atgttgaagataatacccggtgcaactggatactttaataaaacactcaattcaaatcaattcgataataaagatgcaaccaaagataaattagataatatagatgcaaccaacgataaattagataatagaggtacaatcaaagataaattaaataatatatatggtaagtctattgattattcagcgctgcgtcatcgggatataattattgcaaaaatagatttgtttattcaaagaatcactcataatttatggcatgcacgtaaaaaaatgtgtttttaa

SEQ ID NO: 21537 - DNA, 747 bp, Escherichia coli
gtgtttttaattgagcaaataactaatctcaaagagtgggttaataagtatattggagattgcactgatgaggaattaaacgatcgtgaatttattgcatcagttgttgatcgggctatttttcattttgcgattaatagtatatgtaatcctgaggataataaagatgcaacgcccatagaacgatatacttttgatgtagaaaccaagaatggccttccctccacggttcagcttttttatgaggaatctaaagataatgaacctttagcgaatatacatttgcaagcaataggttctggttttttaacgtttgttaatgcatgtcaggaatatgatgacaacagcttaaaattattcgcttcgctgttgatttcactttcatactctagtgcctacacagatttagcaggagcagaaaaagtgaatattaatgatgataatgagaactatctgacagctcagtttgaagagttatctcaacgtgatatgaagaagtacctgggagagatgaagcgtctggcagatgggggagaaatgaattttgatggctatctggataagatgtcacatctggtgaatgaaggaaagctcgcccctgatattttaagcaaaatgcgagatgctgcaccgaaattaattgactttgctaagtcgtttgacccaaactcaaaggaaaagattaaaaaatatacagacacttctaaattaatttatgatttattcggggttaaatcggagaaataa

SEQ ID NO: 21538 - DNA, 798 bp, Escherichia coli
atggctaatgaaaaaaagacatcccgcaaaaagtttcgcgtggctgtctccggatcaactgttgatggccgtgaaatcagtccagtgcatctgcgtgaagccgccgagaacttcaacccggatgtttacgctgcccgcgtgaacgttgagcactatctctcgccatgcccgtcagcgaaggtggacgcaatgagtaattcgttgttaccaccatcagccagcaatttcatgcgttgtgccgaagccgtcggaacacgcattacagacattccggtagacctcaacacgctgtggtcgccggacacctgcccggtgcatctgctgccttatctcgcctgggcgttttccgttgaccgctgggatcgcaactggccggaagagacaaagcgacaggtgattcgtgatgcatggctgatacaccgacacaaagggaccatcagcgcactgcgaagagccgtggagcctctcggctacctgattgaagtaaaggagtggtggcaactcaacgaggagccgggaacatttcgcattgttgtcggagtacttgatcagggcatcaccgatgaaatgtatcaggaacttgagcgccttattgcggatgcaaaaccagtaagtcgccatctgacggggctggcgatcagcctgagtgtgaacggaaagattttcgttggtacgggatgctatcacggcgatgccctgacggtttatccctacaccccggagtccattattgtcgaaggggattatttccctgccccggccattcatttaattgataatctgagagtaaacgcatga

SEQ ID NO: 21539 - DNA, 603 bp, Escherichia coli
atgatgaatataatcagactttatatttatccgttatttctcggctttgttattgtgccgttgttggtgtggccgatggtggttgcgctggctgcttgtattatcacgctgagttttctgggggaaatgctgttctcaatcccgctcatgatcaggcgtatttcacttctgcaattacaactttggttatcggctgaatatgcgcttttcttctgtgtaatgtgttgcgttggttggcaatttactcgtagaactcaatctgaattgaaaagcaggctccattgttggttggtattcgcaccggtctatttatggttgatcctctggaatatcattttttacatcgcgccagcgaaaattgcgttgctggaaagtatccgcaatttctttctgcttgttgtctggctacccctgaatttttcgccattttggcctcagccgtggacggattttatcggtccaataagcgcacagcttggttttgcgttgggatattattgccagtggcgcagcaaaaatagatgccagatacggaagttgagtgagtggggaacgtgcttaagttttgttacgttgggtatgatggcgtgggctttgcggtaa

SEQ ID NO: 21540 - DNA, 1275 bp, Escherichia coli
atgaagaaattcttcagacattttctttttttaattctgtgcttgagttgttataccgcgagtgctggcactgatgataacgtaggatatattgttgggaatagttacggcgttggtccgtcagatcaaaaatggagagaaacggggccgaatggcgatgctactgtcatattcagatatgcaacaagtacaaataatttagttttctacaaaccgacgcagcttggacctacaggtgtaaaattacagtggagtcagttagataccgcttctggtggtggttttctttattgcaacagaagtgatagcacaagtggtagcgcaatgcgtattgaaaatgcaatggttgactcaggtaaaatgtatggctcccataaattatttaatacatcagttcctggtttgtattacacattattaatttcaaacatgtggtcagcttacggtaccgtaactaacgttagttcacctgggatatacattggtgactctgcagaacaatatttttcgtggtataatccaagcgaagacgtgttatattggagttgcaataatgcgaatagcacccgtaaatactgggctgtaggtggtatttatcagacccttacaattgaattctatacagatacaaactttgatccaacagtaactcaacagatcaaattatccagctcatcaaattatctgtattcatttaaagcctatggcgcaggccaaggtataaatgagcatagttattttatcaaaatcgatttcgatctgctcaatgtcaagttgactaatcccacttgttttaccgctatgcttagtggaacttctgtgactggttctacggtaaaaatgggtgaatatagtgcagaacaaatcagaaacggtgccacaccggttccttttgatatttcacttcaaaactgcgttcgtgtgactaatattgagacaaaattagtttcaacaaaggttggtactgaaaacgggcaactccttggtaatactctcacaggtaatgacgcagcaaaaggagtcggtgtactcatagaaggtttagcaactagtaaaaatcctctaatgacattgaaacctaatgattcaaattctgtttataaagattacgacccgagaggcaaagacgatacaacaggaggagtttacccggatcaagatacaggtataacataccctctccatttccaggccacgctacaacaggatggaactataccaatagaagctggtgagtttaaagccaccagtactttccaggtaacctacccttaa

SEQ ID NO: 21541 - DNA, 1101 bp, Escherichia coli
gtgaatttcagctctgaactgcttaacaaaggcaacaaaactccggcatttagcatcagtattgaaggcagggatatcactactgtgctggacaaccgcctgatggggcttacgctgacggataaccggggctttgaagcggaccagcttgatctggagctggacgacgccgatggaaaaatcgtgctgccgcgccgtggtgcggtcattacgctggcgctgggctggaaggggcagccgcttttcccgaaaggggcattcacggtggacgagattgaacacactggcgcaccggaccgcctgactatccgggcgcgaagtgctgattttcgtgaaacactgaatacccgccgtgaaaagtcgtggcacaagaccaccgttggggaagtggtgaaggaaatagctgcgcggcacaaactgaagatggcattgggtaaagacctgtcagataaacccgtggaacatatagatcagaccaatgagagtgacggcagttttctgatgcggctggcgcgccagtacggtgctattgcgtcggtgaaaaatggcaatctgttattcatccgacaggggcagggtaaaagcgccagtggtaaaccactaccggttatcactatcacacgtaaggacggcgacagtcaccgctttaccctggcagatcgcggagcttacacgggcgtaattgccagctggttgcatacccgcgaacccgcgaagaaagaaagcaccgcggtgaagcgtaagcgcaggactaagaagcagaagaaagagccggaaacgaagcagggcgattatctggtgggtacggatgaaaacgtgctggtacttaatcgcacctatgctaatcggagtaacgccgaacgggcagcgaaaatgcagtgggaacgcctgcaacgcggcgttgcgtcattctcgctacaactggcggaagggcgggcagatctctacacggaaatgccagtgaaagtcagtggctttaaacagccgatagatgatgcggaatggaccattacgactctgacgcataccgtcagccccgataacggttttacaaccagtctggagcttgaagtgaggattgatgatttcgaaatggaatga

SEQ ID NO: 21542 - DNA, 618 bp, Escherichia coli
atgcataagacgtttcttagttatcatcatgctaacgaacaagatctcaaagatgagattattgatttattcggaggagaatcgtttattgataagtcggtaagtgatggtgacattagtacaactaacactgatgaaacaataatgaggactattcgtgaggattttttaaaagactcaacggttactgtcgttcttattggaacggaaaccaaaaatcgtccatttgtaaactctgaaattcaagcatcactctggggagaaaactataatggtctaattggtgttatcagagatgaaatttacgacagtgtgtttactcctgcagtatgtgcagatccatcatgcggatgttctataagtctaagaacgccaggttggggatatgattattatttgccttatctggttagaaagaatcatgtttatgaaaaaacagttccccattataatgactctgacgtatattgtgcattggtaaaatactctgtctttattaaaaatcctgagtattatattgatcaggcatttaacaagcgtaagttgatggaaccagctgctaaacgaaatccatcggatgttcctgcaattcgcagctcatcaatttttaactggtaa

SEQ ID NO: 21543 - DNA, 732 bp, Escherichia coli
atgtacagattgtgggttttatggggttgtatctttgttcttctacttattatcatggggtgcattccgttttcaccgtttgaaaaatggtggtttatagttaatttcatgtcaaatgtaaacataattcgtgcttttctatcagtattaatactatttttagttgcttatatcttgctggtcggtgcatttcatcaaagatattcattgagattagagcaacttagttttggtggtattaatattttactaaataagtctgatcttctttttaaaaagagcgtaaaaaattatctggatacgaagcgaacattatttaaatttgatccgaattatgactcaattgaagaagttttaaactcatattatgagtgctataaattcattagagatgaaatgaaattactagatgtgaagaaaaaaagagataaaaaactgtatttactttcaaatgaaattttgaaaacgttaaactcttttttaacaaagcatcaaaataattatcggagatggcataaatatgtttcagataatgataaagtgaccacaaaggatagagaccctaacggcgaatttatatcattgccgtatcatttaacccctataagtactatacaaaagcattattatcattttagtcaagtattggaaggttttaaagaagtaaacgatttcttcaatgataaggtagtcaaagagtttgatataaatgttgataaatggagtgaataa

SEQ ID NO: 21544 - DNA, 288 bp, Escherichia coli
atggataaaaccccaattcatcacgcactttgcgctgtggtcgcacaggtactggttggtctttttaccggaaactgggcttacggtgcgatagccggttgtacgttcttcattgctcgtgaacacacccaggcagaatatcgctggattgaaatgttcgggcatggcaagcggattaacatgccgtggtggggcggttttgatccgcgtgcatgggatgtggcaagcctgatggatttttctttcccaattatcggatgcttattggtatggattcttgcatcgtag

SEQ ID NO: 21545 - DNA, 2586 bp, Escherichia coli
atgcctgatataaccccaaatgttgtgataggtatgccatcgcaactctttacaatggctagttcttttaaaaccgtagcaaatggaaaaatttatatcggtaagattgacacagatccggtaaatccagaaaaccagattccagtatatctggaacgagaagatggtacttatgttcaggtgccacagccaatcgttatcaatgctgctggatacccggtatacaacggacagatttccaaatttgttaccgtgcaaggccattctatggctgtttacgatgcatatggtacgcagcagttctattttccgaatgtgcttaagtacgatcctgaccaattaagacaacaattagaagacccggaaggtgctaaaaaatatcatgaattgcagatgtctcggtggcgtgatgacgctgaccctcgcggatggggagcaaaaggtgatggcatcaccgatgacacattatcttttcaagagttagaaaaacaaatcacaggaaggattgttgatctaaggggtaatacatatataacagatcaagtttttgatggaaataagtatataaatggctattttcgcacagagaatcgattactgccagatgctgattttactgaaaaaagaatacaaactataaaaaaggggatgtatacaggtttcagaccttctactcctaatcatgttaagtcagggttgcgactggcaacaattaaaaatactgtcatacagggtgctgttcttgattattatgacagtgttctttattgcttggtaaatgtgagtggcagcgttaattctggtgacgaagttaataaagttgttgcttataattggtttgggaatgaagagttaactcctctttgggagactaaaggtagtagagaattaggacatcaatgtcttggtttaaccatagggcgcgttggttttcgtaacacaagaggccagttacagatatgggggttagctggcacagctaaaggagaggatcgcgcaaagtatatcaccagattcacccctactgatggtggtgaaattgaaccagagttttttctcatatgggaagatggttacgagaatcaggtaaatgttttatgcaccgaccctatgagtcgatggctgattactacagcaaaacgttatgttggccctggtgagagcccatcaacaccagatcaaattcgctattatgttaaagtatttgataccagcaaatttattaacccgcaggcgtacaattacgattatcgtaatgaagcaacttttgaatttgaaattgccgattttgtgagggatatgcaaacagttgcgtgtgacggtactgctatttatttttgtcaggctggatctgcatattcttcaaccagaaaatatttgcatcagtacacacttgatggtgtttatcttggggtgcagcaaatacaggcaggtgcaggaagagcctatgaaatagcagatccaaatgataccggaacgccagatgttagcaatcttacatatgaaccagaagcaatgtttttccgtatgattgcaggtgggtatgaccttgtaatggggaatacaaatggcataccagatggtgatagtgggcgagaaactacattttacacattaatgccacaacaggtaatgcatgtaaaaacaacatcaagaaatcagcctggtattatcattgattcaacccatgatattgtcactaactctggtttgttaagccttggtaaaattatgcctggtggtgaagtcatagagcaggcaaaccttgatgacaaaggattcactgtttcgagggcaacaacacaagccgcccgttatgatgcaaagaatacgttacggaatgtaacttttcatgttagtgaaaaaggtgataccggtatttatgactttaccaatgctcaatggatatttaaatctcccttatcaacatcttcatattcgtatatcggtcagtcagcggaggttaatggctatataagtgctaataaagataatacgtcatcatgtgggacatcatctaaacggtggacgcaagtatatgcaactaatggggcaataaatacttcagaccagacattgaaaacaaagccactgacagtagagcaactttcagaaatcatggaggtggatcatgatgcaattcttgacgcatggggtgacgtaaatattatcgtttaccagtggttgtccgatattaaggctaaaggttcggatactgctcgttggcatttcggagcaattgcacagcaggtaagagatgcgtttcttgcaaaggggatagatggaacaagatttggcttgctatgtcatgataaatgggatgatgagtaccaacctgtaatggcacagcgcaaggtgtcatttatagctaaatcccctgaaggagaagacatcgttcacgaatactttgaagaatacgatactggtgacacggaactggttgtacatgctggtgagcgttggggattgcgtccagatgaatgtttgtggttggaggctgcattccagcgaagaaggtgtgaacgcattgagtctcgtttaacagagcttgaattgataattaaaaaagcaaaagagatagagtag

SEQ ID NO: 21546 - DNA, 252 bp, Escherichia coli
atgggaagagatgacccgcaatttaatctgcggctaccttacgaattaaaggaaaaactaaaacagcgagccaaatccaatggccgctctcttaattcagaattagttcagatagtgactgatgctgtatcaaagccatccaaaatttcaggctatcgagacgatgcggaacgcatcgctgatgagcagtccgaccttgttaagaagatggtgtttgatacgctgaaggatttgtacaaaaaacccacctga

SEQ ID NO: 21547 - DNA, 255 bp, Escherichia coli
gtgctcaaggcaaaagacgttatccgccgtggctgtctggaatatgacgtcagcgccaccgacatcaccagctcgtttatggctatccgcaagaccatgaccagcagcggacgcagcgccacgtatgaggccagccgcagcgaggaagccagccacgccgacctcgcctgggcgaccatgcacgccctgttaaatgagccactcaccgccggtatcagcaccccgctgacatccaccattctggagttttactga

SEQ ID NO: 21548 - DNA, 1833 bp, Escherichia coli
atgaatgatatctttgttcttacaagggaagagcttgaaacactagattatagtgtttttatgcatataccagttacatttcatgcacataaaataaaaaaatatctggatgggattgctgagtcatcagaaaaccccaaagagaaaaaattagcatctctttttggtatgctatatagtttcaatttgcaagttgttaacaacactccatcatttgaaccccaaatgatttggggtaataaaagatcaatattgcctgaagattttgatgagcaggtgaatgactgtcttttatatgtttctcaaaaaataaccaatccatttttgttatcaagaatatatgatgttgtttggtgtaataatcggaaaaataaagacgtggcaattaaagcaattgattcctatgctgaaatgctaaatatagcaattgaaaagctaataataaaaaacgaaagcatagatgaaagtgatttaaattgctttatttttgctcgtgattatattgctagggctttgcacattaataaaatggtctaccctagaaaatcagaaggaaacatggcgattaaaaatgccattcattctctttatagtattcaaaatgaaagattaatctttgaaggtttcaataatttgacttggtttatggtgcgtgattttgatgggtataatctgcagtatgcggaaaatgctgagaagatggctgagcagcataaagataaaaaatattatgatgctgtaaaatcactttatatgacaagtgcagttatttatgaaaaaaatggtgagtatgaacgtgccaagagatgtaaactggcatctgcaaatattactattaaagttgcaacagaacgacctgataatatgggtaagatctcttggttaagaacagctatctctgaattaagacagtacggtggtgatagccaacagatagaagatttaaaggaacaacttgctaatttgagagaagaagtaaggagtgaatatgtcactttaagccattctattgatattagtgacttggttgctgaaagtgaaaaaaaactgacggggcgttctttgcccgatatattcaaagttttaatgagtgaaacaccgattgaaaatattgaaagcatgagggaacaagttttaagattatcagaaaaaagtttattctctagttttgttggaacagaaattaatgatgagagtgggcgtaagatatatacaatcccgccgttggataataaaaaagatatgagtgatgatgttgttattgatcaatatctaagaaatttcgagattactcataagatttttgtaaacggtgtctttgaacctgctcgctatgtactttctcaagaacatggcttgacgttgtcaacattcgttaaattggttacaactagtccaattgtcaagccggagtttagggagatttttaatttgggcttttacaaattatggcagggagattacatcagtgcagcttatcttttaataccacaaatggaaggtatggttcgttattattatgagcttagtggaaaggatgctactagatatttggataagggattagaggagtcaacaagtatttctcagcttctagataaatgcagagatgatttggaaagtatcttttctaaaaatcttgttttgactatcgatgttctttttaacagaaagagtggggcaaccttaagacataaattagcacatggtaatttatatactaatgcttgttacgatgaaacaacgacatatgcatgcatcctgattttctttctgtgtgcttatcctctcctaccatattttgatactgtttttgaacagggctctgtttga

SEQ ID NO: 21549 - DNA, 624 bp, Escherichia coli
atgaaaaaaataattcccgccgtagtctgtttgttgctttgtagttgctcgacctttccgcaagctgtcgctccggtaaacaatgactttgcaggtcagcataatatttatattgtcagtcacggctggcataccggaattgtggtgcccgccgcaatcgttaatcgtgttttaccgcaactcgacgcgagatttgcgcaaccaaaatggtatgaaatcggctggggcgataaaggcttttatcaggcacaggaaattaccagtcgcctgacattgcaggcgatgttctggtctactggcgcagtaatgcatgtggtggcgttctctgccccacctgaacgctattttcctggcagtgaagttaagccactgacaattaacaacggtcaacttgcgaccttaatgctatttattggccgcagtttttcccgtagcgaggcgggaaatgttattccactcaaaaaaggcatttatggtgacagccagttttatgccgccaatggtcgctatgggattttaaatacctgtaataaatggacggcaaaagggttacaaagcgcggggatagagattgaaccggctttaaaattgacggcggggagtgtgataagcgcaatgccttaa

SEQ ID NO: 21550 - DNA, 174 bp, Escherichia coli
atggcactgactgacgcaaaaattcgggctgcaaagcccactgacaaggcgtataaactcactgacggagctggcatgctcatgctggtacatcccaatagttcccgttactggcgtctccgttatcggggatccggacgcaccgcaacaaccggggaagtatttctggtttag

SEQ ID NO: 21551 - DNA, 270 bp, Escherichia coli
atggtttcttcagctttgcccttgagagctttttacgggcattttgccagtccttacgcgcctgttcagacgggaataacccgtaaccagagttgtatacatcgccgctggcaaccagctctcttgcgagaacgctcaggcaacgtaaaaacacttgatgaaggtgtcaaaaaaatgtgcctggtgcatatcggaaagaatctgcccgcagaaaaaaaagccgaatttctggcaactctaattgcaatgaaattaaaaggtgaaatctga

SEQ ID NO: 21552 - DNA, 834 bp, Escherichia coli
atgactaagcaaccacctatcgcaaaagccgatctgcaaaaaactcagggaaaccgtgcaccagcagcagttaacgataaggatgtgctgtgcgtgattaacagcccggcaatgaaagcgcaactggcagcagctctgccacgtcacatgacagcggaacgcatgatccgcattgctacaacagaaatccgtaaagtaccggaactaagaaactgtgactcgacgagttttatcggtgccatcgtacagtgttcacagctcggacttgagccaggtagcgccctcggtcatgcatatctgctaccgttcggcaacggaaaagcaaaaaacggtaagaagaacgtacagctgatcatcggttatcgcggcatgatcgaccttgcccgtcgatcaggtcaaatcatcagtctgtcagctcgtgttgtccgtgaatgtgatgaattcagctatgaacttggccttgatgaaaaactggttcatcgtcccggtgaaaacgaagatgcccctataacccatgtctatgctgttgcaaaactgaaagacggaggagtgcagtttgaagtcatgacccgcaaacaagtagaaaaagttcgcgacacacacagcaaggcggcaaaaaacgcagcgtcaaaaggggcgtcgtccatctgggatgaacactttgaagacatggccaaaaagacagtgatacgaaaactgttcaagtatctgccggtatctattgaaatccagcgtgcagtatcgatggatggaaaagaggtggaaacaattaatccagacgacatatcggttatagccggggaatacagtgtaatcgataatccagaagaataa

SEQ ID NO: 21553 - DNA, 456 bp, Escherichia coli
atgtaccgtgaaagcgacatcgtaccgggagagcagaccgccaccagcatactgaagcagcgcacaaaaaatcttgcgccgctgcctcacgcccaccagcaaaacccgccacaggaagagacggtggtcagcattgccgttgatcctgagtctccggaatctttcatgaaacgacctaaacgtcgccgctgggttaacgagaaatacacacgctgggtgaagacacagccgtgtgcgtgttgtggtaagccagccgacgatccccatcacctgattggtcatggtcagggcggaatggggacaaaatctcacgatattttcacgctaccgctgtgtcgggagcatcacaacgagcttcatgcggatcctctggcgttcgaagaaaagcatggttctcaggttgatttaatttttcgttttcttgatcacgcctttgcaactggcgtgcttgggtaa

SEQ ID NO: 21554 - DNA, 306 bp, Escherichia coli
atgatttacattgaacagcttgaattaatccataaaagtggtgatgtgttgtatccagtaaaaataaccagaaaatcatcaggaaaaactgccttccaccttgttccattcggcttaaataagactcacgaccttctagaggtggaagatgcttcagaagcaattcggctggtgattgatgaacgtcattccattcgctgcagtacacttacagcaactattacgaataaaaagggcaagcgaattaagcggacaggtatatacagtatcaagggtgttaacataaaagaatacaacgtcaggtaa

SEQ ID NO: 21555 - DNA, 1140 bp, Escherichia coli
atggaggatgtcgatcaattacgctggccgctgtgtgcaatcgctatagaagcgcgatatctttcattgaattgtgcttctttgctggcagagcgtttgaactggcattcgtttaatgacagcgaaggaatggatgaggaagaaagggaggcttttcttgaggccattcaggctggtgattgtttcgatttccttagccttctggaatatcccattgcgttgcagaaccagacggttgagtattacttcgcgctggaacgttgctgccgttaccatcctgactatgtcactgcgtttttggcgatggaaggtccgtggttcattcctgatgatgcgaagttgcatcgcaaactgttgcgctggtacagctcggtgcaaacaggtatggcggaactcattcctgtagctcaacagtggcaaatggaagaaccagaaagcgaagatgcccgatattacttgtgtgcacaacgtttgtactgcggcgagggggaaagcctgcttgccgatctctgcgcgtactgggaaagttacccatctacacaagctgataatttgttgttgcagtggagcaagcgtcattgcccggattatttcgcgttattagtgatggttatcgaagcgcggagcatggtagatgcgcaaggtaaaccattgaaatatgttcctagtgagagcgcccggacgcggctgttatgggcggagattttacatagcggaaaattatcgccgttaggtcaatcgtttattgagtcgctattcttcaaacgcaaagcatgggcgtggtggaaatcgagagtcggtagcgagacagagcaagattcaccgttactggatttgtatcgggtagcggaacaggtagtacttgaagcgtttccgaaacaagagatgctggcccgtcttaatacaaggctggaaggcggagatgctcatccattagaggccattatcacccggatgctgttgacgaaagtaaaactcgagccggaggatgaagatgtcgatgagccaacacctgaaaaccatgaagaaaaaaatgatgagggtgaaaaaccacagagcattaccagcattatcaaaatcagtttaacggtgctggttataggttatgctctcggcaaaatcgcgatgttgtttagttga

SEQ ID NO: 21556 - DNA, 162 bp, Escherichia coli
atgaaaaattgctggaagatcctcaacatagaggaaacgactgacgtcgatattatccgccgcgcttatctggcgctgttaccgtcctttcatccagaaaccgatccgcagggtttaaagcattacgccaggcctatgaagaggcgctgcgactggcggtaa

SEQ ID NO: 21557 - DNA, 513 bp, Escherichia coli
atgatttttacgtcaagttgctgcgataatttatcaatagatgagattatcgaacgtgctgaacaaggcgatagtgaggctcaatatattgttgggttttattataatcgcgatagcgcaattgactctccggacgacgaaaaggccttttactggctgaagcttgccgctgagcaaggccattgtgaagcacaatattccttagggcggaaatactccgaggataaaagccgtcatagagataatgagcaagccatcttttggctgaaaaaagctgccctacaaggccatacttttgcttccaacgcccttggctggatactggatcgtggagaagaccccaactataaagaagcggttgcctggtatcagatagccgcggagagcggaatgtcatatgcgcaaaataatcttggatggatgtacagaaatggcaacggagtcgcacaagattatgcgctggcatttttctggtacaaacaagctgcattacaaggccatagttacgcataa

SEQ ID NO: 21558 - DNA, 840 bp, Escherichia coli
atggaatctaatgcactaaaaaaagcacgactatttataaatgacataaaatattgtgttgaaaactttaatatcgattcaactttatataccgctttcaagccaagtgatattggtgttaaaggagatgaaagcaatacaatatatgttgctgacggtaagcttccggaaaaactgataattgcttttggagaaaaggcaaaagacagtaaaatatttattggaaaaaatgtaaaatgcaggggatcgagaattgtaataactcacggtgaaagcctttgttacatcggaaataactcacaactaaataatgtaactatgcatatatggtgcaaatgggattttgtagtggttggagaaggtgtatcagttacctcaacaagtaattggactactggaataaaccctggcaatccttgtaacggcattattattggtgatcactgccttatgagccaagaaatatctattagacctgcagatggacaccaaattatcgaactcaccacgcgaaaagtagtcaacgctgcaacatcacctattataatcgaaccatattgctggatcggacagcgcacagcaatactaaaaaatgtaagaattggtgcatgctccatcgtttcacttggtgctgtagttacaaaatcatgtaaaaaattcagtgcgctaagtggcgtaccagccaaagcaagatgcattgaaggaaaaatgtggctaagaaacaatggggaagaagccaagagaataatgcttatgtatgaaaaaagatttgcaggcacagcagcacagcagcacagcagcacagcagcacagcagcacagcagcacagcagcacagtga

SEQ ID NO: 21559 - DNA, 1068 bp, Escherichia coli
atgagcaaggtaggcgattatttctttgaatttcccgcatcacgaggaacgcagggaagcactgtaatacttatgatgacagtaccagcaagagcactatcgagagtattggcaaccgacaatacgggcagtacccttgaacgttctcaacgtgaaattaatccaaccagggtaaaaaagttttatcaatatttagtcaacgcttacgagaaaaaggaaccatttattgttccaccattggtcggaaattgtaactcagaaatagagttccatgagattggaaatactaatgtcggtttagctagatttcctatggatgcagaaataaaattatttgatggacagcatcgtgctgcaggattagctgagttctgccgtaattatggtgaaacaattatgattcctcttatgcttacgcataaccttcctttgaaggcgcgtcagcagttcttttctgacattaataataatgtttcaaaaccatctgcagcaattaatatggcgtatgacggacgaaacgatgttgcccaagaaatggtgtctttcctgtcgcaacatgacacttttgcagaagtcactgacttcgagcacaacgttgttccgtcaaagtcaaacatgtgggtgagtttcaaagcattaagtgattcaacatcaaaattttgtattcataatggaaaaaaactagaaattggtaacatcgagtcagtatgggaatcatggttatgtcttacacaactagaagcaattcgccatggtacaaagcaatcagaatacaaaagagaatatatccagtttcatgcagtgatgattaacgcttttggttatgctgttcagcaaatgatggttaatcactcaataaaagaaataatttcaatgattgaaacattatgtgcaaatactgacttcgcagaaagagagaattttttcctaatggataattgggttgggatctgcacgaaagcaagccaggaaaaactatcagttattgccaatgtaacagcacagaaagcggcagcaaacaggctgatacaagcctttaccagaggaagtctgggagcagaacaatga

SEQ ID NO: 21560 - DNA, 1650 bp, Escherichia coli
atgagcgcgatcacattacgtaaagcgttaggtgtacttgcgaagtcatcttcgttttccgtaaccacagaaactcatcggcaaaaggatgtgttcgatgagctaaaagaacaactctttgttaaacaagagattgaagaagagttacagcgttatctggatacagctactcccggtgagatcatttttctatgcggaagtagtggagacgggaaatccgaaattttaacccgctgtaagtcagatccacaatatcaacagaagtttagtttccatctggatgcgacacatagctttgcgcctcaacaatcggctatcgatgcactgaatgatttatttgaaaatcatcattcgcaatcatacccgctcctcatcggtatcaacaccgggatgctagccaattttgccagagaaggttctgagtcccatatggctatccgtgctgctattgactcattcttgtcagcgcaacaggaaggccagcgtccttaccgcaacgaaaattgtatattttttgatttcgaacattatccaaagttcgagtttgacgaagagcgggaatactccccttttatcaaaaaattaatgaatcaattaacggggaatgacgacaaaaacctgttttacacaatttatcaacgtgatgaatcaataggacatgatttaaaaaccgttgctaactttaaactactgtgcatgcccggtgttcagaatgttttaataacacagctatttaaagcccgattaataaaagatcaatttgttaccacaagaaccttattggattttttacaccacctgctgacagggcctgggtacctgtttgataatctgtttaatggtgcagagaatgatctaattaaaaaggtttctgattttgatcctgccagattgcatacatacgagattgatcaatttattttgcgctatgagcttggattagttgatcccgaactggatgattttctgagtacacttgcgaaattacatcttacgtttgatcgtcaatgtgttaagcctggtgacgcagcttcattaattagacttttctggctactacaacatgaatctttagggaataactatcacaaaaggttctctgtattctttaaagaagcgctctttgagcgttattcagagatttggcatctgcataaaaactataccgcagatccggaacaaaaaagaacactaaaccgcttttactctttcgagcttatcgctggtattcagcgttacgcaaaccgtaaagcacctgaactgagtacccaaaaagaagagttctttttaggcgaatttggtgggattaaaatcacagcacctgttgcgctgaaaccggactgggattcaattctcaagaaaaatacagcccatacaacttgtttcgatatctatttaaaagtaggacaagatccgctagatccgattcggatcggtcttaatttatttgagctattgagcaaactaaataatggctatcgccctaataagtatgataaaagtgcgattgtcttactggacgaaatcgttgaactaatcgcagaaaaggcaaaatccagcagcgaaatcaagttttatgatggcctaaagcgggtctatagtgcaagagcggacgatgacatgattactatcagcggcatggagggataa

SEQ ID NO: 21561 - DNA, 1326 bp, Escherichia coli
atgtatcccattgcaacaaatttaaaagttagtaataaccagctggatagctaccttccaatacgtaataagaataacaatattgactggcaaatcgtcacaggtttagtactgagctatgccgtgaagtataaaatcgatacatacagtctcgagcagtttcgcgaggattgtaaaactcatctgcaaatattgatcgatgaacctgcgttcttgtccgtgctggaacggatgtatttttccagtcaggatatttttcgtgtctccccgctgttcttgctgttccacgctcagtttgatggtgaaaagataagtgcaggctcgactgccgacaaacgccttggaacactgtttgccaatttgatgagagattttagccttaataacccgatacaagataagttgaattttattgaaaaagagatgctgaataagctcaataaaaaattaatccgactgggtgaggggccatttgcaaaagaacaaccttatttaccctatctggtaacgtgttttcagtctgatttggcgtttctggcagagcacccacaatatcttttgcaggagctgaccaatactctacgtttgtatgcctttagttggtgcgcacaactggcgctcaatctggacaactggcaagacggcgagccgcagagtaaatcattgttctttatcctcgatactgaaaaagctagctccgaacgagataaaataaagctcttcggctataagtggtttgcccgccaaagtgaaaaattattccccgtactctctgcattagaggtattacaagtaaaaggtgaggaaaagcgccctctttggcaggtatatcaagattgcttaggttattcagatacatcgaatcgagtactaaatgaactcaataattatatacagaagttcattagtaaggaggagcgagaccttcctgaacgcgatcgtgctacaaacctggaagatgcctttaaacagctgttatctgttgccgttgaacagtttcagggtaagaaaaccgagcgagcagcggtaaatcgcaaatacatcaacgagctggaaagccagatttgcactgacttcattcaggttcgtggccgagcggggaaagtgctggtactgaaccaggatcgactactgctactaactaaccttaccgtgggtaaaaacaaaaaactccgtctgcatgagctgctacgtggttttgagcaacgcggattttatctggataaccagtctacacaaatgctggttgcgttttatgaacgcatgggaaatgtggagagaatgagtgacagtggagacgccgtatatgtccgtaaaacagtatga

SEQ ID NO: 21562 - DNA, 5064 bp, Escherichia coli
atgtccgtaaaacagtatgaaacctatctggcagaaaccttcattgaatgggttagcagcatcatccagcctggtgagcgctaccagtttaaatctcccgatccggataacgccttaaagctctggaaggctttcgactctttagcaaatggaaataaactagaaattgcaccggagcaatttcttacctacgtccaatgtaataatatccagcttattccggtactgcacggcaccactacccctgcattcacagaaaactatatttctcatttacgcgatcaggtttctggccgcaatggcatttttgcccagacagcgttgttgattatccacaacagcatgctggataccttactcaatagtaccaaagatgtcgctgcaccggatgctatctggcatccagaaaccttccgtcaccagctcgaaaagttaatcacaacggacagcgcccgttctcaagtatcccgctgtttgctgggcgatcagttgacaacaatattggatgaaggcgctacggtttttggattttcatcgttataccgtctgctggacgacggcaatctggatttctcagagctaaagttattcaacgataataacctgctgaattttagtgataagcagttgcgcgcccggctcaatgaaaaccaaaagttatatcgccagatagaggacagtgttgaacgctacagcgggcaactggagaatgtactaactgaatttagtgcaaaattcattcaggagcatttcgttgacaatgacgattggcgtgagcttgatttctccgtctacctgaatgaaaaagcacaaaacagtgaacagaaactggtgttggaaaacattactgctgaaaacggtgaggtctggcaaagagccaaaagcaccagtaaagcaggtaaacgagatatcagtgtcctggttcaggttctaccggggcagtcacaagttgagctggagtttatcttccagggtaacgaccttcaggacaatcaggtaaaaattgctcatcatcgtccgttacagaaagaacgattctggcgtactagccggctcggggggagaaactctaagatactggcatcagtgccttttgatggtcggccctgcttctttagcctcgaaatcattaaccgcaataactcagcagaagagtacaagtttcgcctgctgttagttgaacaagggcaattctggcttaatgaaatccagcattgttatcgtattgaacctggtaaaggtcaattaactctgcaactggaagataatgagttacgtattgcagagttcggcgacaagacctgtttacttgatgaagaaagtgatgatgttgattgccgccattatgcactcgttaattttgaaacgctggcgaatcaaagtgagctgatcaaatttaccttgatttcaggtgactcccgtttactgtttaacatcgaaggtccaggagcagaggaaggattaacactgcctctgctttttgatcagggtcgtttcaataaactctttaaagaagaagggaatgcaacctggaacaagttgaaaggtcgcgtcatcctggacaatatcgaacataatgtggttggtgttcgccagcagttgcttatgcaagagtacgccctgatcgagcgtaatctgctcagcactggcagtaatggtagtgagtttgcactggatgagcttctggcgagctatcccgacctccataatgcgtaccaccaattgttcgtttactatcaacgtcgaaataccctgccgagtctggtgtcatggtcagcagaatatcgtgtattagtcagtcacatgatcgctacttttgaacaggcattacagcaaatcagtctaagcagagcattaaccatccaggaaaaacgtctgttacatctggggatttgccgcggcgacgattatgaacgtctctcgcctctgcacccattggtaatggcttatcatttacagctagctgaaactattatcgccgagcccggataccccacatcagcttccttcgcttcattaccagagattactctagatcgtctggtcgtctctggcctaatgccatttgtgtatcatagcgaacatgaatacgcacagttacaaccgatggtagaaaaccgcttctggatagatattgttccccagcgccagatgagccacgaatatgttaagcgtctggtgaaagacaagctaaacgaatttacagatgcctattctcggctgttccagagtgcaggaaataatgccctggttattaatgctattaatatgggagaagccagagagctattcctgggactggtagattattttaagcaggaaaaagataacgcaatttcgatacacgtaaactgctatgacgaacgtctgctacccaatgcctttgaccgctttgccgaaagcggcagctatgaacaacttaaaaatgatcttggtctgaacagcggtgcgtggcgttctgaagccgatatgttgatcgatctgcttcgcagtcgcttaacattcagcaaatttatcctgccaccggaaagcgatcaactggcttacgcccatctcgcatttttcaccaacaccgcaccggttgattgccgccaaattcgcattgaggatgctgccagcggggttttatgtcatggcttgattgcaggcgaaggggctgaaacacaaggcgatgcttactttaccgcgtttggtctgcgtaatgtcgatactgaatcgtcttgcgccctgcgtctcgcccgcttgttaggctgtctgtggcaaccggcacggcagagcaacagccagtatcacggtcagggaattagtctggctgtgagcggtaactttaagcaactgctgaatcgctcttatgatagctctctctggaccacaattatcgaccctaaggtcacactcgatttctttactagtcaaaaagatgtcgtactaattcattactctgaccagtacaccagttgtgctggttatgacgccgtaactgtcacaaaacaggttgagttgttcctgcgtctccttcaaacaggacaatccaccgttgatagccagcaactacttgctgaatttaatgcctttaacggtgagtggctgttaaaaatgttgcgttcaaatgaaaaggagcgcaaagaaaaacacggcattatcggtgcatacaaattcgtacagtctatgctgctccagtcagatatttgctggattccactgtcagtagctgagatgatccgcgtgtccggcaacgtcgggctgagaatgaaagaaagcgatttatcgcgccatttacagggttatcagaaaggagcgatctctgacgatgtgctctttgtcggtttcaaagataacaacctgtatctgttaccacttgaagtaaaaacaggagctcgccccgattacaaccatgcggggcagcaggcccgcgagctaaaacgctatttacagcaagatattcttgggccgaaaactctagcatcacaactataccgggcactttttatccgccaagtattaatgcaggtagagaagttgcgtctgtatggtgtactggataacgacaagctatcccctctgctggaacgacgtgaatggtggctcactggcgactatcagttaggtgagcttgctgattatgcagaaggctttgtggtagctcatgtagacagcggaacctgttttgatctctcttataaagaaacggcagagaatattctacagatcgaaatcccctattcattgcttccatcgttaattgcagcacaaggtgatcaacctccactagctgaacgctatcgggtgccggaaaaatatctgctcaaaccagagtgtgatgtcaattcttcacacccagtacaggtagcaacaacaactgagccgccgcccatttctgcgctggagcttccacaacctgaagcatcggcactaacccccagtaatgtccgcaatacaccattacagatcttgtttggtcatgatgctgtgcgtcagaatccattgtactgggaaccaaccaacaccgctaagttcatgaatactaataccggcattattggaacaatgggcaccgggaaaacccagtttactaaatcgctggttacgcaactgatgcgcaatcagtcctacaacgttgacggtaaaccgattggcttgttgatcttcgactataaatccgactatgtggatgatgcgtttcttgaagctacgggagctaagaggtatcagctatcgttgttaccttacaatccgttatcgttatttggtgatatgcccatgttaccgaggcatacggccatggcattcgctgaaacgatgggcaaagcgtataaccttggcgtaaaacaacgcatgaagctggttacgttaataatggagtgctatgacttagcaggaatagtgcctcatgatcgatcaacatggaatcgtgtagcaccgactattgaagatgtgtggcagcagtacctggcacaagagaaggtcgacgaagattcattatatgctgcactttataatctggctggtttccagatttttgaaacggatccagagaagatgaccagtttgtacgatctggttgatggagtcacagttatcgaactcgctggttatccatcagagattcaaaacctggtagttgcactgacactggatcttttttatgcgcagatgcaaaagcgtgggaaaccgacggtgcgaggtgattatcgccagttaaccaaaatgattctggttgatgaagccgataactttatgcgccaggattttgccagcttgcgtaaaatccttaaagaaggccgtgaatatggtgtaggggcgattctatcaacacaagaaattactcactttaaaacaggcgagaataattatgcttcttatattctcacttgggtaattcatcgagtttctgagattaggaattcggacattaaggcggtatttaacattgacgataaaagtgagcaggagtctttaatgggccagatacgacaacttgagaagcattttagcctgtatatagatggaaataaaaaagttaggaaaatgcgtgataaagcattctgggagttaatgaaatga

SEQ ID NO: 21563 - DNA, 999 bp, Escherichia coli
atggctaaaacagtagagcagatagccagcgacctgaatttatcggttacgaccgtgcgactggtgctaaatggaaaagcggaacaatatcgaatcagcgtcaaaacccaaacgcgtatcaatgaatatgttgaacgctatggttatatcattaatcattccgctcgcagccttaagcttaacaaaactgatacattagggttgattgttcccaacatatccaacgtcttttttgctacgctggcagaaaaactcgaacaacgctgtcgacgttccggatatcaacttacaatcagttgcacttatgatgatgttgactatgaaaataaattgacgaaagcatttatcgcacgaaatgtagatggtctttttattgttccttcgacgctggaaaatcagcagcatcatttacgcaaaattcgtaagcccatggttttactcgatcgtgattttaaatataccgataacgcattggtagagagtaataatatttctggcggagaaaagctgacgcaaaatattcttgaggccgggcaggctccagtatggtttttgctgggagatgccggtttgccgagtatcagcgatcgtctgacaggttatttgaatgcgttggcaaaaaaagggattacccatcgcgattgggtgcgggaaggtccggtaaatactccggaaggcggctatgtcattatggaaaaactcattgaagagcagggatgtccgcaggcatttatcgcctcgtctttgcctgtgcttgaaggcgctgtccgcgcgattcgcgaccgtcttggcgctgtaccgccagaaatcaatattggcactttcgatgaacatcctatgctgggatttctcgccaacaatgtctggtcaatgcagcaggatgaaaatgcctgggcagaaaaagcgttcgaaatgatgttaagcgcgatcgaagaaagaccagtcaaaaaaacagttaaagtaggaatgaaattaattaagcgcataagaaaaaaataa

SEQ ID NO: 21564 - DNA, 1581 bp, Escherichia coli
atgcacaacggttattttctcggtgtcgatgtcggatcggccagtgtcagggcaggtgtttacagtgccagtggccacaggctggcattcgctactgcgcccgtctcccagtttcgccctggcggcgagcgtgtcgaacagtcttcggcagagatctggcaacaagtttgtaaaacggtgaaagaggcgacagctttggcaggcatccccatttccgcaattcgctcactgggttttgacgctacctgctcgctggttgttcttgatgaacaaggccagggtttagcggtttcgtccggtggatctgcgaatcacgacattattatgtggatggatcatcgtgcaactgtcgagacggcgcagattaacgcaatgaaggatcccgcattgcgctacgttggcggcgaagtgagcgtcgagatggagttaccaaagttacgttggttgaagacgcatctaccgcaaacctggcaggccgctcatcgctttttcgatctggtggattttctggtctggaaagcaacagggcgagacgtcgcgggattatgcacgctaacgtgtaaatggaattatctagctcatgagcaacgctttagccatagcttactggaatcgatagacctgaccgatatgcttgaaagaattcctgccgacattcttccgcctggcgctgccgtgggaacgttaaccgccacagctgctgaagagttaggattaacgactaatgttatcgtggccagtggcttgattgatgcccatgccggtggcgtggcgctggctggcgctcacccatcaggaacgctggcattgataagcggaacgtcgaactgccatatgctgtgtagtgaaaaagagatattcacccctggcgtctgggggccatactggtcggccatgttgccaaattactggctaaccgaaggcgggcaaagcgccgcaggggcgctggtggagtggacgcttcaggagtcaggggcaagcgcaaatctttttcacaaggcgcagcaacgcggatgtcatccgattcaactgattaatgaatgggtagcagcccttgaagctaacgagtcagaacccacacgaaatttacatgtgcttgccgatcatcacggcaaccgttcgccacgagcgcggcccgatgccagaggcagtgtttatggcttaacactggagcgtggtgaaaatcagctcgcgcgactttatcttgcgactttacaggcaatagcctttggcaccagacatattattgaaactctgcgggaaaatgggcataccattacccgattaacattatgtggtggtgcaacgcacaaccctttatggctacgcgaatatgcagacgtgacaggttgcgatatccacctgatgcaagaagaagatgccgttacgttgggcgcagcaattagcggcgctgttgccagcggagcatggggggattttacatctgcgtgtaaagcaatggttgaagccggagagattattcaggtaaatccacaacgccgtgaatttttagagcgtaaataccgggtttacctgacgctttgggagcaacaacaggcggttaaccaactgatgcaataa

SEQ ID NO: 21565 - DNA, 951 bp, Escherichia coli
atgaaaaccaggcattttatctatgcgttatctctgctggcttgcgtaagttccagcgcactggcgaaggatttaaatcttccggttgttagtaaaggtttccaacatgaattctggcaaaccgtaaaaatggggactgaagctgcggctaaagagttgggggataaaaccagctatgttggcccggctgatgaaacgcaaatagccgagcaaattcagttagtcgaaaatgcgatggcgcagaaaccgaatggcttgcttctggcagccctcgacgcgaatgcgctcgccccactggtagaaacggcaaattcacgcggtatcaaagtggtgacctttgattcaggcatcaattcagacattccggtgagttttgtcgccaccaataaccgtaaagcaggtgctcaggcagctgatgccttagcctcgcaggtaaataataaagggaaagttgggattatcgcgcacgttgcaggaacatcttccgctattgaacgctcggaaggcttcatggagcgtatgaaagaaaaatatcctgacattaaagtcttacccgttcagtacagcgatggtgacccgcaaaaagcgatggataaaactatcgatatgattcaggccaatcccgatcttgctgggatctatggcaccaatgaaggttcaacgctcggggtggcgaatgccattgatagccagaatctgaaaggtaaggtgaaggtcattggttttgatagtacggaagcgattattaacttcctgaagaacggcgtcattcagggctttgttgttcaggatgcataccagattggctatcaagggatcaaaacgttgaacgcggccctttcggggcaagccgttgaaaaagagatcgatattcccgtgaaatttgttaatgccgagaatattaacacgccagaaatcgacaaactcctgcacccattcggtaagaaataa

SEQ ID NO: 21566 - DNA, 984 bp, Escherichia coli
atgactatctctgtaacctctccagacagtaataataagaaaataaagataaataaagaacttttgatgcgccttgcgcctctttttagcttaattatattagtgctgttttttagtttcagctctccctttttctttaataccgaaaatatcatgacgattgctctgcaaacgtcggttatcggcattatggccattggggtaactttcgtcattattaccgcgggcatcgatctttcattgggctccgtggtggctttttctggtgtcgccgtggggatttgcgccacactgggcctgccgctgccagtgtgtattattgccggtgttttagccggtggaatgtgcggctatgtgaatggtttgttggtcactaaaatgaccattccaccatttatcgctaccttgggcctgatgatgtccgtcagaggtatcaatatggtgatgaccgacgggcgcgccatctattttgccgattacccgatgttcaaaacgctcgctcagggacgcttatttgatgtgctgccttatcctgttttctaccttgtcattgtagcgcttgtcggcgcttacatcctgaagaaaaccgtcattggtcgctatgtctatgccgtaggcagtaatgaagttgctgctcatctttctggtattaaagttcagcgcgtgaaaattttcgtctatgccttctgtggattattaacggggattgcaggtgtcattctggcatctcgtctcaactccggacaaccgacggtaggtgtgggttatgaactggaagctattgccgcggtagtgattggcggaaccagcttaatgggcggtattggcactattggcggcacaatcattggcgctttcattatgagtgtactgaaaaatggcctcaatttaatgggcgtctcccagttctggcaaatggtcgcgatgggcgtcgttgtggtcgctgccgtttacctcgatacattacgcaaaaagattcgttga

SEQ ID NO: 21567 - DNA, 1500 bp, Escherichia coli
atgtccgaaacatttttgcaaatgaagcatatcaccaaacgctttcctggagtgttggcgcttaatgacgtgcaattttccctacgccggggcgaggttcatgcattattaggtgaaaatggtgcaggaaaatctaccttaatgaaaattttgtcgggggtttatcaacctgatgaaggcgaaataatttttgaagataaaccagtctcattttctgatccgttaagtgcgcaaaacgtaggtattactattattcaccaggaatttaatttatttcccgagcttacagtagaagaaaatatttttatcggcagggagttttgtaaaaaaaatcgctggcgtctggatgaaaaacagcaacgccaggcgacgattgaaattttgcaaaaattaaatttggcgatcaaaccagatactctggttgccgaccttacggtagctcagcagcagatggtagaaattgccaaggccatttcagttaacgccaggattctcattatggatgaacctactgcggcgttaacagaaactgaaattgaaagcttatttcgcgtcacccggttattgaaagagcaggggaccggcattgtttatatctcccaccgtctggaagagttggcgctaattgccgaccgtgcgactgtaatgcgtgatggtcagtacatcagcacggtggattatgagtgcgtaaaaatcagcgatctgattgccatgatggttggtcgcgatttagggaatatctatccccgccgcgaggccttgcagcagcggattccggttctggaggtaaacggactgacgcgcaaaggcgtcctgaacgatattaattttacgctttatcgtggcgagatcctcggctttgccggactgatgggcgcggggcgtactgaacttgcgcgtgcgatttttggtgcggattctattgacagcggaacgctaaaattaaatggtaaggaaaccgttattaaagatatttcggatgctattcagcagggaattagttacctgacggaagaccgcaaaaaagaagggctggcgctgaatttatctgttgaacgaaatattatgttaggaaactaccctgaatattccgatcgttttgggaatgtcgattcgcgtcgttgccaacaaaccagtgaggaacaggtaaaagcgttaaggattaaaacgccaaatcttgaacaggcggcattaaatctaagtggaggaaaccagcagaaaattataattgcacgttgggtgtgtaaagatactgatattttaatcttcgatgaacccactcgcggcattgatgttggcgccaaactggaaatctatgagttaatgaatcgcctggtggcaaaagggaaatcaatcatcatgatctcctctgaattgcctgaggtgttaggaatgtgcgaccgtattttagtgatgcgcagtggtcgaattaccggcgaacttagcgcaaaagaagcgacacaagaaaaaattatgcaatacgcgacgttagaggattaa

SEQ ID NO: 21568 - DNA, 1875 bp, Escherichia coli
gtggccagcgctcctgcagctgctgaaccggtggaagccgcgccggtggccagcgcccctgcagctgccgaaccggaggaagccgcgccggtggccagcgcccctgcagctgctgaaccggaatacgccgcaccaacagatcgagacggcgatgatgaagagagtaatagcgccagtgatcttgaggcgtatgccgctatgatggcctttggcggtgaaacaactgacaccgctcagcaaaagcctgaagggatagcgcccagcgaacctgtagctaataccgccccggctgaaaatgaaaccgaggagaagaaaaaaacaaacgaagaactggaaaacggcatacgctgggcaaccaacgataatgcagaaacgcccccaaaagaacgtatagacctggaagggttaattgcccggtttgggtacagagcagagaaagactatacggcgtatacgcttgatgggcaggatgcgttttacgattacggctcacatctgcgtatggctacccctgaagccagccagagtgacgagatgatcctggcggccgttcttaccgcggataagcaacatcatcgtggtattgaaatcaccggcagtgacgaatttaaagagcgagtgtttaaccttatcagtgaatacaacattgaggtgaaactgacaaacccagaacaaagggttaaattgctcgaactcaaaaaagcaaatgaaacagcaaaagaaacggcaaaagaaaatgttgctgattcaaaagcgaataagcaggaaggggcaaacgaaaaggcaaattcatcagctcagcagaatggaatgcgctgggaagaatcggcctctgtacaaccgaagaagcagaatgcatctgatactcaaaaggaagataaagctgcgggtgaatcctgggagaaaggcgttatcgtcgcgcatggacgtgctaagtatgagtggaaagatgatgaatccatgaactactttgtcaccctcaaaaatgaacatggagagaagacactctgggggaaagaccttgagagagcggttaaagatgctggtgtagacaccgaacgtcttgttacagtcagaaagctgggatttgtggatgttgaggtgaatgcacctgtccgtgatgaaagcaacaagatcgttcgttatgaaactatccagaccaaacgtaatgagtgggaagtaaaacctgtatacccacagccaacagcagggaatgaacaggcctataagccttctgaactggttccgtatgatgctgcaaccttccagaagctccgcacaacaattcagcaggttaccggtgttgatctcagccgtgaggccgtgcctgaaaaagaactgtattggttcctgccgaatggtaagccagctcctgaaagcatgacaaaacccacaggctataaactccctcaagagtcaaaaaccgcgggtacacctttgctggtcgcaccgcataaaaaaggcgaacgcccggattattaccttgttgagtctcgtaaaggattcatgcaggggatcgcaaaagataaggaatctggcgagtaccatagcgtaattggtaaagtgaacaagcgtattgataaagatggaaactggaaaacgtatatgacactttcagcaatcaataaaaattctgaaagtggaattgttttgcacggatacggccatgttgatcaggggggtaaaaacctgctttacaaaaacacaattgcaaatgaaaaacagcctcagcatttacaaccggcctcagatgaggtaaaaaacaaaacagtaatgaagcagctttttcatccttctaatgctgcaaaaagaaaagatgatgaaaggagagaacagactcatgcaccagtcgcaaagtcagcgcctcggccataa

SEQ ID NO: 21569 - DNA, 513 bp, Escherichia coli
atgcaccagtcgcaaagtcagcgcctcggccataaaacaaaaaccctactcgtagcagtagggttttcctgcatttctgtgagctcatttgcagccacacagacctgtgcagcatacgaactggcaaaagctggtgctgatgctgcctataaacaggaggttgaacggattaacaacgccgctaaaagtgaatccagtacatctgattctctcggacagtgcctggggtcgctatcggtatcactaaaaatccctcagtttccgtctatcagcgacatcattgataaggtgaaggatgaggtatgcaatacggttaaatcgaagattaatgagaagtgggggagcctgactaatacgacgctggacccgtggtcaacgatttcatcccgactgccagatacgtcaggtatcctgcccaacgcatcttctaagaatgtgcaattaaacaatccggcagctgcgagtggaagtggtgaggatgcaaacagtgatgcattcccgttccatttgtaa

SEQ ID NO: 21570 - DNA, 198 bp, Escherichia coli
atgaaatcagctgaagactggctgcatactgtcagacgtttcatgaatgaagattcgcttgatacgtatgtagactcaaaacgtgatgttctacctgccacagaatttatgcgtttactaaccgcggcggaacaccgccgcgttgaaatacgaaccggcaagctattcgataaaatcccgaaaggactcttccggtag

SEQ ID NO: 21571 - DNA, 411 bp, Escherichia coli
atgagcgaacataatgattacgaatcctgtgcagttatcatgtgcgaacgacgaaaagccaccgccgttttgcgcaaaatcccgccagaaaaccttgaacaactcattaatatgtggtccgacattgcacagggaatgatcgagaaatttaaggaagaacagaaggccactgaagagaaagccgcagccacaaagcggttcatggaagaacacaatattacggctgatgaagctctccagatcttcgaaaatctctttggtccgtccacgaaaagtaaatccacttttggaaaagtgaagtaccggatcgaagttgatggaaagtccataacctggacaggaaaaggtcgccgacctgcagcgtttgccgagatgagcgacgatgagctcaaaaaatatgaaatcagctga

SEQ ID NO: 21572 - DNA, 714 bp, Escherichia coli
atgaaaacacaaaatggtgaaaatattatggatcaaactgactcggatcaaaactcagtcgttgatgatgacagcaacgcccttgctccagctctggctgaagagagtaaccgaacggtacaagaaatcgtatcgaaacatggtctaaaagtaattttgattcagacgctaatcatattagtcgcaatcattatcatcggtcttcaggggtactggctacaccagaaaaaaactaaatatattgcaacgaatgggggcatgatcacagaagtacacccaaccgatgaaccggcttacacagcggaagaggtgatggactttgccaaccgtacaatgatcaaatcgctttcgctgaactttgtgaattacgaaaaccaattaaccagcgtccgtggcgattttagcgctgaggggtacgttagtttccgtaaagcgctgaccgatagtggactgctgaaagatatcagtgaaaaacgtctgaacgtaaaactttccacaacaccaggaaccctgatcacggaaggtcttatccgtggcaccaaaacctatgcctggcaataccgcattccggtgactgttcagcttgttggtcaggctcaggactacagaccacaaccttacgatttgatggttcaggtacgccgcgtcaaagaagacgaagatccacggggtattcaagtagcgcaggccattctcaaaccccggaactactga

SEQ ID NO: 21573 - DNA, 1152 bp, Escherichia coli
atgaagattaaactgttaactgtacttatggccgcactgttttcggcaaattctgtatctgcagctgatgcaccgactggtaatggatcgccgcagcaaacggcgccagctgtgcctggtggtgatattgctcaatggcagcaggccagttccgggttgcccgtaaatcagcagtcacaggtgcaacagccaccacagcaaacagcacaggaacaaggtcagcagcaggcgcaaggccaacaaccacaggcacagccccaacagcggccaacgactgcactgcctcctgcacctatgccgcagattcctccgccacagcagcaggttactcatgttaatccgcagacactggaagagttacctgcacctgttctgcagcagatccagcctattacccctggtcaggtgcggtcggcccgcagcgcaatggaagatatgagcgcggcggccaaaacctcaccattaacgccgatcccacgaatttcaagccagacggtatcactgtcagctggcgcatccattccgcaggtacgggtatttccaaaccaggcaaccacagtgacgttttcagatgcaaccggacacccctgggtattaggtgcccctccatataattcgagtccctgtgcatctggtggtgaactgtgtgttggctatattccaggatcggcggtattcacaattcagccgaccaatgcctatgccagcgggaacatcacagtgcttctgaaggggctggccacgccggtcattattaacgtgaagggggcagaaccctccgttaaatcaaaaaccgttgatgttgattatcgtctggatctccgtatcccgaagcgcagtcctgacacaccggtttataccgctacgcctgagaaaaaaatctcactgtatgacaagcagctgcagagcgtgctcgatggcatcccgcctgaagatgctcagcggttgaaacttaaaaacgcgccagggagtaccaaagtctggcagatcggtgatgaactctacgtcagaagtaacatgcagctgcaggatgagtttgagaaaacgctttccgctatcgatggcacacatgtttacgtgctgccggcaacaccagtgctgactttttcggttaacggtcaggcgcgtgacgttgaagttgagctgaattaa

SEQ ID NO: 21574 - DNA, 1350 bp, Escherichia coli
atggctacagataaaggtaaagaaaccagaaaaatgatgctctacgtcggtggtgctgctgcagtggtggcgcttctgggagggtactggttgtttggctcatcagatgagccggcaacgggcgggtcgcaggtgaaggcccaggggctggaagggaaaactggcagggaaaaagctaatgatccccaatacaacaagctgctgaatgagtggaatgctgataattcagagaaagcggcgctcacgggggatagcttcatatccacgttgtcagccagtaacccggtggccgttgattacggcaccaaaacaccgccaccaaaatattcgtgggaatcgtcagcaaaaccgtcgggcgataacagtaaggctaatgatgctgagcagaaagagcgtgagcgtcaggctaaagctgtggctacgttactgcagaaaatagaccaagccagaacaccagttgtcacgggtgttgcacttgcaacctctctgggagctgagggaaatgacaagaacggcggcaccttctcagggtggaccgattcggtctatccgcaaaacaaaaagccggatgctgaaaaacaacagggggcgaagaataaggccaaagataagggagcccgacttgtatcggcgtacacgcttgtgccggcggtaatggatactgcgatggacagtgacgatcagaacagtattgctattgcccatgttccgactggagcgcaggccggcgccaaattctattccggccaaaaccgtcttgccggcgatggtattcgaattcacttcaccggcatggagctgaacggagtgcagtgtaaggtcgatgcgtatggcgtggcttccgactcgttgcgcgcggccgtttcatcaaatgtaaataaccgctggttcagccgtattattctgccggctgttgctaacggattaggccgaactggtcagctgtatgcggacagcaattcgcagatgattatcactgacggcgggaacgcatatcgttcaactgatacacctgatggcaaagcggtagccggtaccattattggcgggatgggtgagcaagcagggcgtgtcctggccgacgatgcagcccgcctgccgattaagcaggttacggttgatcgtaaccaactcataggcatccagtttgtcgcgcctgtgtatgaaagcgactgtggcgagaatatggaaaatgcttctgcagagcaggcgcagcagcaagcaactccgacactatctagtgtgcaacctcagcagatgcctcagcctccggctcctaattaccctcaacaaaactttccaagctaccccggctacgggtatggcaccaataacccgtattaccgttaa

SEQ ID NO: 21575 - DNA, 705 bp, Escherichia coli
atgaatctgtttgaagatgacaataaaaacgaagcagctcctgcccaggaaccggtgtctgctaagcctgctgaaaagccaaaaccgacagtgacgccagcagcaaaagcgagcaaaaagccgcttaatattagtgactatgcatggattggtggtatcgctgtcatcggtatcctgcttttagtctggttgtttgggggctccgatagtgacactgcgcctgcggccgggaatggtacgatccagtcttcagggcaacgtcagaacgtacaggctgcccctgccgggcaggattcaggtgacttccgcgagcagatttccgggattctgctgcagcaaaaggaacggctggacgcgatagaatcaacttctaaaaatggaatgatgatcctttccagtcagttacaaagcgctaatgaacaaatcaaaaatctgaacaatcaggttcaggaactgaaaatgaaagccgctggttatgggccttcatttggtaatcagagtggaacaatttccggttcaacgtcacaggcattacctttgttgagaggtttttcaattaatgatttatctggcgatcttgcttgggtaaaatacaaaaaccagacgtatgctgtgaaggtcggaagtcaacttggcggagtcaccattacgggtatcgatactgaaaatagaatcgttactacaagtaaaggccttatccgctaa

SEQ ID NO: 21576 - DNA, 531 bp, Escherichia coli
atggatttagaatcggtattaattcaggttgctaacggtggtcaggaaccgctgacaaggctaatcataggtgtcgctgcagtcgttgggatcattggtgttattggatatctgatgagcctgcgtaagcaggccaggcattctaccaaaggtgttgaagttggcagaatttttgccgggatcatcttctgtgtatgcctcatcacgctgaaagcacagatgaactcaggcggtgccactttaggatttggcgatgtcagtttcggacccgtcagttatgcgagcgaatctacgtttggcatgggagccgcagcagtcaacgccgtgctggggattgttagaattctcggtgcatactttttttacaggggtattaaggggttgaaagactcttaccttgagggccatacggagctgtcagcttcgggcacgagaggggcatccattgtgaaaattgtatgtggactacttctgatgttcgatacacaaacgctcgatgcgttgcagagcacattaaacattcactggtaa

SEQ ID NO: 21577 - DNA, 390 bp, Escherichia coli
atgaaaattgttaaatttatcaaagacaaggcgttatctgcatccatcgcagcgtatcagctgcgcggaacggtagcaaaatcgttagtggtattacccctggcattactgagcaaagaggctgcagctgaaacgactgtctgggaaaagatcaataccttcacagaaggtatggccagtacccagcctggtctgattaccgctggtaaagtggttggtgttgtgtgcttcatcgtaggtcttgtagctctgtggctcaaaaacaaacgcgggaaagatatcagtggcggcttcatcttctggtcaatggttgttggagcctgtctggtcggcctgaccgcctggatctcttctgttggttcaaccgttggcgttgacgcaaccctgtaa

SEQ ID NO: 21578 - DNA, 495 bp, Escherichia coli
atgaaagattttaagctcaccaggaatgaacaacctgccagatgccatgtgtgcgggataaagagcaaagatgttttctccctcgcagaagatggacagaaagagagaatgctttgctctgtatgcctgtcgctcgaacacccggagaaaatgaaactagaaactcaaaccggacttctgctgaagagaaatacaaaccgaaaactctacagcctgttgtttcgttcaattgcaaaggcggaaaagtcaacggacgattcttaccgtgaaaaggcacagaaacttaaacagattttgctcagcacaactgacgtagttctaaacgaaaccggcagtgatgatggatacgatttactgcacctgataaaaaaacaccatcagttacttcccatgaattttgacgatgagtttgtcacttctgtctcagaatcagacgaattgccggacgtaagtgactggaatgaaatttacaagggtaagagaggttttaaatga

SEQ ID NO: 21579 - DNA, 3051 bp, Escherichia coli
atgatttctttctttgaggatgtgatcgaaggtatctcacgcaatcttacgtcaaatgactcgttaaaatactgtgatttgacaacggttgtagggcttacgtcgcaggatcgcgttgagcatcctgaaatcagggctccgtacattctgaccacgaagaacaacgattttcttaccgttattgaggttcagggcgctaaatcatcgtttgacgagaagtcgtttaatgacttcatcatgcacctgtcaaactcgttgtcgaattcctttattaacagtggccataagctgtctgtggtgtttgagcgcgactttaccaagaaccaggaagaactgaataatgtttataaaccgcaggtagcagcaatagagcgcctgcagatagacattaaagacctgatcgccgatgacgcaaaaaaaattgctgcccattacagccgtgaacgcgcttacatcgtgctgtatacctcgaaggggatgattgcgaaggatgaacttaaaaacgagcaggcaaaagctgccggcgttatgaaggatatcccgcagactcgcttcagtcagaacccaatcgaatttcagcttgaaggtttgaagatcacgcatgacgcgatgctgtggcggctgattggtatgcttcagggggatgatgagtcggggatggggcttttggttgatgtcctcgatgtcaaacacgccggcgccatgatgcgtcagatgctgttccggaactcaacatcagaaaactggtaccctcgcacgccgtttgaccaaaatctgcgagtttatggcgctccacggaaaggcaatatcgactcagtgctgccgccgcggctgaatatccagatcatggaaggggaactggaagaagatggtggcctgatttactgcgatggcaagtattacggctctgttgcccttgagttgccaccacttcaccctgtcaaatttaagcagttattcaacgcgattaaccggaaaatcccgtaccggataaaatatgactttatgggcgggggcaaaaaagcactgttctggccatcagtgatcatctctttccttcgtttcattccctcactcggtactatcgcgcgtgatatggattatgtcggggcccagagcgaaaccgatccaacggctatcatggccatcaactttgccacctggggtgacactaaggatgaagccaaacgcaacctggcggctttaactaaggcgattgaaggctggggtgtatcaggtgtgtccaagacgtatggtaatccaggtagcgcactgattgcatccgttccggggctgacgacggccacacctggctcattgcattatccgccgttgagtgaaggcttgcggatgttaccttttgaacgtccggccagcccctggcatggtaaaggcaatatcaacttcatcacgctcgatggcaagctgttcccttatcaaatcgccagtcccctgcaggagaaatttaccgatgtcatcaccggtgttcctggttccggtaaaagcgtgctggccaaccgtcttaacctgagcgcgattttccgggcagataaaaaattgccttatctgaccatcattgataagggatacagtgcgaaaggtattgccgacctgatttgggctgaattgccggcggatctacgacacctggttgccagtatcaccctgaacaatgacgaatcgcactgtattaacatctgcgatacgcagttaggttcaaggtatctgacgcagtttgaggaagtattcttaaagcagatgcttaacgcattctgtattgatccggcaattggccagccgccagatgcaatgagcgttggccaaatcgtcagtaaagttgtatcaagagtatacaaagcaaaagctcattctgacgcaaataagtttaagtttaacgatccggttgttaatgaagctctgaaagtatctggtctggatacagagctcggtgaagactggtttgaaaaagctacatggtgggaagtcgttgataagctgtttgccaaaaaatatttccatgcagcgacggttgcccagcgttatgctgtgccgaccatttacgatttcattagcgagctacaagaagaaggttttagtaagcaatatgcggatgtaaaagtcaatggaagtgagcctgtagtaaactttgttgcacgttgtttccaggctgccgctgctgactatgccattttctctgggatcacggtttatgatttcagcccagagactcgtattgcgatcctggatatgcaaaacgtgctcggtgacagaacgacacctgcaggcaagctcaaatccggcattatgtatctctttgcgcgccagatggcagtgcgtaactactatctacctcagtcagcagaaaccttcattcctgctttaccggagcagtacagggcatatcaccaggcgcgcatcagggagctttcagaagaggttaaacataccttttatgatgagtgtcataactttgccggcatcgactttattcaaaatgcgctgaataccgctgaccttgaagatcgtaaattcaacgtccgtactgcgttctcgtctcagtatctgagccatatgccttcgagcgtgcttaaaaccatgaacagcctgtttatgatgcgcctgacggaaggggatgaagagtatctgaagcaattagagataaacatcccggccgatatcctgcgtcgtttcagacagcttccgcaaggggtttatccggacggaagtggtactgcatttctcggtatttttaaaacgaaacgtggtcttatttgccatatactaaaaaatacattaggtccaaaactgctttgggcattgaactcttctgcaaaagatagggcgctcagggatgtgctttatgaagagctgggaacgaaacaagcaagggaagtattagcaaatagattccctatgggaagtgcatcaagtatcatagatgaaatggtggtcaatcagggtggtgagcgtgattcagaagaagaatcacaaactatggcgatgaaactcgctaaagaaatcatttctgatgtgagaaggggattcagatga

SEQ ID NO: 21580 - DNA, 1209 bp, Escherichia coli
atgatgaaaatcggaaaagcaaaacggtcagtgatggccgtttcaattctggccttcagcgtacagtcagcatttgcctatacggtcaacgttaacagcagcattcccatctcaacgcaggttatgccggcgttgagcacagctaatggcctgttaggtaacatccaggccacgctgattaacattggtacggcaattagccagcagggcgatcgccaggcagcattaatgcagcaggtggccgaaactaaccgacagttcgaagtcgagcaaaaacgtaatgaccggctgctgcaggcacaggataagtaccgtgttccggatgatatctgtgcgcagtctattggcggtggtgccgcgggggtatcctcagcggccgctggcggtcagcgaacgctgggaagcgccagttctgcgaaagatgttaaggccatttttgaagtgccggcacgcgcaaccgacgtggacgcatcttcaacggccgaagttcacagccagtactgcgacagttcggattatgctgcatttggcgggacttcattctgcccaagtgtatctgacatgccgcgggcagatacgtcgctgagctcgttgctttatggcgccggcaaagaaggcaaggcacctgatctgacgtttacagatgagcagacagatgcggcgctgcgctatatgaaaaataccgcgttgcgtagtgctggtcgtcagctgagtcgtggggaagttaaaggcgccagcgggcgaatttacctgggcatgattcagcaataccaggcgctcaccgacgcggccgcacaacctcagatggaaatgatcgccaactccaaaccgaacccggccactgatgccgcgcttgcagatgcacgcaaagtgccggaagtcgaatcctatttccaggcgacggccagtaacagggcgaaacagcttaaccgtatgtctgccagagaattcgaggagttcgaagtaggtcgccgttacagcaaccctgcttaccaggcgacgctgaccaacaagaacaccgaagatttgatgcgtgagcaaatcaatatcgccaatctgaacaactggttagtgctgaaaacaaaacagcagctggagaaacaaaatgtgctgcttggccagatcctggcgaacgatgcatatcaaacatacaaaccgatgctggcagcacagctggagagtgtgaacgcgggggtatccagaaaatga

SEQ ID NO: 21581 - DNA, 651 bp, Escherichia coli
atgacagacgaaaataaaacaggggataaagacacagtcaaatcagggaaattaaaaaaagggcttgatgctgtaactggagtcaacgacctcccggaagggagggctaaacgaacgatatattatattactggcatcagcgatatatatttcattatcgcttcagtaaagcaaactttcagcctgctctttcagcgggcttcattcgttaagaagcaaataaaaaaccttgatggtccacctgcagactctgatgcaaatcagccgtttgccgaagttatgaagcggagcaatagaactatatcagaattgttggataaggccagtttatacaagaaatactggctttgttgtttttttgcattagtgctcattctcctttttttaacctctgggtatgccagattgcttgtcaatggctcaccgaacatgagcttgttaagagcaacactcacctgtggcgtactgtttgctgcggggatttttgctttcattaaggctctcacatgtgagttcatggggtggcagttacgcaaccaggctcactctgatgcagagaaaggaacgttacgttatttccttaatgatgggggagtgcgtaatacatttaatttttcgcaggctggtcaagagcgggggccacatgagtaa

SEQ ID NO: 21582 - DNA, 2181 bp, Escherichia coli
atgagtaaattaaaaaggttgcttctatctcttttcgttgtggcgtcaccttcgtattcagcggatttggggattgatggcataactgaagcggctaaacgttcaggtgacctatcgcgtcaaatgttacataccgtttttggtgaggtagttaataatccgtttagcccttccggcgatggattgcttaataacgttttcttcactgtcaacgaagttatagcgattcttgccctcgtctatatggggataatcagcattaagaaacttcaccaggcaggtcagttgggaagttttattgagggtgatggcaacaacgcattcaaaatagttaaaaccacttttgggtggttgttgcttgtacctaccgttgttggttggtctgtggcgcagctgctttttttatggtgcgggtcaatcattggtgtaggatctgcaaatgttatcgcagacaaaactgcttcagaattagcgagtggtaaagctgtctatatagctcctgttatgccagaaatggcgtctgttgcaaaagggatgtttgaaacaaatctttgtgctttgggtgtaaatcaggggattgctcaaatggaggcttctggccaacattatgagaataacgccagaatgcaataccaaacaggtgatagcacatattcgatatctgtaaacaacggatcggctgtatgtgggaccgtttcgctgccacaacgtcctgcaggatggacatctatcttcgctagcggttatgcggattccgtttacagcgttcagcaacaagcaacggacacgttgtggggaaaaatgaaaactgctgcagaacagtttaatgcagcatatatggcaaaaatgcgttccggggacggtgagctaccagatgttgaaagtgcgatccagactgctgcgcgtgattatcagcttcaggttcaacacgctgctaattcagcagccggtgacgacgaaattgttcaaaaaatggagtcggatatcaaagagaaagggtggctatatcttggtgtgtactatcacacattagctactgcgaataccgagatgaaagatgttgctaacctgaagccggtagtttcgggaatgagtaatgatggtgatatcggttctatcgattactttaagggcttgttccaggcttaccactctcaactaaaaaatagtaattatacgccgcctcttggcactgaatctaacgcactggcaaggaacattgatcaaaaaagccttgaaaatgctgccactactggagacggaacgtcccttattacaaaaatttttgacttcaacgttacaaactggcttgcaacgagtaactacggcactggtgatggttacagtgacgtgactaaccctttactcaaaatgaaggctatcggcgattacacgttaggtgtagctgaggttgggctggccagttggaccgctatcaatgttgctgtgaaggtttcagaaggaaagagtctacccggatttgctgcgggaatgatgaacaaacttacagggattcgagatgctattgcaggcgtattagaatcggtttctttcttggtttacccgctattttatagcctctttggtatcggtcttgcgctgtctatctggctgccgtttataccgatgatttattggtttgtagctatggcagattggctggttacgcttatgacaggtgtattggcgtcttccctgtgggcagctacccatatcaacattggccagagtaatgatgagcggagtacatatggctatgtgttccttatcgatgtaatgattcggccgatgctcatggtaatggggtttatttttgcctcactggccatcgtagctttgggaacagcattaaacatgatgtttaaattcgctatggaacaggtccagtctgactctttcactggcctgctgtcatcgatcggatttttgatgttatatgcaaggctttgcacaggtatggtggctcgcgtatttgcacttcctgcgaggatgccgaactatgttataaactggattggacagaagatgaacgattcagtgttgggtgatatgcagaaccatgttcatgacatctttgctgcgttcggtcgtggcgccaaaaatatgaaccggaacaaccctaagcaatttaatcctgacgcaggtgtagataagagcaaggatggcatcaaaggagcttaa

SEQ ID NO: 21583 - DNA, 654 bp, Escherichia coli
atgaatgcgttatcaaacactgactttaagaaaattagtaacaatgcgcgtcctaaaaggcttggatactacgcatcatggctctggatgatgtttgtattcctcttcctgttcgttagcgctttcgtgtttctgagcggcttatactggacgattagagacggttcaattcaggagcactggtttagtacagtcggtatctttgtgatcgatgcagtgctgatctggatgttgaaaaaggacttcaggagccgcaagctctaccaggttactgcttcaatgaaaaactctggtttcttcgagcctcataaggactgtgagcactatgacctggcccggaggacttacataggctttgacttcagtacaggaatcataggagtagcatccctgtatgcaacatccagtattaaacgtgagcggctattttttgaagctgaaacagtcgagtcatgggagtcagtaggcagggagttaatcataaacctgcgaaatacggggctcacgacgatgacgatcacagctccaaatatcaataaagcgtacagggatatggaaatcatctgcagaacgcataaaaatagggatgaaaactatcagcatctgaagagtaaactgacagacgcaggatggttcataaacagcaattattga

SEQ ID NO: 21584 - DNA, 231 bp, Escherichia coli
gtgaacagagttactgagcgccaggaacagaagagtaacccggagttccagagagagtaccggaaccgtatccgggaaacacacgaccagttaaacctttatctccccaaagatgcaaaaagaatgttgatagagatcacaaaagtgaaaaagctcactcaggctgaagttattgaatttcttgtcaaaagctattatgacggcttaaaatttgacgattcggaagagtga

SEQ ID NO: 21585 - DNA, 1056 bp, Escherichia coli
gtgaatcaaaagaatccatacctacagctttctgacattgagtcagtagaaggtctttcgccggagttcatctcctggcttgaaagccaatcccctaaagaatcaccccggcaactgcctttaaatgaaggtgctgaaccagcgcgcaaaacccgccgtcgtcgcggtacgcactcaacggcgtgtctctgcccggaacccagctggtaccgaccggacaacttcaaaaagctccctggccagcttggccatgcctacaaccgccttgttcgccgcgatcgtaaaaccggcgcgttaagtctgcggatgcggatcagccgccacccgtattttgtgcagctgcgcgagcaggccggccggaagcgggacttccgcccggagcgggagaatctgcttgatgccatcgtgccgcttatggtcagcaccgttgaccgggcaacccatatagacactatcaacctcagcaaaatggcgtggcagctcagcgaaaaagacagcgaagggaacgtgatccggaaggtgacggttccgcgggtttgccggctgctgcagcacatgatggagtacgggttactggcgctgcctgaaggtgtcacatgggacccgtttaaccgcaagtggttccccaagcatgtcgtgctgacggaacggctctggaagataatcggcgttgatctcgataaactgtatgcggagcaggccgaacaggtcgccgctgaagcggcaggatggataacccgcgatgagcatggccaggcggaagaaatctctgtcaaagcggcgcgccggcgctggtatgagaacatgatgcacgccacgctggttcgccggcgtgaagccgccctgaaggggaagcgcgagaagaagctgaaagcgctggcagaaaagccctttgacgaccgtgtatatgccatgtccgttcatctgatgcggacgctgccgaaagacgaactgcacgcgctgtcgcctgaacagttcacgcagcgcgtattcagccacctttatcagctcgatctggggctggagagggaagcaggcccccctgcttatcactga

SEQ ID NO: 21586 - DNA, 2088 bp, Escherichia coli
atgcaacaggaatctgtagacagtaaaaaagtcatccgcccagatggttcgttcatggagtggttcctcactccgaacgtacagtttggcctgctggccatactgaccgtgctgggtctgtttctcccctttaccatgctgctgagcatcctcatccttccgccgctgatggtggcattcacggatcgtaaattccggccaccgctgcgaatgccgaaagactgcgaaatgttcgacgacaccctgaccacggaaacccaggcggaataccgtctggggcccattcgcatcccgcataaggtccgggagcgaaagaaagcgaagggaattttatatgtcgggtatgagcggggacgcctgttcggccgcgagctgtggctgaacatgacggacctgctgcgccacatggtattttttggtaccaccgggtcgggtaaaaccgaaaccttctatgggtttatcgttaacttcctgctgtggtgccgtggctactgcctctcagacggtaaagcagataacaagctggccttcgccacctggtcgctggcgcgccgtttcggccgtgaggatgattattacgttctcaacctgctgaccggcagtattgacaggttcgtgaaccttgtgaagcaggaaagcatccccgcgcaatccaactcagtcaacctcttcagcgttgccccgccgaccttcatcatccagttgatggaatccatgctcccccaggtgggcggggattcggcacagtggcaggatacggcaaaagccatgatgtcggcgctgatcaatgccctgtgttataagcgcgcccgcggcgaactgcttttgtcacagcgcactattcagaaaaacatgtcgctgccggcaatggccgcgctgtacgtggaggcaaagaaaaacggctggcacagcgagggttacgccgcgctggaaagttatctggaaaatacaccaggcttcctgctggccaacgcagaatacccggaaacgtgggaagcccgcgccttcgaacagcataactacatgagccgtcagttcctgaagacgctctccctgttcaatgaaacttatggccatgtttttccggaagacagcggcgatatccggatggacgatattttccacaatgaccgcattctcatcgtcatgatcccgtcgctggagctgtcacgcggtgaagcggccacgcttggccgtttatatgtgacgctgcagcgaatgaccatcagtaaggacctgggctaccagctggaagggaaaaaagaggaagtcctgctcactcacgcgctgaataatcaggcgccatacgggctgatttatgacgagctgggccagtatttcaccagcggtatggatacgctgagtgcgcagatgcgttcactggaaaaaatgggcgtattttcctcccaggatcacccgtcgctcgcccgcggcgcgaacggcgaggtggattcgctgatcgccaacacccgcgtgaaatattttgagtcgattgaagaccggaaaacctttgaaatactgcgcgaaaccgtcggccaggattattattctgagctctccgggcaggaagccgaacacggcacgttttccaaaacggtccgggaaggggatctgtaccaaatccgtgaaaaggaccgcgtgaacattcgtgagctacgtaagcagaccgaaggtcagggggtaatttctttccaggatgccctggtacgcagcgccgcgttttacattccggacaatgagaagttttccagcgaactgccgatgcggataaaccgctttatcgaggtattgccgccatcgccggcaacgctgtacagcatttatccggaacgcaaggatgatgaactggcggaaaccaacccggatgcaatgcgattcccgccgatcaagctgttcggctacgacaaagcggccaacagcctgctggaaaaaattgaggtcttctacgagctgcagtgtggcgcaatttcaccggaggaaatgtcggtgtgcctgtttgaactgttcgctgaatggcttgatggaacggaaacggacgacgtgctttaccaccaggaagacgatctgttcccgatgatcgagatgtaa

SEQ ID NO: 21587 - DNA, 951 bp, Escherichia coli
atgaaactcaccgtaaaaaccgatcgcaacacactttatctttccgctgacggaaactaccaggaacaagccctgcactccttccccctgtcagcctgtcattttggacttggccatgatgccggcagcggccacatcctgacgcataatacgttttctggtgaagcggtgcagctgttccgctttgaaaacgaatatcaggccatcgaggcgctgaacaatatccgtaaaaagctgaaacagcagcgcggactcaatgccgtgcgccggctgtctaactttatcttctggccagttgccgcgctgggctttatcgtctccatcaacggcgcgttgatgaatatgcatcagccggcacagccactgcaggcaaactcgtatgctcccgcgccgggtctgcagcagcctgccactgcgccggagcagctgcaggttcaggcagcacctgaagcccctaaaaaactgactgataacgacttgctgtcactgaaagatgccgtcaccagcggacgctttacgatctcgctttcaaccgggcataaacacaccctgtatgtgttttccgatccgatgtgcccgcactgccgcgcgctggaaccccgactgcaggaactgagcaaacgctataacgtcgagattttccccgtgtccgtttatggcgacctgcgctcgatggtccgcgccgctcctgtactcgataccgggaaagatacccgactgaaaagctgggaagacacgattaacatgggatacaccaccatgaacccgaaaattgacgatccgaaaacagccccggataccaccggcgcccgcctggttgacgcgaacaatatggcatttgcgaaattcgggtttatcggcaccccgtccatcgttgccgattcgggtgatgtgatcccggtttccgtcgtcaaagacgatgcccgcctgcagcaggcaataggagaataa

SEQ ID NO: 21588 - DNA, 1308 bp, Escherichia coli
atgcaaaaccagccacaacggaaagggggaggggatgatggcctgatgattatcggggcccttctcatcatgatcacagtgatgtggtttggctttcgtgattatgtgatttacggagcctgtcgcctgctttactggatctacggtgtactgccggacgccattacaccgggtaatgcggccgagcgccgggacatgctgctgtcggcggcgcggtataaccaccaggtttcgctgtgggactttatcagcgtgatgaacgacacggccagcgtgctctttcccctgttcattttaatcatcgggctgttcgtctgggttatctcacgcaatccttactaccgtctgacccgtaaactgaccatccggaacctgccctgggtgatggtaaaaaactatccggggatcgcccatatcctcgcccggtttggccacctcgatcagctgctgctgaatgaagatccggaagaagcacgcagcgcgcagtcacccgttgagtttgcccaggaacataacctgattgataccgctaaacgccgcctccgtaaaaaagccgcacataaggtcttcctgtcacaggtaaacctggctcccgaaggggcggccctttccctggcgccctgggaaaaagcactcgctgcctcgtttgtacatctgcggtttatgggcgaccggccaacggctaaatccattctcgacgatctcaaccgttcctgcctgcggaccaaagacggcttccctgattattcgctggccgccgggctctggaccgtcgccagccagtgcgaagcgttcagagaatttgcaaaggggcgccgcagctcccgttcgctactctacgcgctgttcgatgatgacctgcagctgccatccgcaaatttccggtggctgaaaggcgtggaccgcacgttatggtatgcactttcaagcgccggccgcgggaagttcttcattgagggcggtggcgttattgcctggagtcagtgcgaaagttaccggctgacgctcgatgaagaaaaggcggcgaaattcccgccgaccgtgcgggcggccgtgctgggccttgagctggatctgctccattaccgccatattgaccgccgcgatcccgccattccggtcgctcactggcaggaagatgttataccgccatttgcatttgaatctgacgctgaagcggaagacgagccggctacgccgcctgcagctccgcacgacaccccgaacaacagtctgcgactgacagacgatgaaccgacgccggctaaacctcagccggcaacccgtcccgatcacctggaactctaa

SEQ ID NO: 21589 - DNA, 396 bp, Escherichia coli
atggttgatgccccgccctcaatcccgctgccaacctgcatggttgaagcagcacagatttatcacattcctctccgtggattcctcgccttgtggctgactgaaggcggaaaaccgggaatgaaaaataaaaacaaaaacggcacttacgattacggcgcattccagataaacaccatctgggcgaataagctggcgtccgattttggcgtaaaagcggagcagctgcagcatgacttctgcgcctctgcaatggccagtgcctacatcctcaaatacaacatcattctcgaagggggggatttctggcagggtgtcggccgctatcactccaacacgccggcgcgtaaggcctggtatatcgggaaggtttaccaaaattctctgaggttctga

SEQ ID NO: 21590 - DNA, 351 bp, Escherichia coli
atgaaattcaacacgaagattgctcttattctggctgcatccgtaatcagttgcagtgcctttgctcagagcgtatccgcgccgaaaaccgattctttactgagcagcattctgggtgagcaggtacagacaaaccaacatcttgtacaactgctggcaaaggatcaggatgccggtattacactgaccccggaacaaaagaaaacctcttgcctgtatgaaagtcattactacagcagtggcgcaccacttaccgtcggaaaagaaacactccgctgcacgctgagtggcgaaatcccgacatgggaaaatgcgaacgagggcaatattgtctctgtcgaaggcaaataa

SEQ ID NO: 21591 - DNA, 654 bp, Escherichia coli
atgattcagtcacgtaataaatatctgcagtttatgctggttatgctggcagcctgggccattgcctggggggccctgtttgtcatggggcagaccgttctgctctatgggctggggaaaaatacgctgttcttcattcatggtgctgttctggtgtacctgctgtgtgtgttcctggtttaccgccgctgggttgcaccgctaccggttgttggccaactgcgtaacgttggcgcaccgtggctggtcggtgcgatggccgtggtgtatgtcggagaatttctgctgggtaaagtgctggacctgcccgctgagccgtttatgacgaaactttttgctgataaatccatacccgacgtgaccctgacgttgctggccatctttatccttgcaccgctgaatgaggaaacgctgttccgggggatcatgctgaacgtcttccgttcacggtacagctggacgatgtggctgggggcgctgataacgtcattgctgttcgtcgctgcgcacagccagtatcagaacctgctgaccctggcagaactgttcctggtggggttgattacatcagctgcccggatcagaagcggcggcctgctgctgccggtattgctgcatatggaagcaaccgcgctgggtttactgtttggctga

SEQ ID NO: 21592 - DNA, 435 bp, Escherichia coli
atggcgctggatctcgtttatccccggccttcagtggaaggcgacgcactccctttttttgccgaacccgttgcggccggctttcccagcccggcagcaggctatgaggccaatgaacttaacctgcatgattactgtgtgcggcatccggccgcgacgtacttcttgcgtgtgtccggcgattccatgcgtgatgcgcgcattcatgatggcgatgtgctggtcgtcgatcgggcagaagaaccccggcacggcagcatcgtgattgccagcatcgataatgaatttacggtcaagcagctgcagctccgcccttacccctgcctgatgcctctgaatccggcttttccgccaatcaggtttgatccggaggcgctgcagatatggggtgtggttacgttcactgtcatgagacaccgcccgtgtacgccttaa

SEQ ID NO: 21593 - DNA, 1305 bp, Escherichia coli
atggggtgtggttacgttcactgtcatgagacaccgcccgtgtacgccttaatcgatgtcaattcgatgtactgcagctgcgaagaagcgttccgccctgatttacgaggtcgccctgtggtcgttctcagcaacaacgacggggcgcttgttgcggtcaatcgcgcggcgaaagcgctgggcgtgcgccgcggggagccctatttccgctgccgccgcctgctggaacagcataacgttgccgtattcagttccaactacaccctttacgcctcattctccgccagatttgcaaccgtggtggagagtctggcgccgcggacatttgtttactcaattgatgagctctttgcggatgcctctcatatggagggagtgatgacgccgcaggcgtttggccagcttttgcgggctgaagtgctgcgccagacaacactcacctgtggagtcggcgtcgcgccaacgaagacgctggccaagctgtgcaaccacgccgcaaagacgtggcctgccaccggcggggttgtagcgctcagtgatcctgcgcgactgaaaaagctgatgagcctggtggcggccggcgatgtgtggggcgttggccatcgtaccgaaaaagggctggcggcaatggggatcaaaacggcgctggcgctcgcagagatggatatccgtcttgcacgccggctgtacggtgtgacgctggaacggaccattcgtgagctgcgtggcgaggcctgctttgccctggaggaaggaaccggcgcgaaacagcagcttgttgtatcccgttcgtttggagcgcgggtcacgcaactggcgcaggtgcagcaggcggtgactaaatatgccacacgagcaggggaaaagttgcgtcaggaaaaccgcctggcgaaggtggtaacggtctttatccgcagcagtgcttatgacgccggcggtgtgccctacagtaaccaggctacggaagtgcttcccgtaccaagccaggatacacgcgacatcatcgccgcggcgcagctggggctgtcgcgtatctggcgtgagggcgtgcggtatgcaaaagccggcgtgatgctcagcgatctgcagggatatgaaacccagctggatctgtttgcgccggctgcagtgcggccggggagcgaaaaactgatggccaccatcgacaaaataaacagggaaggaaggtcaagggtcttcttcgccggagaaggtattgatccggaatatgccatgcgccgtgaaatgttgtccccggcctacaccacgcagtggaaggatattcccgcggcgtttatgcgataa

SEQ ID NO: 21594 - DNA, 849 bp, Escherichia coli
atgaagaatgatgagctggccacacgacgcgctgaggcgatagccggcgatcggtgcttcacgaaagggcgcctgcgcgatgaattcagaatgaagccggctcccggtgctgagccggtgaaatggtacaaaagcgcctatggcggcaagtacgccgtataccgcattgcagactgtgttccgatgcgggaaaaacggccgccgactgagaagcagcagcaggccggcctgcgtctttccgtcctgtcccggcttaacagcaccagtggccggatggcacagcgggcacacgactggctgagtcaggcgccgctctttctggataccgaaacgacggggctgggtaataccgcggaagcgctggaaatcggcctgaccgatgcggccggccgggtgatatttgaaacccgcctgaagccgacggtcgccatcgaggcgcaggccgccgccgtgcatggtatcgatgagccggcactcagcggcgcaccatcctggccagatgtggcgctgcagctgcgccacgccatcggggcccggccagtgattatctttaacgccccctttgatacccgcattctgaaacagacggccgccgcacatggcgatccggccgactggctgggagaactgacagtgtattgcgcgatggagctggcagcagggtattttggggccaccaatcgctatggcaccatttcgctggccagcgcggccagtcaggcagcattgacctgggaaggggaggcacactcggcgatcgccgatgcacggatgacggccggggtggtgaacgccattgccgcataccatctggcattgctgcaggagcaggaacggctgcaggcctga

SEQ ID NO: 21595 - DNA, 321 bp, Escherichia coli
atgaataacatgcaaagtaaagccccctcgatgcggctctccggtgtgcaaaaagacgtattgtttgttctgtatggtctggcagaacgtcagctggcgggcccgttcccggcgatgcagcttttcagcatcctcaataagggacgcctccagcccgttgccgataccaattttcgtcgctcctgccatacgctgaaccgccacggcctgctcagcaaataccgggataatcagtcactgacgctcgcgtttgggctgacagaggcaggcctggagatcgccagagaggtttatcacaaacgcctgacggagatggaataa

SEQ ID NO: 21596 - DNA, 639 bp, Escherichia coli
atgttatacatggctttatgcagttttatgatgatcctggcgctaagtgagatgttccgcacgatgacggcgatcggcaatggcagtttcgccggcaaccgcttcataccgctcgccttagttctgttaacgctggcgctggcatcacctttctttgccacattttatacgctgagccggcctgtttcgatggatgcactctccaggctgtccgttggtgcgcagtgggcaggtatcgccgccgccattctgctgtgcatcttgtatggctatcgtgcctggaaaaacggccgtttctggtataccggtgcggccattgcctcagtggtgattgccgttatttttgccaacagcctgcttttcgtgtccaggcccgatgccggcatcgtggccacttttgtgctgaataacgatgacagtaatgacgtgcagtgcgaccgttcggtactgctggttcattacaacaagggaacccccacggagtggcgctgcccgaccggtatcatgttcatgtctgatgcgtcaaaaccctttcttccgtggccggattatcacggcgggcggagtcagcatctgacggcggcactggatctgctcacagacaacgccctgcgccttgacctaagccagaaaccataa

SEQ ID NO: 21597 - DNA, 210 bp, Escherichia coli
atgaaagatgaaattcgccacgaaaaacccgttgaagtgaatatacagctgacacacagagaagcgcaggctctggcgcaactggttaagcgtctgggattcagtgactgccgcggcctggcgacgtcagatattgaggcatatctgatgatggatggaatcaaccagatcatgaaagcactggctgaagagggctatgcaccacgataa

SEQ ID NO: 21598 - DNA, 219 bp, Escherichia coli
atgttcagcatcatttatcacgccggcgcagccgtccttttcctggtcatgagtctggcggccggcgccggcctcctgcttcatggccatgaatatacgacaggtcatttctggaacatgacggggctgtgcattgtgtcaactctcgtctggatctgggctgtagctcaggcaaaagaagcctggtacatttcacgaaacatcaaaaaaggactctga

SEQ ID NO: 21599 - DNA, 684 bp, Escherichia coli
atgaacagacgcctccacctcatcaccacctgtacccggcgcaaggcgggcagcgtggaggataccgtttttccgggcgacgcttcccttgatgacgcctttgacggctggtacaggctgatcgcccaggccgcccgccgtcctggcagggtgcaggaaacgggagagctttaccggggcgcacactggctgcgtgcccgcggtatcgcggcgcggtggccgggcatcgagctgtgggccatgtcggccggtctggggctgcgccaccataccgatccggcggtcgcgtatgaggcaacgtttcacgccatgcccttcgcgccggcgaccgtctggggctcactgacggcacggcccccgctggcgggccgctgcgcctccctggctgagctgatgcaacgctgcccggacgatcgctttgtgatcgccggttcacccgtgtatatcagcgcggctgagcaggatattctggccggcgtgtcggcactgcatgatgcggccactcagctgattatcgtgacctcacagggctatcgtggtccgctgcagccgtttctgaaaagaagccgcgcggacatgatggcgaccctgaaatcgaacatgacgtgcctgaatattgcctgcgccggcgccctgattgacgccatgatgcaggcagacgcccggcaggcggcgaccatttaa

SEQ ID NO: 21600 - DNA, 636 bp, Escherichia coli
atgaccggtttgtttgaacgtaaaaagcgggccaaaaacgcccagctgaccgtgcgtctcgatgagcagctgaagaaacgcgccgaactgcgtctggaagcaatggggatgaccgccacggaagcggtggagcagctttaccgcttcatcgccgatcacggccggatgcccgtcacggagcgtatcgtcacatttgacatccagtcacagcgcggccacgccatcgccctcaatcccgccgacgctgtgaccgaaaacacccggcggtttctgcagtcgctgggatctgcagaagtggtctgctgcgatcccgctgcatttgaacaggcggtgctggaatacttcagcctgtatgtggccgaccaggctgcctgtttactggccggtgtactgaacgtcacgttcatggttaatgccgccagtcgcgtgaaagatgactggcatgacaggctgctgtccctgttacagcacgactttgatttcagcgcagaacagtcagtgacgttcattaacagcatcgtagaccgtgaacatgtcgatcctgccatcgtcagtcgaaatattgcggcctggcggagcggagaaagcgccggttccggcaccggcgaatcgccagagccgggagcaccggaatga

SEQ ID NO: 21601 - DNA, 357 bp, Escherichia coli
atggaatatgaagcgtacaaggttcgcggctacggcttcggactgaaaaaagagatcaccggcgtgctgggtcgttacgccacgcaggaagaggcgcagaaggtcgcggacgactacacgcaggcctgcctgcgggataacctgccggacagttacgatatgggcatggttcggccggtcgctgccggcgaacctgccgccctcgatccggacgtgtttcgcggtccgggcgcgccgttcctgatggatgccggccagataaccacgggtcacacggtatgcctgggcaaagcagcggatggaaaacggttttattttggcggggagcattccgatggccaccaaacatataaatga

SEQ ID NO: 21602 - DNA, 579 bp, Escherichia coli
atggccaccaaacatataaatgatgagctctggaatcgcattgaggcgctgaccgtcaaagctaacgccaggcatgggttgttgcggccgattaaagaggctgaagtactgcatcttgtcctgcagcgtggcctggaactgcttacggacgacgatctgctgcagctgggcaagtaccggcgtccgataggatttgtgctgcgtcgtccgggcgtggaaatggtgaagctggatatgctgaatatggcagatgcggcaaccgttcttctgcgtagtggacccgcaacgctgtgcatctggagccgcgacgatatcctgcgcgaggccagtgaagcggtaatccgcgaacggctgccggatgcagccctgctgtcggagggggatgaccgggcccggttccagacgctgctgcctggattctggaacgccgcgcaccggggggaaacggccgtgatttccctgcgggctgacagtgcggattacgcgattgcgcgtataaccgatctgatgtgtgaagccctactgggttataaagggcagcgggcctggaggccagctgaagacgaacagggggaataa

SEQ ID NO: 21603 - DNA, 408 bp, Escherichia coli
atggtgactcagcctatggtgcttctgggcgcggtacaccccgtagcgggttatctcttcctggaggtgatccctgacagtgaggttggcttcgttgatatatatcagctgaccgaccgtctttatgttggcgattatctggtcattaacaatccggaatggcggcggcgtgaacctgcatttgacggccggccgtgggatgaatgggtgatccgtgaacacctgtcccgcatagactggtattcgaatgacaccattctgaggttatgtcagaggcacaatctgtcatgtgctgacctgcacaaatggggagaaaatgtggcgcgttggaaggatgttccggtgatggtagcgcgtgaagaagacgacgtgtccatcactcttctttcagggtttacagataactga

SEQ ID NO: 21604 - DNA, 549 bp, Escherichia coli
atggatatcaactactacgatgaacatcaggaagaatttgaggcggttaaactggcgctgaagggcgaaatggagaggatctggggctccatgctgaaagaaagcggggatagcctggatgatgaagccacgtacctgaacctgtttgaagaactgcagtacaccttctctccgtccagcttcagtaagctcaccccgtcgcaggatctggatgaagataaaattgccgcctttgtggccagaacccgcggctataagtacggcatcacgatcaaagcccggccaggccatctgcagaaatggctgaaaggccgaatccagccacttgaggacgcggctggcacaaacctgtgctggatcgacacagccaccattgtgcatatcggtgccggtcagcagttcgacgatcagtattacctcaccgtgaccacaaagaccggacagagctaccgcgtgaatgatgtccgtctgccaggtcgtcttctggaagccgcacaggaaaccctgttgttcagggcgctggattcaagcactggcggtaatttttga

SEQ ID NO: 21605 - DNA, 462 bp, Escherichia coli
atgatgaagaaaccacttattgccggcatcatgctggttgtggcgcacaccaccggcgctgcgcagggtgatgataccgatctgcagcagatttataccgaggcgggcattcaggggatatgcagcgccgggatgctggctgtgccggaagaggccagggatgaagttgtcccgcagaacgtcagacacctcctggttcagtgtgcctatttcgacgagcagcagttgcgccggcgtgccggcctgccggctcagacatttagccactggcgtgaccgcaatgcggtccttaatctgtcgtctgaccaggtatctgatgcgctctggctgtcagcgtggcgtgatttccgggcacaactggcctcggcctacccggccacgacggaaaaaaaggtacaggggaaagaggccgtacccgccggcacgaagcccggcactgagcatgggagtgcggcggattga

SEQ ID NO: 21606 - DNA, 249 bp, Escherichia coli
ttgaccggctttgacttgatcctgtggcgacggggcctgaactggacccaggaacgcgctgcggctgagctcggtatcagccgtaccagcctggtaaaatatgaggacggtgagacagtaccccggaccatacaacttgccaccgtcgcgctgacgctgaaagcggaatggcccaccctgaaaaccatgagcaaagacaggctgctgcggcagctgaagtatgaagtgctgaggatcgataatgaatga

SEQ ID NO: 21607 - DNA, 588 bp, Escherichia coli
atgaatgagtccatccatgttgtcggctcttttatccttgcgggtatcctgctgtatggcctctggcagggtacacggcgacgccggcgccggcacgaacggaaacaggccagtgcggtacgtgtgatcgataaaattaatacgtttccgcatttcgggcagaaaattgcctatctgcgcaagattgacccgtttgtgttcgaagagctgctgcttgaaggctttgaacgccggggctttgaagtgatccgtaaccgccggtataccggtgatggcgggattgatggccgtgtgaagattgatggccagacctggcttatccaggccaaacgctataccagctatattgccgttggccacgtccgtgacttcagcgacctgctgaacgccaccggtgcccgcggttttttctgccataccggcaaaacgcgcgaaggcaccaaatcgctcattcgcggagacagccgcatgatcctggtcagtggccagaagctgctagaccttattgccaccgatgcgccgtttatcccgtatccgggataccggccaccggccgaaatggttcatcctgaacaggagacaacatga

SEQ ID NO: 21608 - DNA, 486 bp, Escherichia coli
atgaaattcaaaggatacgtcgccgccctgccggcactgctgctgacagggtgcgccatgctccccggacagcccaccgattatgaccgcttctgtaacgtctcaggcatcgccagccacggcgaaacctaccgtgtcagtaacagccaggatttctggttaaccccgaacggccgctatctcagccaggctgagtacagcagtccggcagatacgcttcagaaactgacgggtgtggtcagtggtgaagatcctgaccaggtgcggaagaacgccgtcagggtaagggtgttccgcgtcgagagtgaaaacagccataaaggtgcgtgcctgcctgtgcgttatgacgataatggcgcacagcgtaaaatggattcactgactaacggccgccgtatggtggtattcagtgaagatgaaggtcagtctggtcagcagatttacaacaaaagtcgtggtacaggattcagttacaggttgttatga

SEQ ID NO: 21609 - DNA, 249 bp, Escherichia coli
atgagtggattgaaaggccgccgaatcagcgcggatatgtttgctatgatgttaaaagtacctgtcggggagctggtttttgccgcccgacacaaccagccgctacacggacaggcgctacctccctacgggatcggcggcgggaaaagctggagctcgaccgcttccacccgcagtatgacgtttgatatgcaggaagcggtcgatttcagcgagaaatttcataaaattcagtcgcctgacggctga

SEQ ID NO: 21610 - DNA, 741 bp, Escherichia coli
ttgaacactttccccctgcaaatttctcagaattcacgtagcgacgccatcgggaccgggcgcgtgacatatgcctacttcgattatgccgatgcgctggcgctgcgggagatggccagccaggctgatttacccaaatacctgctggccccggaggtgtcggtgtttctgcggtatgtgccagacctgcgccagcaggtactattcgataccctctggaacacgggcgcgcgtattaatgaggcgctggcgctgaccggcgccagctttcagcttgacggttcccggccgtttgtccggctgaagacgcttaaacagcgtcagcgtggccgcggcaggccgggcaaggatgaagaggtgttccgtcttgttcctctgaccgatcctcaatatgtcaggaaggtgcgtgaatttctgaccaccctgcgtattggtaaacagcagctgctctggccggtgcagagtgataacacgccgcgtaactggatcaggaaggcactggacctcgcaaaacgtgactctgtcacttttagtatccctgttacctgccacacgttccgtcacagcttctgtatgcacctgatccagcatggggttccgctgaaagttgtacaggcctatgccgggcattcccggctggaaactacagaaacctacacgcgcgtgtttgcgctcgatgtcggccgtcagtatggcgtccggttcagcctgccagacagtcatctaacgcttccggaataa

SEQ ID NO: 21611 - DNA, 975 bp, Escherichia coli
atgcgtatttttgttgacgacggttccaccaacatcaaactggcatggatggaagatggtgcggtcaaaacgttgatcagtccgaacagcttcaagcccgaatggtccatgacgttgctgacagattcatcggtgccggcttccgccaactatgaaattgacggggaaaagtacagctttgaccagctgagcccggatgccgtgcgcaccacggaaacccgctatcagtacagtgatgtgaatgtcgtcgctatccaccatgccctgatgcagtcaggcattgaaccgcagccggttgatgttgtggtgacgctgccgctgggcgagtacctggatgaaaacgatcagcctaatatggccaacatcgagcggaaaaaagcgaacgtgaagcgcgcggtggccgttcaggggcgtgagagctttaccgtgcgtaaagtcagcgtattgccagagtcggtccctgcaggcttcagtgtgctgaaggatctggacgatctggactccctgctgattgtggatatcggtggaaccacgctggatatcgcgcacgttcgcagcaaaatgtccggcttcaccaagacgcattgcgatcctaaaaccggcgtatccatcatcaccgaagccgtaaaacatgcactggataccagcgtgagcacccgtaccagttcgtattttgccgaccgtctgatccaggcgcgaaatgacgaaacgtttctttcccgttacctccagaatgctgaccagcgggcccaggtgatgaaggtactgcatgagcgggaaaaagccctgacgcaccgtgtcaccgattcagttggccgctttgccggcttcacgcacgtcatggttgtcggtggcggtgccagcctggtcgccggcgcagtgaagcaggccacgggggtgagtgacgatcgtttcttcgtcagtgataacccgcaattcgatctggttctgggtatggtggcaatgaagggctga

SEQ ID NO: 21612 - DNA, 444 bp, Escherichia coli
atgactgataaccgtaagtgctcgttttatatctacccggagcgcaatgcggcggaccgggtagccgacggctttcttgagaaactgcctcagaaagagcgtggccgcgcgatgcgcgccatgatgctctgtggtgccgcgttgatgaagcaggacgaacgcctgccgttcctgatcgctgaattcctgacggagagcaccacgatgcaggatattcagcggatcatcagcagtacgctgccgcagcaggatacaggagaaatggcgcgtctggttgaggcgtttctgcaggccaccggcggtggcagcaatacggtgtcgccggcaggcggcgctgcgccggaaaacagtcccgccgtggctcccgaaccggcagcaccggaggataagaatctggaagaaacccgtaagaacgtccagcatctgttcccggatgatgattaa

SEQ ID NO: 21613 - DNA, 552 bp, Escherichia coli
gtgaaaaaatatgtgctgttaaccctgaccctcatcgccggcgccgtggcagcaaacccggtaacagcggccggcaatgttcaggcgcaaactgcgactgaagtgaaaaccgggttttcacccggcgggaccgcattaaatctggttctggattcaatcgaccacgcgcagcatgagattctggttgccgcgtacagcctgaccagtcgtcctgttgccggcgcgttgcgtgccgcaaaaaaacggggcgtatcggtggtggtggtggccgaccgcaaagcgaacgacaaccggtacaccgaagtgaactttctggccaataaccgcgtggcggtgcggatcaacgataactacgaggccatgcatgataaattcatggtctttgaccgccgcgccgtcttgaccggatcgtttaacttcagcgccagtgcagacagtcgtaatgcggaaaatgtggtgctgatcagcggcgcgcctgcagtaactgaagcctacgtgaacgagttttcccgtttatggggcgaaggaaaggacgtggccccacggtactga

SEQ ID NO: 21614 - DNA, 507 bp, Escherichia coli
atgcaatcattccccctgttcgtttcccgtgtcgtacctgtgatcaccctgagccattgcctgcggcagcggcgctggtccctgcacaacacgccatgccagattgacctgagatcaggttgtcacctgcgctcacagcctttcggcacgctatccagacgggaaataagcgaccggccaccggctatgccccgcggttactggttcaggcaatgcagccgggatgtcatgtttacggggcgcatcgatcaggcagatcctatgaaacaggtctattacaacgaaggctggagcggtccgaacaagtatacgtttgaagtttatcagctggagaacgggagttaccgggcgctggcccgcaaatggaatggcaaaatcaacaaggtgcagcaggaaacgcagtacctgtctgacacgcgggaggggctgaagcaccaggactatccccgcacgcgccaggtgaaaatttttctgaattcagacttctgggagaagggtaatgattaa

SEQ ID NO: 21615 - DNA, 480 bp, Escherichia coli
atgattaagatggttagcgtcgttccgcagccggaaacagtgaagacgctccgggaaaaaatgggcatgactgaaaccgcattaggggctgtcatggggtacgaactgcgcgcctggcagcgtaaggaagctatcagcgacgatctcagccagtacaacaagaccagtcttcgcccaggcgaatataacatgctgatgctgatcgccggagtgcatcctgattaccgcctgaacagggcattcagtcctgatgatatggtcaaagatcccgccacggccgaagacgttcgccgcctgcgtctggcgctggggctgaagcacgctgaaattgcagcgctgtttggctataaaccggcgtcatggcagaccaaagaaaaggctgctcagcgcggcgtaaagctcaagaccggggaattcaatttcctgttacttctggccggtgagcatccgtcactgcagctggttgagaaggcgaaataa

SEQ ID NO: 21616 - DNA, 411 bp, Escherichia coli
atgatcaccacacgccgaatgttaatgctgtatgcctgccttgtgcccgtagccctgacagggtgtgatctggctgattatttcccgaatgtgccacagcccgtgcccgtgatttcgcccggctatcaggttgatatcgatggccacccggtccgaatatcaggatttgatgactgtccgcgggaaaaagatgaagcccggcacgcagctgcacaagatgagaaaggctgcattgtgctgtctgcagagcgttccgaggtgaaggtcagactgtatcagccagccggcgccgtaaccgaaacctggcggatcatccgggaaaaagacgctcgccagaacgatattattcgcctgcagcgcccgaacggtgcgcttgtgatgcaaaatttacaggggaaagagtctccttaa

SEQ ID NO: 21617 - DNA, 264 bp, Escherichia coli
atgactgctctcaattctcagcaacaggctgatgttgcccgctatatccgggaacatggcaataaaaccgttatttcccctgaatggtcacttatttatttctcgctgtgtcagtgtgaattacatcaatcgcatgaagccattatttttcataatggccgacctgcagggctatttattctgaatgaaacaggcgagctcaccgaattatatctgctggggtcgctttctgacattctcaccgccgctgcggtcaacaaatag

SEQ ID NO: 21618 - DNA, 363 bp, Escherichia coli
atgaccatgcaatcagaacttgtttttactgatcctatgctcaacgtcgttattgctgaagttaagcgttttaattgcccgcttctttttgtcaaagatcatggcgtgtatgtgatggcggcgaaaggtgagaaaaacagtaatgggatgcacaatgtctgttacgccaatggttttaatccggatacaacggattttgacgagctctgggaccggatgcgtgatgcctgtggcggagatgatttttgcgaatccctggagctcgatccgaggtcgattgaacttctcagccgtaccaaaccctgcctgaaaataatgctttcagagacggaactggaagttattgcagggggacagaaataa

SEQ ID NO: 21619 - DNA, 450 bp, Escherichia coli
atgaaattttcagcagaagaactcaacattatccgccaggcggatgccattattgccggcaaaattaccacaacggattttatcaccggtgccgacgccgcccgttccttgctgcggtttcgtcttgctgcagaatcacgcgaatcattctgcgcgttctttctgaactgccacaacggcgtgattgcgtttgaagaactgtttaagggcactatcagcagtgtcaccgttcatccccgtatcgtcctgcaacgcgccctgcatcataatgccgccgccgtggtactggcgcataaccatccctccgctaacactgcacccagccaggctgacaagctgatcaccgagcgtctggcgcaggtgctggggatggttgatgtcaaagtcctcgatcacctgattgtgggcggcagcgatatttactcttttgctgaacatggtctgatttga

SEQ ID NO: 21620 - DNA, 267 bp, Escherichia coli
atgggcaataaatataccgtgccgcttaacgtgggcgcgatccgcgaaagctgtttccgtcccgctgacaaatggaccccgccgacgggggaagagctccgctatctgctggaaaatgtgctcaacctgagtcaggaagggctggcacgatatgttggcgtgaacggcagaacggtgcgccgctgggtgactggagaaagtgacatcgcgtattccgtctggtgcgtcctttgcatcgatgccggcttaccgccgatctggaaatag

SEQ ID NO: 21621 - DNA, 1284 bp, Escherichia coli
atgcatactgataactattttttcagagtaccggccacacgcggaatacagggcggcatagaacaatacatgctgacggttcctatggtcgtgttacgtcgtattcttgctatggacaatgatggcgatgttatggatcgcagccagcgagaagcgaacaaaacgcgggcaaaaaaaatacgcaattatgtcgccggtgcgacatcaaaacgagccccctatattttgccgtcaattaccggaaatattgatagtcatgttgaattccttcccagcgaactctcgccggcagtgggtattcttaaaattccgatggacgctgatttaaaattattcgatggtcagcaccgtgcgctgggtatttttgaatttgtacgcgattattccaatacggaagatacgatcagcttgttgcttaccgttggcctgccacttgagttacgccagcagtttttcgcagatattaataacaacgcgagcaaaccggcagcggcgatcagtatggcatataacaacaatgatccggtcaaccagctggcaatgcatctggcccgaaccgtcaccggcctggcgggcacagtggattttgaacacaacgtggtcccggcgaaaagctcacggcttatcagctttaaagcgctgaacgatgcgacgaaaaaaatgctcaacctgcgggccaacagcattccctcgccgcaacagcgtgatatggcagaaagactctggactgcctgggcgcaggcgatgcgctggaatgatattgcccaggatgatatcgccgcggagtaccgtcaggaggcgctgggactgcatggcatcatgattaatgcgatcggtatggcaacggccaggatgttacggcacagaacccctgaaagcatcgagaacctactggcctgtgctgaaaacggtgacaacggttttcattaccgggagtcgtttgtacctgagtgctgggaagggaagtgtgttgatccggagactggcaccatcaaaaccgacaggcgggcgctcgaagcaacggctgaagcgttgcaaaagctgatagatccgttcgcagatgcgctatggttgcgtgattacctgccagctgaagaggcgagtgatacggcattactgaaatatgcagacgacatcgagaattataagcagcgtactgccgtgccgatgataaatatcgtggagaagctgaaggcgctgggtgacggcgaaccgcagttcagagcgtcggtgctggcttcccgtgaggggctaagccgctatctggccggggctgaaggctga

SEQ ID NO: 21622 - DNA, 180 bp, Escherichia coli
atgagtaaagcactgaccccctcccagcttaaagctgaactggaaacgcagaaagatgcgctgctgaaggcttgcctgtatgccctcaacgaaatccctaaccgtcgtttaagtggcccgtatgcgtccacgtatgcgctggccgagcaggtcagtaaactgcttcagcgctgcaaataa

SEQ ID NO: 21623 - DNA, 861 bp, Escherichia coli
atgtcatctgaaaaaactctcccgtcggtcgatctgatgtcctgccagcatggcggtgaagtgatcccgtccattgctattgagcgcattatctcgttgcggaatgaaggtattcgcgtctatctcgacggcatagacaagctgcgaaaagcgcgcgatctgatgcagcaggccggaggctgtcagtacctgtatgactacgacaaagccgtagagagcgcgatcaaatggagcgacaccagaccagaccaggccgaaacggctatttcccgcgttatcgacggaaaaatctgggatcggctgatgtcggaaaccggcatgtatacgctgatgagcaacaaacaacgtcaggaatgggatcggcaggtggcaggcgaagaaatgccgccgataacgctggagaacgttatgagtacgttccggcacctgaatgcaagcaaggccgataccttcacgcaagggctgattgatatctttaaatccctgtcgtgggattataaaaccaataacccctgcatgtttggcaagcgtatcatcatcgcgccgttgctcgatgtctggcgcagtggctgggtgcgcttcagctcagacgggcacaccaaaattgacgatctggcgcggccgttctacgtgctggacgggcgtaacgtgcctgattaccgcgtttctgacggtgccaaactggatgcctttttcagtgaaaaccagttcaacggtaaggtgttcgagtgtgattacttcagcgtgcgatattacaaaaagggcagcgcccacattacgtttaaacgcccggagctggttgagaagatcaataatctggttgccagtcactatcccggaatgttaccccctcgcgtgtaa

SEQ ID NO: 21624 - DNA, 339 bp, Escherichia coli
atggctattcaatcccttcagttccgtaacggctccgtttctcttggtgatgtttttgtttccagctggggttatgagcagacaaatacctgtttttatcaggtgatcgccctgcgcggtaagaaaaccgccgtactgcgccgcatcgctgcgcagcaggtgaaagcagacagtgcaatgtctggcgagttaaagccggtactgaacgactttaaaggcgaacccgtgacccgtcgcatctgtgaaaaccatgagcatccgtctgtcagcattgacgagtacgaacaggcttataagaccgatcctaacgaaagccatttttacagcacctggggctga

SEQ ID NO: 21625 - DNA, 231 bp, Escherichia coli
atggcggaaacagtttatcaggcacggaggcgtttttaccttctccgttttcggcgcagtcgtaacccggacacactggaaaaaatgtacgaatccatgcgggatcgtggacaggtgccgccggaggacaccgaggcttttgaggctgccgccgaccatcgccgcgcagagctggcatcgggacgcatctgggataagatcccgccgcatgtctggcagtatgtaaaataa

SEQ ID NO: 21626 - DNA, 237 bp, Escherichia coli
gtgacaacgctgcatattcgagaaattcccactgatggagcgccgcctatctgtgcaggccgctcaatctcagatgatgacctttgcgcctcatgccagcatctcgactatcgccctgggcacctcagcgcctgcctgctgtcaggttgcgggcgtgacgactggccttcagaactggatgcaaacggctacagcgttgcctgtagcagctatgagcgtgaaaaatcgcttgattaa

SEQ ID NO: 21627 - DNA, 411 bp, Escherichia coli
atgcacggtaacgtaaatgaaatttgcgcaaggcttctcgatagttttgatccacagcagcggatcagcctgctgatctggactgctgaagatgtccatgactgcaccagtgatatgaacctcactgacgatgaggccgaagccgttctggcagaaatcgcggaatgcagttcacacagccgttatggcgtcggaaaagataccgtctggagcctggcaaagcaggtgcgcgaagatgccgcccgcgatcgaaaaatagaggtcaatgccgaggcgctgcaaaaagtcgtggcgctggcggcgcagtttatccggctggaagaaatccagtctggtgaaggagctgcacgccgactttatccgcaggagtctgaggcgctggagtgcatcacgaaggtgattaacggctaa

SEQ ID NO: 21628 - DNA, 306 bp, Escherichia coli
atgtcccagaatgaagtctattacgacacgctggccctgattgaaaaggggcaatggtgtttcggcagtatggacgaagaaaacgaagagcgggcaatcaaggccgctaaggcgctggcgctgtttgcgcgcctgaatgagcaggactgcgacggacacccggtttccgaaatcatcgttgattttatcgctaacctgatgcacctgggggaagcgataaattttcgtgtgctcgatgaggaaagcacggtgatcccgttggtcaggatcgcagccgtacactttaacgctgaaacaaagtcatag

SEQ ID NO: 21629 - DNA, 441 bp, Escherichia coli
atgtctactgaactgaatcaacccgccatcactgcacgcattatccccaataaccgccgcatggcctttctgccacgcctgttcggcgcctggtatctcacaggtgaggccggtgtctacaaccacgcacgttctctctgcgccgattatcaaggcggttcctgggagttcgtcgaactgtcttgcggtagcggcttcatgtacccactgagcgcagagcgcttcacggtatcggttagcggtaactggttcgaaggggaactgtccgcagaagctaccggtatcgtgctgaccctgttcaccctgaaccacatgatctggcacgcacatgatgccggctatgagcacatctgcgacatgctgatcacccagcaggaaaagctcaaattatatgccgaccagcacgccgaagccggtttgatttaccgcgcgattgactga

SEQ ID NO: 21630 - DNA, 285 bp, Escherichia coli
atgttaacactaactgatattcgcgccagcaatacggtgctggttacggaatttggcggcgtgcgtgctgtgcatttctgtcttcatgaaaaattaagcggtaacgacaacgatctgtggtttccgcttgccaatggggccgacctgttcgaggcgctggaaagcattatgtgcatcaattttgccgctgctaacgttgtctcgctggagttcctgcggcagaacgggaagtgcaaagactaccggatcacctacaacaaggccaaattcaagccattatgttag

SEQ ID NO: 21631 - DNA, 222 bp, Escherichia coli
atgaaagaagcagaccaaaaaaaagtgaatgccgtaatggcaattgctgattatctcggtgtaaaaaatcaaatcgaggtgatcgaatactcagccgaatcagtgcaggttgagtggcgaaatcctaaaacaaaacagcttattcatcgtgattacacttttgcaaattcctttgtaaaagactttgaaaaagccctgaaatcgaacgtgaagttttactga

SEQ ID NO: 21632 - DNA, 435 bp, Escherichia coli
atgtggaaacgtggcgaaaacaaagtgattctgatggggcgtgctggcaaagatgcagaagtgcgatacaccccaaacggaacggccattgcgagcctgacgctggctacagaaatcagctacagcgacaacgaagggaaggagcaaaaagaaacggaatggcatgatattgtcatttttggaaagaaagccgaagcagctgggaagtacttcaaaaagggtatgatgctgtattttgtcgggcgcattcgtaataacaaatggcaagggacagacggcaaaatgcgcagcaataaggaaattgtgatcgataataacggcgaaatgcagatgctgccgggagctgggccacgtaacaccagtgcagaaggccagggaggcattgaaaatcatgatgaaccgccgttcccggatatgaatgattacccgcagtga

SEQ ID NO: 21633 - DNA, 312 bp, Escherichia coli
atgaatatcagtgaacaatatcgggtggcggtcgtcagtaccggccatgtaaaaaaagaagacgcggaactactggacaaggtctgtaacgatgagttgtccggtcaaggtttgttctggatcgagaaaaatcgctatgggtggatattgcgtatttctgctactgaacaatggcgagtggaattaaccagggcggggatcagtgcaagtgctttggataatatagccgcgttaaatggtgccgggttcgactggatttggtttgaccgggatgcagaacaggtgccagaactgaccgtttgggagtggtaa

SEQ ID NO: 21634 - DNA, 537 bp, Escherichia coli
atggcgaccttatacccttatgaggtttatacccttattgtgtcagaattaatcgtaagccattttaatgatgtcgctatggtatatccgggaagcgaagaaattaaaaagaactatgacagtgaaataagtgctgtacaggtagttaatggcatcagagaaaaactgattgaagatggtgttatacagtgcgaacagtgcccactgctatccgagtgggatgagaacaaggttatcaaccagctaattaaagattaccgcctgattctcaatcgtgactatgaactaaaccgtgttcgtcagcagctggccccggagctgatcgcacagatagaaaactggaaagagcagaagtattccgattctgcgaaggaatacgaggtgctctatgaaaccatcaacatcaacggaaaggaggttacaggcaaactaaacgtagttgcagtaagtcgctttgatgctgttttcatcgtagggcagcgtcacgctaacgataactttttggttctggatgtgaaggaggtgatgaatcattga

SEQ ID NO: 21635 - DNA, 141 bp, Escherichia coli
atgccgttgtggattatacactatgctgaagatgtcgcaaacggagtgcaaacaaagtcgcatccgatgaacgcagcgcaatgggatcacttccgtttctggttggcagtgttccggcggattaaagaaaccgcgatgtaa

SEQ ID NO: 21636 - DNA, 366 bp, Escherichia coli
atgcctgcaaaaaagaaagcattttatagcagtgaggacatcggaaaattcaaaagcattctcgacgacttgcctgatgtgacgtcagaaaggcttgagaaaaagcacgtactcgatgagcttaaatctgacattaagaagctgaaagattcgaaaggatatgaagataaagagatactgaaattcctcaacgatgcgggtttttcagacgttacattacgtgatatcaaggacattactgccggacgagttggaaaaaaaagaaccagcaacagccgaaaaaaaatcactggagttgacgaagagcagcgcacacaaaatggctctaccggtcagaatcctgacgcttcaggtccgcagtattaa

SEQ ID NO: 21637 - DNA, 318 bp, Escherichia coli
atgagccgtagcgagagcagaaaaacagacgatcgaatccaggtgagatgttccacagaagtgaaagctaaactcaccgaaaaggcccatgaagcagggcttagtcttagtcaatatcttatcaaatctgggcttggaaagcgcattcaatcgaaagggaattacaatgcacttgccgctcttgtaaagataacagcccttcaaaaacatctgtttaacgaaggtgccggggttcatagcaaggagtattcagagattctgatcgaggtcaaaaaggccgcacagaaactgcaacaggagatggatggtgatacctaa

SEQ ID NO: 21638 - DNA, 1980 bp, Escherichia coli
atggtgatacctaaaatcattgagggccgaagggacaaaaagtccagctttggtcagctgattaagtacatggcagacaagccgtctcaggagttgactgatacagttcagcctactcctgagacggctttagcagttaaatcggatatgttcgaagggttaaacaattacctgacccgtaagcagaaagtgatcagcacaccggtggatgttgagccaggtgtacagcgtgttgtggttggtgatgttacctgccagtacaataccttctcgctcgatggtgcagcacaggaaatgaattcagtttctcagcaaagcacacgctgtaaagatccagttatgcactatgttctctcatggcctgactatgaaaagccgaatgatgatcaggttttcgattcagtgaagtttacactggcatcgatgggcatgtccgatcaccagtatgttgctgccatccaccgggatacagataacctgcatgtgcatgttgctgtcaaccgcatcaatccccagacatataaagcagcctcatcgagctttaccaaagacacacttcaccaggcgtgccgcttactggaattgaagaatggttggtcccattcaaacggtgcatatgtggttaatgaccgtcaacagattgtccggaaccctcacagcaagaaagagcggggcaactggcgctcactcgatcgcatcaacaagatggagaacaaagagggtgttgaaacgctctatcgctatatcgttggtgatgaacaggtaggcggtagtcgtcaaaacttgatccatgtttcagctgggcttcgtgaagccaaaagctgggatgatgtgcataagacatttgcagacatcggtcttcgtgtcgaaaaagcacaggggaaaaagggctacgtaattacccacgaacatcaaaaccagaagacggctgttaaggcgagtctggtatttaacaaggcacaatataccctgaagtcgatggaagagcgctttggtgaataccagccttcacatattgaaccggccaaagtatcggtatttaaaactgcatatacccctggtgcttatcgtcgagatgccaataaacgtctgcagcgtaaaattgagcgcgcagaagaaagaatgcttctcaagggtcgctatcgcgcctaccggaacaatttaccgatatattctccggataaggatcgcatcgccgatgaataccggaaaattgcccaacatacccggttggtgaaaaataacgtccggcattctgtttcagatcctcataccagaaagctgatgtacaacctggcagagttcaaacgcctgcaggcggttgccaatctgcggcttagcttgcgtgaagaacgcaacggtttcagggcggctaacccacggctttcttaccgggagtgggtcgaacaggaagcactgaagggtgataaggcagcgctcagccaaatgaggggctttgcctattcctccaggaagaaggagaagtataaacagcagctggttgagcagatcgggttcaaccgtacctttaacgccatcaccagtcatgatcgtgatgatgtggccgtaatggcctcagcacgtcatggtgtcaagccacggcttttgaaagacggtactgttatctttgagcgcgacggtaaaccggtagcggctgatcgtggtcatattgtgctgacagaaagtaatggaatcgacaaagagaaaacggctgaccttgcaattgcattaacgattgctggtaaagccaaatctgttcgtgttgatggtgacggcgagtttaaggaactgtgctgtaatcgtatcgtcgatgcagctgtgaaccacaatcaccctgtcgcgcagggcattaccttcacagatgccgctcagcaggcgtatgctcaaaacgagaaacatcgtttgattcgtgagcaaaataatagtaaaaatgaaatgcaattcagaagtgaaaacgacgacaaattcaatccgaagtaa

SEQ ID NO: 21639 - DNA, 501 bp, Escherichia coli
atgaaaatcaaaatgcaaacggtcctcgcggccgtttctgtgttagctcttgccgggtgtgcctctcaaagcgaaaaggaaaaacaaatctctgcacagcagctggtagatcaggaattgcgtgagcaagccattaagataaaacttgcacaggatgagctttaccaggctggagccattaacaggacccgttacaaattccctaccattatcaatgcaaacagtcagtatgttcgtgtgagctggcagggtgatgcttacgaattactggagcaactggctaaacagcgtggccttcaattcaccagtcaggggatcaagttaccgcttccactcaatatcgatgttggtggttcgaaggttacgtttgaacagttgctgaccctgatccgacaacaaacgcagtaccgtgccaccatcaatcagaaacccggtgaactgcagctgctttacctcacaccatcgaagaaaggttcattcctcagagggacccgcccatga

SEQ ID NO: 21640 - DNA, 780 bp, Escherichia coli
atgaaacttaaactgatcgtgcttctgacgttaccgctgcttgctgcgaacgttgcacgcgcggacgactccgatgttaaaggcctggattactacatggacccgccaagccaaagtgacgatgaggccgatgttactggcagtatgctaaacgacgcagcgcacaccattggatttcgcggcggtaaggcagaacgcgctaaagaaattcgcgccgcgctggaaaatcagcgcagcaaccttgattacatgtattcgttccagccgctgatctcttctgaaggctacctgcctccggtcattgctgaagctaaagacgttgcacacattaccaatgagcaaatccgaacggccaaccgtgcctatgacattgtggtgccggcgcgctttgtcagtaacccaccgacctggaaaagctatcttctgaccggattgatggcgcagcggatcgaattgccagagccggcggcgatgccgaaagacggcaaacaacgtgatatctggaaaaaggctgtcgcgctgggctggtctgacggccgccaaaaagctgatgagatattcactgctaatttcaatcgtctcacacgggattacaccggcatgttgcgctacagcacgctactgcagcagggcatgattaaggctccagttatcacacagcagcagcaaacagttacaggggataaaaaccgtctcatgctgggtgataaaacgaaacgtatgaagcagcaagctgagtttgacatcaacaaacgcagctggaaaccgaccatacgttga

SEQ ID NO: 21641 - DNA, 1164 bp, Escherichia coli
atggaagcattcaattttggtccaacgctgacgccacagacgctggaacgttttctcgtacactgctctaacaatgaagtatccgatatcttgttgcagggcggggataagatctgggtagaacgtcatgggcgccagctgcccatgacagattacccaatcgacaccctggagctggaacgcaccgttgataaggtgttcgggcaggagatcaaagggacgctgaaaagcgctgcggttgttaataccgctatccagctacgaggtgatgaagcgggcacgattggactcggccgcggcgaaacgcgccggttccgtgcgaacttcactcaggccgatatttataaaacagaagcggcaatgtctctgacactccgtgttctgaatgagtttattcctcagcttaaacaaatgggcattgagcctgagctgtttaattctctgttgccggcttccggcctcggactgatttgcggtgaaacgggatcgggtaagtcaaccctgatggccagcatcttccagtattgcggtgaaacgtaccaggaccggaaaatcatcaccgttgaagatcccatcgaatatcgcctgggaagtagagactggattgcgccggcgccggcacagtcacagattgggcgtgatatagattccttccacaattttatcactctctccgggttacgtcgttctccgaagattatgggggttggtgagctccttaaccgcctgtcatttgaagctgctgtgctggcaggtaaatcaggccatttttgtctcggaacactgcacgtcaaaacggtcggagaggccatttcccgatcattgcagaactatccgccggaaatgcgtgaagctgccgcctttgacctgctgagtatcctttcgtacatcatcgtgcaacgcttgcttaaaacaaaagacggccggcgcaaggctgtccgtgaatatctcgtcattgataacagcctgcgccgcaaactctatgacgttgattacagcaagtggggccgctacatcgacgacctgttgatcgctgaaaaccgcagtctgattcagaacgcctgggtaatgcaccaggaaggtttgatcgacgaagcggaagtcatcgaggtcgcaggatatatggactatctggcgttaaaagagggcaagtatggacattaa

SEQ ID NO: 21642 - DNA, 261 bp, Escherichia coli
atggacattaacaaatggcgttatgccggccggccactgacggtttttggtgtgcctgttatctcgtttcttgtgtacttcatctggtttccgttcccgtcagtaaaaacctttgttatctgcacctgtgtggttctcttttattttctgctggccatgatgggctacacgttaccggtgctgtaccaggtcattctccgggttatccgcgggaaaaaacttaccgggcggccgtggtggtaccggcgctctcagcgataa

SEQ ID NO: 21643 - DNA, 600 bp, Escherichia coli
atgagtgctgtttggaaaggcgtctttcaggcggccagcaacttccaccatgttgccggcattaaccgtcatgatcacaggctgattgatggcttcgctgatactggctgctgtcgcatatccctcggcataaagcaggttgtcaccatccttcagttggccacccacaacgaaaaaactcccccatgcctggccgtctttttcaaggtgtttactaccgtcggcccagatgcgctcaagggtcctgaactcgccatcagcattaaacagggggatcacaacgttgccccgctcatcagctttaaggccgttagcggcaatgacctgtttgtttttcaggtatgccagatctcccgtggcatccggaagccggttatattcttccatcaaccggttagcggtctgatcaaacttatccgcttgcgctgcagctctttgttcacgcctggccgcagcatcagcacggagcatggccatttgttcagggttaggggctgcgccggtagatacccatttctgaatttcaccaccgttcttatagtccctgtaccaccctgcaggtcggccatccagaaaggcggcatacaccccctttcttga

SEQ ID NO: 21644 - DNA, 1065 bp, Escherichia coli
atgcgctacttgttaattgttattactttttttatgggttttagttcattacctgcatgggcaatggactgctatgctgaacatgaaggtggaaataccgttgtcattggttacgtaccaagaatctctatccccagcgatggtaaaaaaggtgataaaatctggcaaagcagtgaatattttatgaatgttttctgtaataatgcactaccaggcccatctccaggagaagaatacccatctgcatgggcaaatataatgatgttgttagcatcaggtcaagacttttataatcaaaactcttatactttcggtgtaacttataatggggttgattatgattctacatctccattacctattgcagcacctgtatgtattgatataaaaggagccggaaccttcgggaatggctacaaaaagcccgcagtctgtagtggcggtcctgaaccgcaattatcagtaacttttccagtacgagtgcagctatatattaagctagctaaaaatgccaataaagtaaataaaaaacttgtattacctgacgaatatatagcacttgaatttaaaggtatgagcggagcaggtgctatagaagtagataaaaatctgaccttcaggattcgcggattaaataacattcatgtccttgactgctttgttaatgttgatctggaaccagctgatggcgttgtcgactttggtaaaataaattcccgaacaattaaaaataccagcgtgagtgagacgtttagcgtagtcatgaccaaagatccgggtgcggcctgtactgagcagtttaatattttagggagttttttcactacggatattttgagtgattatagccatctggatataggtaatggtctgctattgaagatatttcataacgatggaacagcaacggaatttaaccgcttctcacaatttgcttctttttcatcgtctagtgcgccttcggtcaccgcaccattcagggcagaactgagtgcgaacccggcagaaacggttgttgagggaccgtttagtaaagacgtaatcctgaaaatcacctataactag

SEQ ID NO: 21645 - DNA, 234 bp, Escherichia coli
atggattcagaaacagttctcggaacggtcaggtctggcgttaccagagtgccggaagccgggccgttattctggaagcggcagaagcatggcgacgggctgccggtgttgcaccccggacagactggcagcagtttgcccgaaaaagggctgaacaatgccaccggcgctgccggggaagggtgtaacgaaaaagcagccttcattactccagggattcagaaggctgaataa

SEQ ID NO: 21646 - DNA, 678 bp, Escherichia coli
atggaagaaaataatacgagtacagataaaaacaccctgacagcccttattgattatgaaaactgtggcagcctgaaaaatatttcccttgagcagtatggggaactgattatttttgtcgggccacagcagaacgtcgttgttcttcctgcagactcttttcctgaaggtgcgagaatcactatcaggcaggtgagtggtgtgtccaggaataatgtcgattttcatcttgttctggagctggggcggataagctgttgtgcagcagggaaagataaaacataccacatcatttcatcggataagggatatgacggtgttatcaggacgctgaaagaagccggtattacctgcatccgtcgtgatgtaccggaaagtattgctgctgccggtgagtctggtgcagacaaaagtaactgcctgaaacaaccttctgtttccgaaagtgatatcgtcagccgttgggcaggaaagctgcagcagatagccggcagcggagccggtaatatgcctgtgtccgtcgaaacatttaataattatttaaagtcacacatgcgtgacgaatggaacaaaacccgggcagtggcgataaggaatgaactggttcgtcggggagtcacagaagtcagggagaaaaagataatctggaaaaaggcgaaaaaggagaataaagcatga

SEQ ID NO: 21647 - DNA, 219 bp, Escherichia coli
atgtcatctcaacttcagaactgtgttgattgtggtaaagcattaagtcgaacagccacaacgtgcgggaattgcagctcaacggacccttttggaaaaaaacggcgcagcgatcgcttttaccagtggtttgtagggctgtttattacggctattattattgctggcggattatggtacatggggcttcttgacgtaccgggattactactcagataa

SEQ ID NO: 21648 - DNA, 381 bp, Escherichia coli
atgactttacctgccgggtattatcagattgatccggagatccgtgccctggtggccgcgatgaacattcacggcttccgcacatatgcttcctgtcagggacatggtttccctgttacaaagctgcctccttatattgcctttgcctgtccggtaaaaatggctgcccttcttgagcagcgactgcggcaggatgctgaatcagcaataccacgtctggcatggggatggtcggtgaagggggcttttaacagtaagtttcagctctgtttcaggcttcagcccgacacccctcattactggtataaccggtattgtcgtcactcgttatgtgccgatttcagaacactgatatcgttactgaagtcgttatctgagtag

SEQ ID NO: 21649 - DNA, 306 bp, Escherichia coli
atgatggatactttcgatagtgaaaaatttctctcagagctggatgttttatcaaaagagatcatgcctggttgtggtcttgtttttgagctataccaacgtcgtttgagtgctgcgattgataaagttgtcgccggattgccggaagaacaacacgcccaggcgtttgaactggctcgccaggaatttgattatctttctgcggaagagattgctgaagaaatacgccgtgactcagaacgtggttattgctgtcacggctttgatcgcgattgctgccctctcggttgcggtgatttaccatga

SEQ ID NO: 21650 - DNA, 234 bp, Escherichia coli
atgagttcagaagtaattaagcaaattcagaaaattcaagatcgcggcattatcatctattcaaagtttagagcggcagaatttgatcaggatgacgtttacagagagtcatattttctggtcgtagagtttaacgagttaatagcagaaaacatcattcatgacgaaaaaatggtagatcaaacggcttgtattcttcatgagcttagaagaatcgctatagaagggaaataa

SEQ ID NO: 21651 - DNA, 288 bp, Escherichia coli
atgattaatgaagctaaaaaaattgctgtggaaatgatgttttggacagcttgtcctgtggatgatgataattgttttgatgctattattaatgcatcaaaaattgacagagaatttgaagataaacatgcgatttatcttcatccgatttacagggatttattatcaacagatcaaataaaaagtgctctgaaaaagagagcaataaaaataatttccttcaagtgtgatattaatgaggattcggcaagaaaaattttaatgcaaaccatattaagagcggtttaa

SEQ ID NO: 21652 - DNA, 294 bp, Escherichia coli
atgaaattcacttcaaccacgaatcatgttttcacattcgaacgagtaacgctttgcacgattgttcttattcataaggatacgggacaacagtatgttgtcatatttacggataacaataacattcgtgactataagaccggaattgtttctcagtttggtgaacttaagcagagtgatattgatttaattcttttctatcgggacgaatatgaaaaatattttgactcgttaaataatggcgaggagtatttgagttttaaagaatatatcggatgtataaggggaaaataa

SEQ ID NO: 21653 - DNA, 243 bp, Escherichia coli
atgactatcgaaaatacaccggaaaacataaagaaattacgtaaaaaaattggccttacccagacagagtgcggtgagatttttggcgtaggcttaagtacatggcagaaaaaagaagctaaaacccacaaccagcttaatttatcgaaaggtgaatttgagtacctgttattacttgcaggggagcaccctgaatacgtcctgcataaaaaagctgaatcccgctcaccggaggaaccgtga

SEQ ID NO: 21654 - DNA, 255 bp, Escherichia coli
atgagaaaaaacaaagggcgattgacttattatcttgaagtgattgataaaaaataccattttgtaaaaaaaataagcagttattcaaaggagttcactgacggaaaaacaaaaagaacaaagagaacgttaagtgagctggtttttaatgaaagtgaggtcgaggcaatagactttacaaaaaatggtttaagacctgttgataagaatattctcttaactatggtgaaagaatataaggagagtgatgcatga

SEQ ID NO: 21655 - DNA, 324 bp, Escherichia coli
atggaaaactacgctaaatttgttgctactgaaatactgaaacaactcggtggaaatcgtttcatagcgatgacaggggcaacaaaatttgcttatttcgatgaaaatggtgagtgtggccttttctttcgtttgccttcaaactttgcaatgaagggcattaatttagttaaaatcaaattaacattttctgatacatacctggtgacatttttccgtatccgtggaaccacaaaaaaagaaatatcaaaatttgataacatttattgtgatcagcttgaaagtttgtttagcgaagaaaccggacttgcaaccagattttaa

SEQ ID NO: 21656 - DNA, 303 bp, Escherichia coli
atggcaaagctccccaagaaaataaatcaggaaattaaggcgctggatttacgccagtttgtaagttctgccgcacaaaaaccggcatcagcatcaacagtaacgcgtataaatttgaccatgacagatactgatctggatatagcgcaggagttccagaacgagtacggcgcaagccgtgctgaagttatcaggacggcactggcagcgttgcgtctgatttcagcagaagaacgccgtatattgtttgacgatatcagaaagaacagcccgaaagcaggaagaccaaccgtaaataaatag

SEQ ID NO: 21657 - DNA, 999 bp, Escherichia coli
atgaaagttaaatataaagttttcagtaatctttatcaggactcagtttctctgatgcagatttccgcgcaaatcagcaagttgcccggtattcaacaggcctcggtcgtcatgggaacgcccaataatctcgaacaattgcgcgatgcgggtctgggtaacgaaatcaacgccagtcccaatgatttagtgattgcagtcatgggtgaagaagatatttgcaatgaagcactggtactggcccagcaacgtctgaccagcaaacccgatgatgaaacggatagtggcattaaatcaccggaaaaggtcagcctggaaatggcactggaagccgaacccgaagccaacctggcactcatttctgtaccgggagactacgccgccgccgaagcaattaaagcgttaaacctcggaatgaacgtgatgatgttcagcgataacgtcagtatcgtgcaggaaaaatccatcaaaacgcttgcccgagaacgtcagcgcatcgtaatgggacctgactgtggaaccgccattgttaacggcattccgttaggcttcgctaatgtggtgaaacgcggagcaattggtgttattggcgcgtcaggcaccgggctacaggaagtgacttgccgaatcgaccagctcggagcgggtatttctcaggcgttgggaacaggcggacatgatctcagtgaagagattggtggaatatcgatgctcttcgctttagatgcgctggcgcaagacgatgaaactcgcgtaattgtgctgatttcaaaaccgccttcaccgatcgttgcccggactattctggagcgtgccgaggcttgtggaaaacccgtggtggtgaatttcctcggtgcgaatccgcatgatctggcacgtcccaatatcaccgcggccaccacacttgccagcgccgcaaatatcgccgtggcgttactgaatgatcaaccacttccgactatcgagaccgaaatttcctgcgacgatctcacaatgtga

SEQ ID NO: 21658 - DNA, 372 bp, Escherichia coli
atgggcgacgatgatttcacccgtggcaaaccgcatccaatgatcgacccgactctgcgcaatcaacgtctgctcaacgaactcaacgactcacacactgccgtcgtgttattcgacctggtacttggttatggcgcttccactacgcctgccagcgaattactggaccaactttcacacatcgacatgaataacgcaccgttgctgattgcgcacgtttgcggaacggaagctgatccgcaaatacgcagtcagcagataagcgcactacaaaatgcgggcatcatcattgccagcagcaatgcacaggcggcgctatgggccagcgccgttgcgcagactcagttgcagaaaaaggggctaaacgcatga

SEQ ID NO: 21659 - DNA, 351 bp, Escherichia coli
atgacagcctttcgtgccgcatttaaggcatatcgtatgcatcaggtgttaataatgcctcgctttgcacggcttaccattgcccttggcttagcaactgcggtatttcccgttgacgcagagtattattttaatccacggtttttaagcaatgatcttgctgaatctgtcgatttatccgcctttactaagggacgcgaggcaccacctggtacatatcgggtcgacatttatttgaacgacgaatttatgactagtcgggatattacttttattgcagatgataataacgctgaactcatcccatgcctgagtacagatcttcttgtcagtcttggtataaaaaaatag

SEQ ID NO: 21660 - DNA, 405 bp, Escherichia coli
atgtcacgtattcgtgtcgtagcggcccgtctgtacgccgcatttatccacgcacaactgtttgtaatgtcatgccggagcaaactgactaagttcctgctgctcattcccatgatgttgctgcccaaagccgttcttgccgatggagatcttgccgatattttccgccatgccagtgatggtgccgacgacgcagaaggttcatttgtgcgtattggtcgctttatcggtgtggttctgtttctcggcggcctgattggcctgaaaaaagtcggtaaacaagggggaatggggctggctggttgcattctatctatcgtccttggggtgttacttgtcgccgtacctgaaatgatgagtcgcagccagaaacagttggggatttcctcaatttccattggctaa

SEQ ID NO: 21661 - DNA, 984 bp, Escherichia coli
atgcaatcacgttatttactgagcacactgctcctggtgtgcagcgccgccacgtctgcagataacgcaggatggcagaacgcacgcacaccacaaacgacaaattctgccagcgatcacgttcagaacgcctcccaaaacaccggaggtgttccggcaacactggtaaaaggtgagctgcctgcccccgggcaggccagcccgctggtacaggatgcggcaaggcttgattctgagctctccgccgatgagattcgctcactacgcagtctcatggcggataacgagcgggccatcaatgcgcccatcaccagtgttgtaccccgtatcagctctctgacagttaatctgtcccccggtgccagccttcctcttgttcgcacagccatgaacaacctgagcgtggtgacatttaccgatatcaacggttcaccatggccacaatccgatcctccttataacgcggcaccaaaactctttgatgtgcagtacaacgggaacatggtgacaatcacaccattgcggccatgggcatccggaaatatttctgtctacctgaaaggtctgtcggtaccggtcatcctgaacgtaaccagtggcgaaacagatacgccgtcatccagtcaggaaatggacagtcgtctggatctgcgaataccacggcagggaccaaccagcccggttgtctccatcccgacggataagatcgccctgcatgatgcaacattacaggcatttctggatggtattcctccccgggacccttcagttaagaggctgaaattcacaggtaatgtcccggatacaacgatctggcaacacggcgatgaccttctggttcgttcccgggcgatgttgcgcgatgaatttgaacagaccttgtcctctgccgacggaactcatctctggaaacttcccgtcaccccactactgactttctctgtgaatggccagtccattcacgtgacaccagaactggagtaa

SEQ ID NO: 21662 - DNA, 1962 bp, Escherichia coli
gtgaccgtatcttctcatcgacttgaactgttaagcccggcacgcgatgccgccattgcccgcgaagctattttgcacggtgccgatgctgtttatatcggcggccctggttttggtgcccgtcataatgccagtaatagcttgaaagatattgccgagctggtgccgtttgcccatcgttatggtgcaaaaattttcgtcacgcttaacaccattttgcatgatgatgagctggaacccgcgcaacggctgattactgacctctaccagaccggtgtcgatgcgctgattgtgcaggatatggggattctggaacttgatattccgccgattgaactgcacgccagtacgcagtgcgacattcgtacagttgaaaaagcgaagttcctctctgatgttggcttcacgcagattgtgctggcgcgagagctgaatcttgatcagatccgcgcgattcaccaggctacggacgcgaccattgaattctttattcatggggcactgtgcgtggcctattcgggtcagtgctacatttctcatgcgcaaacagggcgtagcgccaaccgtggcgattgctcgcaggcgtgccgtttgccatacacattgaaagacgatcaggggcgggtggtttcctatgaaaaacatctgctgtcgatgaaagataacgatcagactgccaacctcggcgcgctgattgatgctggtgtacgctccttcaagattgaagggcgttacaaagatatgagctacgtgaagaatatcaccgcccattatcgccagatgcttgatgccattattgaagaacgtggcgatctggcgcgcgcttcatcaggtcgtactgaacatttctttgttccatcgacggaaaagactttccaccgtggtagcacagattattttgtgaatgcccgtaaaggcgatattggcgcgttcgattcgccgaaatttatcggcctgccggtaggcgaagtattgaaagtggcgaaagatcatctcgatgttgccgttaccgagccactggcaaatggcgatggcctgaacgtgttgattaaacgtgaagtcgtcggttttcgtgccaatacggtcgagaaaaccggagaaaatcagtaccgcgtctggcccaatgaaatgccagcagatttgcacaaaattcgtccacatcacccactaaaccgtaatcttgatcataactggcagcaggcactgacaaaaacctccagcgaacgtcgggtggcggtagacattgaactgggcggctggcaggaacaactgattctgaccctcaccagtgaagagggtgtcagcatcacgcatacgctggacgggcagttcgacgaagccaataacgccgaaaaagcaatgaacaatctgaaggatggtctggcaaaactggggcaaaccctctattacgcccgcgatgtgcaaattaatttgccgggggcgctgtttgtaccaaacagtctgttaaaccagttccgccgtgaagctgctgacatgctggatgctgcgcgtcttgccagttaccagcgcggcagccgtaaaccggttgctgatcctgcgccggtttatccgcaaacgcatctgagtttcctcgcgaacgtatacaaccagaaagcgcgtgaattttatcatcgctatggtgtgcagctgattgacgcggcgtatgaagcacatgaagagaagggcgaagtcccggtgatgatcaccaagcattgtctgcgctttgcctttaatctgtgcccgaaacaggcgaaaggcaatatcaaaagctggaaggcgacgccaatgcaactggttaacggcgatgaagtattaacgctaaagtttgattgccgcccatgcgagatgcacgtcattggcaaaatcaaaaatcacatactgaaaatgccgttaccgggaagcgtagtggcatccgtaagtccggatgagctgctgaaaacattgcctaagcgaaaagggtaa

SEQ ID NO: 21663 - DNA, 261 bp, Escherichia coli
atgttctcgcctgcgattggtattgtggaagatccggtgactggcaatgccaatggcccgatgggtgcatggttggtacatcacaacgtattgccccacgatggcaacgtgttgcgtgttaaaggccatcaggggcgcgcattggggcgtgacggtatgattgaagtgacggtgacaattcgtgataaccaaccggaaaaagtcaccatttcaggcacagcggtgattttgtttcatgccgaatgggcaattgaactctga

SEQ ID NO: 21664 - DNA, 246 bp, Escherichia coli
atgtcaaatacataccagaaaagaaaggcaagtaaagagtatggtttatataataaatgtaagaaactaaatgatgatgaattatttcgcttacttgatgatcgcaattccttgaaaaggatttcatctgccagagtattacagttaagaggggggcaagacgctgttagattggcaattgaattctgcactgacaaaaattatatccgtagagatatcggagcatttatactcgggcaaatataa

SEQ ID NO: 21665 - DNA, 492 bp, Escherichia coli
atgtgggaggatgcaaaatcgggggcatgtactaatggtctttgcggcacactatccgctatgataggtccagataaatttgattctatagatagcaccgcatatgacgccttaaataaaataaatagccaatctatttgcgaagataaagagttcgctggtttaatatgtaaggataatagtggcagatatttctcaacagcacctaaccgaggagaaagaaaaggatcatatccattcaatagcccttgccctaatggtactgagaaagtatcagcttatcatactcatggtgcagatagtcatggagaatattgggacgaaatattttcaggtaaagatgagaaaatagttaaaagtaaagataacaatatcaagtcattttatttaggtacgcccagtggtaattttaaagcaatagataaccacgggaaggaaataacaaacagaaaaggattacctaatgtctgcagagttcatggtaatatgtaa

SEQ ID NO: 21666 - DNA, 1185 bp, Escherichia coli
atggcattaaccgatatcaaagtgaaaaccgcaaaacccaaagacaaaccctataagcttgctgatggcggcggtatgtatctactgattaacactaatggttctaaatactggcgcatgaagtaccgctttgctggtaaagaaaagatgctttctattggcgtataccccgatgtaacgctagccgatgctcgcgagaaacgcagtgaagccaggaaactcctcgctgctggaggcgatccaggggaggcaaaaaaggaagaaaaaatcgcgcagcaaatgagtctgaaaaatacgttcgaggctattgctcgcgaatggcaccagtcaaaagctgatcggtggtcattacgctatcgtgatgaaatcattgatacctttgaaaaagacatttttccctacattggcaagcgccctattgccgaaatcaaaccaatggagttactggaagcactgcgtaaaatggaaaaacgtggagctctggagaaaatgcgcaaggtccgccagcgctgtggtgaggtgttccgctatgcaattgttactggccgggcagactataacccagcccccgatcttgccagtgctttagctacaccgaaaaaagtacattttccctttcttactgctaatgaacttccccacttcctcaacgatctggcgggttataccggaagtataatcactaagacagctactcagatcattatgttaaccggcgtacgaacacaagaactgcgttttgcacgctgggaagatatcgattttgagacaaaattgtgggagatcccggcagaagtaatgaagatgaagcgacctcatattgtgccgctctctgagcaggtcattatgctatttaagcagcttgaaccaatctcaaaacatcatcccctagtctttatcggtagaaatgatccccgcaaaccaattagtaaggaaagcattaaccaagtaattgaattacttggatataagggaagactcacagggcacggtttcagacacaccatgagtacaattctgcatgaacaaggctttaattccgcctggattgaaatgcagttagctcatgtggataaaaattccatcaggggtacctataatcatgccctgtatctcgatggccgccgtgaaatgatgcaatggtacgctgattacattgattcactctccagccgggaaagttaa

SEQ ID NO: 21667 - DNA, 2712 bp, Escherichia coli
atgaatgccattattccgcacaaaagacgtgacggcaggtcttcctttgaagacctgattgcgtacacgtctgtgcgggatgatgtgcaggaaaatgagctcacagaagacagcgaaatcaagagtgatgtccctcaccgcaaccgtttcagacggcttgttgattatgcaacacgcctgcgtaacgaaaaatttgtctccctgattgatgtgatgaaagacggcagtcagtgggtaaatttctatggcgtaacctgtttccataactgcaattcactggaaacagctgctgaagagatgcagtacaaggcggacaaagctgttttttcccgtaatgatacagaccccgttttccactacattctttcctggcctgcgcatgaaagcccgcgtcctgagcagctttttgactgtgtgcgtcacacactgaaatctcttgaactctcaaaacatcagtacgtggctgccgttcatacggacacggataatctgcatgtgcatgttgccgtgaatcgtgtacatcctgaaactggttatattaactggctttcctggagccaggaaaaactcagccgtgcatgtcgtgaacttgaacttaagcacggattcgcgcctgataatggctgctttgtgcatgcacccggcaaccgtattgtgcgcaaaacagcgctggtacgtgagcgccgtaatgcctggcgacgcgggaaaaagcagacgttcagggaatatattgcgcagatgtcgattgccgggctgcgtgaagagcccgcacaagactggttgtctttgcataaacggctggccagtgatggtctgtatatcacgatgcaggaaggggaactggtggtgaaggatggctgggacagagcgcgggaaggtgttgcactcagttcgttcggaccgtcatggacagctgaaaaactggggcggaaactgggggaatatcagcctgtaccgacagatattttcagtcaggtggggacacccggtcgttatgatccggaagccataaacgttgatatccggccggaaaaagtggcagaaacggagagtctgaaacagtacgcctgccgttattttgccgaacgcttaccggaaatggcgagaaatggtgagctggaaagttgcctggatgtgcacagaactctggcaaaggctggattatggatggggatccagcacgggcatctggtactgcatgatggatttgataaacaacagacaccagtacgtgcagacagtgtgtggccgttaatgacgctggattatatgcaggatctggatggtggatggcagcctgtaccgaaggatatttttactcaggttatacccggagaacgattccggggacgtaatcttggtactcaggctgtcagtgattacgaatggtatcgtatgcggatggggacaggtccacagggagcaataaagcgcgaactgttttctgataaggaaagcctgtgggggtacacgactgttcagtgtgagtcgttgattgaagatatgatcgcgggcgggaatttcagctggcaggcgtgccatgagatgtttgcgcgtaaagggcttatgttgcagaaacagcatcatggtcttgtgattgtggatgcgtttaatcatgagctcacaccagtgaaggccagcagtatccacccggatttgacgttatccagggctgagctgcaggcagggccatttgagattgcaggtgcagatatatttgaacgggtgaagcctgaatgtcgctacaatccggaacttgctgccagcgatgaagtggaacccggcttccggcgcgatcctgtactgcgtcgtgaacgccgtgaagcccgtgcagctgcgcgggaagatttgcgcgcgcgttatcttgcatggaaggagcactggcgtaaacccgacttacgttacggagaacggttacgggaaattcatgctgcctgccgtcggcgcaaggcgtatatccgtgtgcagttccgggatccacaattgcgtaagctgcattaccatattgcggaagtgcagcgtatgcaggcgctgatcaggctgaaggagagtgtgaaggaagagcggttgtcactgattgcggagggtaagtggtatcctttgtcctaccggcagtgggtggagcaacaggcggtacagggagacagagctgcattatcacagttacgtggctgggattatcgtgatcgtcgcaaagacaagcgacgaacaacgaatgccgaccgctgcgtgattctctgtgaaccgggaggaactccactttatgaagacactggcgttctcgaagcccgtctgcagaaagatggcagtgtgcgttttcgtgatcggaggaatggcgagttagtctgtgtggattatggggaccgtgtggtgttctaccatcatcaggacagaaatgaactggtggataagctgaatctgattgctcctgtattgtttgatcgtgagccaggaatgggttttgaaccggaaggctcatatcaacagtttaatgatgtatttgcggaaatggtggcctggcataatgcagctggaataaccggaaatggacactttgtaatcagccgcccggatgtggatttacatcgtcagcgtagtgaacagtactaccacgaatatatcaggcaacagaaaagcatatccggggggcatggcgcatcttatgctccagttcaggataatgagtggacgccaccatcacctggaatgtag

SEQ ID NO: 21668 - DNA, 366 bp, Escherichia coli; identical to SEQ ID NO: 5339

SEQ ID NO: 21669 - DNA, 546 bp, Escherichia coli
gtgaaggctgaaaataaaatattaaatctttttcatgcgacaacaatgagcagaggcctgcaaataataaaagatgggaaaataagaactgatgctccttctgttatatgctggtcgttagagacgacaccaggatggatttatttatcggatcaacttgataatgcggtgcattgggggaataaaatagcatgcttttcaaaagatgaattatttttctatattttcagagttcaggttcaggaagaaaattgttatcctgatacagatgatttgcaatatgtgtcgtggttatctcctgaggaggcagaaaacacagacctgtatacatgtctttctctttgccattcctgccgaactgacaaagaactgtatacaggttgtgaaatatcagattatgcagtccttcctgcaacaacactgtatactgacaattcaggacatcctcaatatgatattgttaatacgcttaaaaaacatataggcaaagatgagtataatcagtatgaatcacttcgtcagcgtattgaatgggtttgtttataa

SEQ ID NO: 21670 - DNA, 657 bp, Escherichia coli
atgattaatgaagaacaatttgtaaaagttcctatgtggattctaaaaataagccaagtaaacgggcataaatttacagatagtgctaaaaacctttactgctatctgaaagggtttgatcgtgcatttccctcttacgctaagataggcgatgtttttggcataacaccaagagcagcagaggaaagggttaagaaattgctcgaaatgggattaattataaaagatgcacgaccaggaagttctaatgtctatcaagtggtagatattccacaagaagaagctagacaagaagcccagacacaacaagaagctactgttaaagctgttcctgatcagcttccccctacggaagataataaagagtcttcttttgatgttcttgatgatgattgggatacgcctttaccgtgggagacggaagaaacacctgtttcatcaagtgaaaaggtagctaatgataatgaggaggatgtgttagagaattttgcctctcttatcatccagaagaaagacaaaagaacaggaggagcatcatttatagaatttgcaacatcgttagcctataagcacaggttaaagctaccaaatggtattgaggcatatttttctaagcattacccaaatgtgtatgatgactttgatattccattttaa

SEQ ID NO: 21671 - DNA, 243 bp, Escherichia coli
atgttctctctgattcaacgtggtcagatatacaccgatagcgctggctatccagtaaaaatcattcgtagtactgatcactcagtattcttcaagaggatggatggctatcctggaagagtgtgcatcagaaaattcaataatttattcgaacacattgatcacagagaatatcaccagatcctggctgaaacagagcaggagaaccatctgaaaaaattacgtgccatgcaaaggagataa

SEQ ID NO: 21672 - DNA, 1557 bp, Escherichia coli
atggcagaaaaaaagaaaaaaactattactggtcaagtcttgaactccattaaaattaacaaactaaaatgtataaatggattaaacgagattatttttaaacctcatgcgttaaccgcaattttaggtccaaatggaagcggaaaatcaacaatactccatgccatagcaagcatatacatgcctgaaaaaggtttccccggtgaagaccatcggttaatgcatttttttccacgcagtccacatgctgaatggaacggcagtgacttcattgtaaatttaacttatcgtaaagatggtgtaatgattgaaaatgaattaaaaaattatggaaaagctgatgttcgaggctcacgatggattcagatttatgctcgtcgtcctttaagagaagtttactatcttggcattgataaatgtgttcctataatagaatcagaaaaaaagaataatattcagtatgaaaccagcagtgtcagtaatgatttaataacaaacattcttcattacgcctcctatatacttaataaaccatatacaagtttcaatcaacatcaacaacccaatggaaaaatattgattggagttgagtcagagggactggcctactcatcattaagtatgagcgcaggagagcaaaagatatttttaattctggaaacaatattaaaagcggacaagaacgccttaatattaatcgatgaattagatttgctgttgcatgacgaagcattgaaaaagttaatagacgtcatatcaactcatgccgaagataaaaataaacaaatcatcttcactacccatagagaaatggtaaccactttatcagacaagataaatataagacacgtcgtaaacattcaaggccgtagttattcatttgaagaaacaaaacctgatgctataaacagattaacaggtaaatcaacaactcccattgaaatatatgtggaagatgatcttgctgttgcaataataaataaaatatgttcttcacttaaggccagcagatatgtgaaaatatttaaatttggcgcagcttcaaacgcattcactctacttgccagtacacttattcgtggagataatctatctgataaactttatattcttgatggcgataaatactccacagaaaatgaaaagaaagctgctcttgataaagttttcaccggcacagaatcacgaacttatgagttaaaagcggcagcggaaggaaaaataaaacaatttaatctcccaaatggagttaagcctgaacaatacattcattatcttattacaaatgtcccactggacggattgggtggagaatatttagaaataatagaagcagcaagggatatcagagttgaacttgatgctcataattatatctcgaacattttaactaaattgggcattgatcgtccgtccgggttaacacgagtgatggatctggcctccaggcatcccgaatggcatcagtatgtaagtgaagtcactgactggttacagcccgtagtttctgatttaatggaacgattacctgagaatgatacagtagatataacttaa

SEQ ID NO: 21673 - DNA, 618 bp, Escherichia coli
atggggaaatatcaggaagaaaagaaaacacccatcattatggtgaaaaaacgtcgcactcttttacccccttccttatctgaaaaaacaggtgttatcgcacgttcagagacggtaaagatggaagatccagtatctgtgggaagcagttctcctgccgtcgatactcatccccctgaagcttctgccagtaagaaaaaaagaaaaagacgccgttttccacgccagcctcattggactcatgaatttactcacaattgcgtggaaaaagttaagtctctgtttccccatcttcgcgcagaaagcgggggatttcttccactgaaaattggcataaccaatgattttgccgcattcctgacagaacaccctgagacagaactgacactggatgaatggtcctgtgcaatatcctgcatcaccacccgacaggtatatctgctgcgtactgctgtcgcaggtatccctcgttatggactggatggactaccagcaggtcaggtatcagaatgcgatgcgcagaatgccagacgctggctggcagtaagggaaaaacagaagctaaagatgaaaaccatgcaggaacagaccgcgtcaaccgaaaaaattgagcggtaa

SEQ ID NO: 21674 - DNA, 993 bp, Escherichia coli
atgaatgataaaaaagagagatacatatcttccgagctgtcagataaaactcaactttctgttttgcgcagtatagttggatggggctatgaaaaaataagacattctctggggcgaccagggcaacttgaaagagcgattgcatccggggagttaatcccgtgtcctttaaaaactcctgtcgatacactatggacgcgatcggtgatttactggcaggactggatatccccatcatggataccatctgattctcgccaatgtacgatagatttctataagccaggctactatcgtggtttagaacgatgtcatatggttgttcccgaagttcagaatctgattagcaaagaagatattcctcatttttcgtgtgatatcaccgatattcagggtatctccgcatcgaaatctgagatgtatgatattggtgacatttatgaatttcctctactgagatgccctgggctggttaccccggtaaatgaagaacatctcagagaaaatatgcagtactgggagttaaggctccatcgaatgcgctttgctgaatatccgtggactgagcgtaagctgtattggctgaatgaaggtggctcacatcattttgcagctgcccgttatcaggcatgccgtctgggaatttctgttccgcttacgggcagattgagtcgcttccatgtaaacatgcagatggtttcagctttatgtcagcaatggcacctgtttgctattcctgcagatgaacggttagcctgctttttcagggcgatgattgcctttgaatgcccatttggtaattcagaattacctcggaatatgcacaatactataaagtcaggagtcaaactcaaactcgtttggcttgaacgtggtcataccaaagcagacattgttgcagatgtacttgccacagcaggtttccctgattttggggatcaattgaagctgctggctaccagcagcctgcaaaaaacacataagctggcctga

SEQ ID NO: 21675 - DNA, 384 bp, Escherichia coli
atgtacgcaaaatcctttctcgcacttgatggcaacggacgtctgaccggtgcccgtaccgcacagacagcgccatacgatcgttacacctgccacctctgtggcagtgctctcagataccacccgcaatacgacactgaacgtccctggtttgaacacactgacgacgggctgactgagcatggtcatgagtgcccttatgtcagaccggagcgcagagaaatactgttgattaaacgcttacggcaattcgtaccggacgccttacccgtagtgcgtaaagccagctggcactgcagacaatgtcaccacgattattatggggagcagtactgcacacactgtcatacagggcgcttcagtgaggaggtggttgcagaatga

SEQ ID NO: 21676 - DNA, 1092 bp, Escherichia coli
atgaataaaagaaaaacgcttttcaatatacaagcactaaggtttattgctgcagccatggtggttttggcacatgccgaacttggacaatatggcattgggaatatcgaaatccttgcatctctgggaggatttggcgttattatatttttcataattagtgggtttattataccttacgtagcatatggtggctctcaatcagaaggagaattcaaaatatctgcagggaacttttttatgcgaagagtaataagaataatcccggtatatgctttaattaccgccctttgcgttctatcagccttcatagtaaaacattatatatcttccccaactccacctattgcttattggtggcccgaaacaaaaatcagtcttcaatggtatcttgagagtattacatttactcactggcatcgcgatgcaattctaagtataggttggacattacaacttgaatttttgttttatacttcttttgcattttttattgctatcaaattatcaaggttagagtatatagagatcttatttttaactatatccatagtagctaatattttaacttatcaaaataacagcatcatattcgaaattcttccgttcatgaaaacactggcaagaccagaaatggtcgtatttgctatgggtatgtttatgtatcgattatacttactgggcgctatgttaaaaaaaacaattgcgcttacaatattaattttgtttattcccacattcttattatgtgaatactttaatattacaacaaacatggggggggaatggcatcgtcctttgatatgggggtttttcgctttttatggtgtctgggcagcgttgagccttgaaggtaaaataaaaccggctaaacttattattttcctcggtgatgcttcatatagtatatatttgacgcatggtttgattacagcttgggtatcatatatgtttgtgtctttcggacttattgattattccaatgtatttctatatattggaatatactttataataagttgtgcgcttggcagcgtcattcatatgtacatagaaaaacccatcgcagaatttttaaaacgttttgtttga

SEQ ID NO: 21677 - DNA, 588 bp, Escherichia coli
atgaaacctgtctttgatgaaaatggtctggcaacgcaggccggtgatattcgttgtttttattacgatgcagtgaccatggaatatgctggctggtcagatgaatatattaacgctggcgtcagtatgccgggtaattcaacagatgttgatccaggtgaaatggttgctggaaaggtttttatgttcacgggcaccggatggcgacaggatgaagatcatcgtggtgaaacggtatattctaccgatgatacctcatcttccactatagattatatcggcccagtcaggaaggggtacacaactgttgcgccatcaggaccatatcaaaagtgggacggcaaaaagtgggtaacagatactgacgcgcagcacgttgccgaggtagaagccgctgaacagaagaaggctgcgttactggctgaagcgcaggagaaaataagtctctggcagacagaattgcgactggacatcatcagtgatggggataaggaaagtctgattgcgtgggtgcagtacataaaagccattcaggctatagatacttcatctgcgccaaatatcaactggcccaccgaaccagaatag

SEQ ID NO: 21678 - DNA, 177 bp, Escherichia coli
atgctgaccgataccaagctgcgcaatctcaagcccagggacaaactctacaaagtgaatgaccgggaaggtctctatgtgggggtcgcctcagaaaacggaatctatggtcactcccgtttttgcaacaccgattttgacgacaagttggcttgcttgaatctatccggcgtctga

SEQ ID NO: 21679 - DNA, 573 bp, Escherichia coli
gtgcaatatgcctacatcagggtaagctcggccgatcagaatacggcccgtcaggaagaggcattgtcaaaggcgggttttcagcctgataaaatttgtgttgagcatgccagcgcgaaggacacaaaccgcccggggttacaggaactcctggggcaattacgccctggtgatacgcttctggttcattccatcgatcgcctttgccggaatatgtcggatatgtgcgctgtcaccacccggcttcgtgaccagggcgttacccttatttttctgaaagagcagctgacgttcagcgccggcacaaacaatccgatgcaggaactgcagctgcacatgatgtcggcattcagccagtttgaacgagccttactgaaggaaaggcaggccgacggcatcgccgcgaaaaaagcacggggtgaaaaaacagggcgccccggcgccgatatcaaaaagatccaggaaattgacgcactcagaagcagaggggtcaggctcaggatcgcctgcgaccatgcgggccttggcgtttccacatattataagcttcgtcaccagatgaacaaccagtag

SEQ ID NO: 21680 - DNA, 1392 bp, Escherichia coli
atgcaactgacgctccagatagtcatcaccgatgaatcaggctccagtcgaacggaggaactgatgacaatccagaaatcaggggagacccggaacgacatcggattatcggtgtcagaatccaagctgttgctgaatacggtccagcagtcggtggtccagctgcaggcagacgaatatactcaacaccatatccggtgccctcactgccttgctgcgcgcagaatcaaaggcaaacagaaaatacggtaccggacgctgtttggcgttattccggtatccgggcttcgggtgtaccggtgccgttgtgaagagagtgatacaaagacagtcagtttgctcagcgactgggccggcgattattctcacccggcactgaaatatattgaaacccgctgggcctcgatgatctcctatgaaatgacgactcgtctgctgaaagatattctgccggtgggccacagcctgaatgcctcaacggtgaggaatcatttatgccaggtggcgcagcgtcttgacgctgaggctgaagctcattcaggttttctttccggctgcccccgcgactgggggaacctgcccaggccaggaaaaccgcttgtggtgggtatagatggtggttatgttcgcgatcgggatgacaaaaagcgtaattttgaaattattgccgggaagtctttttccgttggtgcgcctgctgacacccgccgcttcggttttgttcagaaggatgactgtcatccggaacgcaggctcatgacccacctttcagcgcagggaatgcaggccaaccagcagatattttttctgtccgacggcgcggataatctcagggacctccagttcggtatgtaccctgagtcaacgcatgtgctggactggtttcatatcaccatgaggctgaaggtgctcatgcaatatgcccggggactgctggtatcagatccagaggcggggagtaaagttctggcactgctggaaagcattaaacgatatctctggcatggcaatgttgtcgctgcgctggaacatattgataattgcgttatgtattgcgatgaccctgaactcagctatcctagcctgaaatccctgcaaaaacatctggatgaaatgtatacctacatccggaataataagatgatgatcccaaactacggcgaaatgcgtcggtacggagagccggtatcaaccgcgtttgtggaatccacgatcaatgaagtgatcgccagacgaatggccaaaaagcagcagatgcagtggagcagaaaaggggctcattatttgttacagacccggaccgccgttttgaataacgaactgcaggataaatttgtctgctggtatccgggttttcaaagtgacgggaagggaccagcgatggcagcatag

SEQ ID NO: 21681 - DNA, 438 bp, Escherichia coli
atgctctcggtcgtatggaagctggaccgcctcggtcgtgatcttcgtcatctcattaatacagtgcacgacctgaccgcgagggggaccggtctgaaagtgctgaccggtcacggggcgactatcgacacaacaacggccgctggcaagcttgtcttcggtatctttgccgcactggcggagtttgagcgcgaactgattgctgaaagaacgactgcaggtctggcatcagcaagagcccgtgggcggaacggcggccgaccttataaaatgacgccagtcaaactgcgactggcaatggcatcaatgggacaatcagaaacaaaggtcagtacgctatgccaggaacttgggataacccggcaaactttgtacaggcatatttcccctgttggtcaactgcgggcggacgggatcaagctgctcaaccgtggataa

SEQ ID NO: 21682 - DNA, 657 bp, Escherichia coli
atggaaacctacaatcatacatatcggcaccacaacttttcacataaagacttaagtgatctcaccttcaccgcttgcacattcattcgcagcgactttcgacgtgctaacttgcgtgatacgacattcgtcaactgcaagttcattgaacagggtgatatcgaaggctgccactttgatgtcgcagatcttcgtgatgcaagtttccaacaatgccaacttgcgatggcaaacttcagtaatgccaattgctacggtatagagttccgtgcgtgtgatttaaaaggtgccaacttttcccgaacaaactttgcccatcaagtgagtaatcgtatgtacttttgctcagcatttatttctggatgtaatctttcctatgccaatatggagagggtttgtttagaaaaatgtgagttgtttgaaaatcgctggataggaacgaacctagcgggtgcatcactgaaagagtcagacttaagtcgaggtgttttttccgaagatgtctgggggcaatttagcctacagggtgccaatttatgccacgccgaactcgacggtttagatccccgcaaagtcgatacatcaggtatcaaaattgcagcctggcagcaagaactgattctcgaagcactgggtattgttgtttatcctgactaa

SEQ ID NO: 21683 - DNA, 192 bp, Escherichia coli
atgtttaataccagtcagaacgataagatggttgaagtgttatcaggacctgagcggcgtcggcgtcgtacaccgcaggaaaaaattgccattattcagcagactatggagcccggtatgaccgtgtctcatgtcgcgcgcctgcatggcatcaatgcaaaccagatattcaaatggcgcaagcaatattaa

SEQ ID NO: 21684 - DNA, 657 bp, Escherichia coli
atggcggtggctgacctgccgacgtatggttatcgccgtgtgtgggcgctgctgcgacgggagtcggagcgggacggcctgcctgtggttaatgcaaagcgggtgtatcgcattatgagaacgcataatctgcttcttgaacgtaaacccgctgatccttgccgtaagcgggcccataaggggcgcgtagcagtagcggaaagtaaccggcgctggtgctcagatggctttgagttccgctgtgataatggcgaaaagctgcgggtgaccttcgcgcaggactgctgcgacagggagatcattgactgggcagcgagcaccggaggctatgacaaagaaacggtgcaggatgtcatgctgggtgcggtggaaaaacgcttcggaaggcagttgccaacagtgccggcgttcgcccggttgctgggactggagccttgtacgacagcagtgcgaagcccggaaagcaatggcatagcagaaagcttcgtgatgacgataaaacgggactacatcagcatcatgccgaaaccggacagcgaggcagcggtgatgaatctggcggtggcgttcagtcattacaacgaacatcatccgcatagtgcactgggatatcgctcaccacgggaatatatacgcaggaagttatcgcaaccgtaa

SEQ ID NO: 21685 - DNA, 858 bp, Escherichia coli
atgaaaaagatccgccttattataatctctttactggctggaatgtgtactccagcattatctacaccagtcaatgttactgatacaatacaaagcacagaagaccatatcaaaggtcgggttggttttactgaaatagactttttatccgggaaggttctgagtagtcatcgccgtgaagaacgttttcctatgatgagcacattcaaagttttgttatgtggagcaatattagtacgtgttgataaagggcttgaacaacttgaacgccgaattacctataataagcatgacctggacgactattctccactaaccagtcagcacattgcagatggaatgacggtttctgagttatgcaatgctgccattaccaccagtgataacactgctgcaaatttattgctatcaactattggcgggccggagggattaactcattttctgcgtagcactggtgatagttatacaaggcttgatcgacacgaacccagccttaatgaggcgaagcctggcgatgagcgtgataccaccactccggcagcgatggctcaaacgctacaaaaattgttaaacgaaagtgtacttacagaaaaatctcgaaaaaaattaataagctggatgcaggaagataaagtcggcgggcctctgttccgctctgtactgccagctggctggatgatagcggataaaacaggagcaggtgatcacggatctcggggcatcgttgcactgttgggccccggaggcaagccatctcgtatagtagtcctgtatattacaaatactcattcatctatgaatgaactcaacgagcatattgcagggatcggagattcagtaattaagaactggtaa

SEQ ID NO: 21686 - DNA, 561 bp, Escherichia coli
ttgcaacagtgccctggttactttccgttcagtcgccatcgatgggctgatattgagcgcgccaccttcgcttttggctacggcctccgggtaaccccgctccagttagccagagcctatgccactctcggggcctgtggcgtttatcatccgttatccgttacacggttatccgcgccggtgtacggtgagcaggtggcggacccgaagcttgccgatgctgtaatcagaatgatggaaagtgatgtgttacccggcggaagtggcgtaagggcagctgtaccgggctaccgtctggcaataaaaaccggaaccgcagagaagttaggtgccggtggaaaatatgacggggggcatattacctatacggcaggcgtcgcgccggcgagccgtcctgaagtggcactggttgtggttattaacaatcccaaagcgggacagcattttggtggctcagtggcggcgcctgtcttcggccagattatcggtccggtgcttacccggctgaagattgcaccggatgctttacgtgctccggtggtacaccgacagtccggctga

SEQ ID NO: 21687 - DNA, 333 bp, Escherichia coli
atgacccatggaatatgggagttggggaacggtcaggagaaaaaatcggtgaaggtaagcgggcatctttcctccaatagcggcgagattgtgctgcaatgggcgctggagggcaaagggattatgctgcgttccgagtgggatgtgttgccgtttctggagagtggcaaactggtgcaagtattgccagagtatgcacaaagcgccaatatctgggctgtttaccgggagccgctctatcgcagcatgaaattacgtgtctgcgtggaatttctggcggcatggtgccagcaacggctgggcaagcccgatgaaggctatcaggtcatgtag

SEQ ID NO: 21688 - DNA, 654 bp, Escherichia coli
atggatatcatttctgtcgccttaaagcgtcattccactaaggcatttgatgccagtaaaaaacttaccccggaacaggccgagcagatcaaaactctcctgcaatacagcccatccagcaccaactcccagccgtggcattttattgttgccagcacggaagaaggtaaagcgcgtgttgccaaatccgctgccggtaattatgtgttcaacgaacgtaaaatacttgatgcctcgcacgtcgtggtgttctgtgcaaaaaccgcgatggacgatgcctggctgaagctggttgttgaccaggaagatgctgatggccgctttgccacgccggaagcgaaagccgcgaacgataaaggtcgcaagttcttcgctgatatgcaccgtaaagatctgcatgatgatgcagagtggatggcaaaacaggtttatctcaacgtcggtaacttcctgctcggcgtggcggcgctgggtctggacgcggtacccatcgaaggttttgacgccgccatcctcgatgcagaatttggtctgaaagagaaaggctacaccagtctggtggttgttccggtaggtcatcacagcgttgaagattttaacgctacgctgccgaaatcacgtctgccgcaaaacatcaccttaaccgaagtctaa

SEQ ID NO: 21689 - DNA, 1104 bp, Escherichia coli
atgccgttagcacaactgaagcgtgacactctttcccttgttaagctaaatggcgacaggactgatgggataaaaggaagtgttcaaaagaataagattttcattagccggagcgatattgctattgaaaagggggatctgcttatacgcagtatgccgcatggcggtactgaagaatatattgtaatcgaacctaacttcagaatgggtgtaggcggtattcctgcgacctatcaggctgaggtgatactgaaggaaaatacaactaccgaggaaatgacatcatccccttccacagcagtaccggaagcagttattgccactgtaaatacattcattgctctgtgtgtcaccattgtaaatgagggcgcatcaagtcctgataaatatgcttcgcagttttatcgcttgcgtcaggaattacttgaactcgataatattatcaccattccttcatggatcagattctccatgtcacccgctgacattaagaataatgttggtttaaacgtcacaggtggcgatggagcttgggggcgaagacgacagtatttacagagcgaatctattaaaatactttcaagctataaaaccgcaccaattattgagcattctgttagtgagaataaaataaaaaatactgagcaagtcagcgggttgacaacgatggcaagcgatgcagggttaaacatgaagaagaaagtattcattgtccatgggcacgatgataaactaaaaaacgaggtttacatttttctggcaaatgaaggtttccagcctgtcatacttcatcatgaagccaatgaaggacagaccataatcgagaagcttgagaagcatatcgacactgtatcctatgcagtggtgctttatactgcctgtgatgaagggaaagccaagaatgaaactgaactaaaaaaaagagcccggcagaatgttgttttagaacacggctggctcatgtccaagctatcgcgtaaattcgtcgctgcgatagttgaagatggcgttgaatttcctggagacctgtccggagtggtcagaatatctgcatcagactggaaatatgatctgtctaaagaattaaaagtgctcaataattaa

SEQ ID NO: 21690 - DNA, 1131 bp, Escherichia coli
atgggatacaccagaaatcagcacatgctctcacagtggtttctcaggaacttccgcagtgatgatacggcacagagtccgaaggagaagcaacgggtctgggcccacgttgtggttcctacggcagaaggcaaaaatgacataaaggacatcccgctaccgatatccagcgtggccgtctgtaaggactgctttcgtcttaccgacggtgacacaggcgaggtttttgatatcgagcatgagctcagtgattatgaacaggatatggctttgcttgtccgggatctggttcagaaccataatttcgcgcgtctggctaactgtgacactgatgattttccggtagagaagcttgcaagttttgctatatttcagatgttacttaacctcaataacccgcaaagcagatttccgggtaaaaatgagttatttcagtcattcattaacctagtaaaaaacaaccttcagcatatcatttccgaaacaatttctttgtctgacgttatgccggagttggcggctttaagtatctatcagaaactgattcgtatagctcgttcttcttctggggatgacgaaaaagctaaggccatgtttgtattattttcccttctcgcacttcagggtaaaataacaatgattgacactatggcctggctacgcggagaggttttttccggaatacatcgtgtggatatatttcataccgggcaccacttttacagtacagaaccacgtccggtatttacagtatcacctaatgtattttgcaaaatgacagaagaacgcgtcctgtaccttccccttgctcataatttggctcttaagttttatcagtacccggaacacgggtttttcaccccactggaaattaatgtattcagcccggaccctcagaaactacttacaaaagacatgtcacgaatcaaagtttataaatgctcctatgattatattgatcaggttatgtcaacaattgatatgtataacgtcggattttcaaatattatttattctagctggcagctcagtgatgttgaaaattatctgaggctacagaacgaacatcatgatacttattatcttccggaacatcccgtttgctggactgtatccagggagaaagggtga

SEQ ID NO: 21691 - DNA, 291 bp, Escherichia coli
atggccctgaccccggaacagataagttgccgacagcagctcgtggcaatgggtgacttcaatgcccataccctgctgcccggagaggagtggaccaggccagaaaacgctgatgtccggcacgttctgtcgctgatccccctgacggacatccagctggctaaccggctggatgtggacgaacgcaccatccgcaaggggaaatccggcgagaccagtatggtattcaccacctggtgctgcctgtgctggctggccgggctgggaatgctgctggaagaaccggcttag

SEQ ID NO: 21692 - DNA, 648 bp, Escherichia coli
atgtcaccactgataatacgcgaacacgataaaaaattaatctggcctgaagatctcaatgaagcgggccagtcctaccaaaaattagaaaacatcactgacgacgcaggctttaagcacgaggtcattcttgaagacatcggcgaacaagcacgtctttacttgcgtcatatcgagtcaaatgaagtttccgcaaactatatgcttgagtttgctctggaagctccagagggttttcctgatcgtattccgcaggttatcagtgcatttgtcggcgatgaatatagggcagtaaaactgtcccagcacgtataccggctaatcatggcacattatggtgtcgttgtaagcgatacgcagcagaccgctggcggcatatatatctggctctatatggctctggggaatgacgtgctgattaacgtcatgaaaattcatggggaaaaactggagtatcagctaaatgccgctggtaagcctgaagcttattgtggcaaactcgacctactggaacaggctggcgatactatctggggtggcccagatgaagtggttgctgaaataaacctagagcgtctgggctttaagccgacgcaccaggatatgcagcatattgttttggccgctcgcctcaatactaattcgtag

SEQ ID NO: 21693 - DNA, 336 bp, Escherichia coli
atgatcactcattcaccattcactattgctgataactatgctcttttgggtagtttttgcatacctggcgttcagggtaaattcgaagtacgttcaaataatacccgcgagaagcgtccgatgctgatcgtggtgcatgaaaactggcagcaagcaacccgtcgcgaccgtgttgtgccgctggttgttgttcagtttgaagaagatggccgtaagaaatgcatagaacagaaagaaaccgagctatcaaaatcggtgaatctggctgatttcagccgccgcgcgatagaattttttcaatggaatgagcacggtaatctggcatgtcaccactga

SEQ ID NO: 21694 - DNA, 582 bp, Escherichia coli
atgactgaacagaatgaaaatgccgaaaaaggatccacacgcacgctgaccgtgcgaaacatgccttttgatgtggataacgaaatcacggaacaggcgagggcggcaggaaagtcaaaaagtgattttgtcaaagaattcctctcagcctccttcggggatctgatcggtaactttatgcgcggaaatggcctcgtggcgctgatggataaagacgtggccacaatgatgaaggcagccctcgccgattactggtatgacagcgcccagacgctcgctgaaaaccgggcctggtgccgtttactgggcatttataaagaagaagatctgcagcatattatgcgtaacggcgttcccctgcttgaactgcgcgccgcacagctacctggcatcacccatatcccgcatggcacgtcactggcgtttgccctcttcattgaggctgctcgccgcgatttaccgacgctaatcagagtgcataaagaactgttcttcctgcagaaagaaggggattttctggacatggtcgaccagatacggcaagcactgcgcctgccgcccacagaacggtctgttttctga

SEQ ID NO: 21695 - DNA, 402 bp, Escherichia coli; identical to SEQ ID NO: 11405

SEQ ID NO: 21696 - DNA, 519 bp, Escherichia coli
gtgttgatcattggtttgcctttactggcgcaatggctttttggcgcagcactacactgggatgtcccagccctacgaggctttaacttccgcggcgggatggttttaattcctgaactggcagccttaacgctggcactttcggtttatacctctgcatttatcgccgagattatccgcgctgggatccaggcagtgccttatggtcaacatgaagcggctcggtcactgggattacccaacccggttacgctacgccaggtcattattccccaggcattgcgggtgattattccaccgttaaccagccagtatctcaacatcgtcaaaaactcctctcttgccgccgctattggctatcccgatatggtttcgctgtttgccggcaccgtgctgaatcagacggggcaagccatcgagacgatagccatgaccatgtcggtctatctgattatcagcctgactatctcgctgctgatgaatatctataaccgccgcatcgcgatcgttgaacgctaa

SEQ ID NO: 21697 - DNA, 240 bp, Escherichia coli
atgcaggcgggcattgttatcggcgatgtaggtcctggctgcagtattgtaggcatctgcatgaaatgcggcgctctggttgcgcatttcattcaggtagtcttcaatgtaagaccagaacagcggcatgagcaggctgatgacaaccagtcctcccagaatttcaagaagtgcaaaacctttatcgttgtctttttgcatagtcgttccctccggtattaccaaaggccaccgggataa

SEQ ID NO: 21698 - DNA, 339 bp, Escherichia coli
atgacttgtgatcatcatgattttttcattgagctgtctaaaatcttatcggataagcatttatctaccttaaagggttttgcaattgctctttggattgaaactaacgaatatgagatagaaaaattcttatattgcttagaaaatatcaataatgaattcaggatcgaactaaaagagaaaagtgagaatgaaaattaccgatatgctgaggttgctaacggacgctttaaatttaaagtggacagcaacttcaattcttgcaagtgtggttcacatttagctacgctgatacattcgcctgatgccggtgaattaattttaaaattagcaatatga

SEQ ID NO: 21699 - DNA, 354 bp, Escherichia coli
atgctcccgaatcgaatggcgcttagccgtcagactgaagatcagcttaaaaagcttaaagggtatactgggattacacccaatattgctgcccggctagcatttttccgctcggtggagagtgagtttcgctattcacctgaacgagatagtaagaagctggatggtacgctggtgctggataaaattacgtggctgggggagacactacaagctacagaattggtgctgaagatgctttatccacaattagagcaaaaggcgttgattaaggcatgggctgctcatgttgaggatgggattgcggcattgagaaatcataaaagtttaattagcttattaaatgctatataa

SEQ ID NO: 21700 - DNA, 2001 bp, Escherichia coli
gtgctcattaaacagctggtattacataattttcgggtatttaacggtacacataccattgatctggcacccagaaagcgtccgcacgatttgaatccacgacctattgtgctgtttggtggtttaaacggcgcagggaaaacgtctatcctgtcggcgatccgcatagcgttgtatggacgactggcgtttgggctagcgactcaacagcaagagtatatcgaacaactcagtgcattgattcataacggcgcgtactatattgagcagccggaagaagcatctgtagaactgacgtttacctataataaaggcggtcatgaggccgaatttaccgttacgcgaacctggaaaaaggggaagagggaccgcctttctctgcaacaggatgggcagccactcagtgagctggattacgatcagtgccagggatttctaaatgagttaattccgcatggcattgctgatttgttctttttcgatggcgagaaaattgcagaacttgctgaggacgaatccggtaatattttacgtactgccgtacgacgcttattggggctggatctcatctctaaactgcgtaacgatttaatgatttttgttaagcgtcagcaatccagccagctagcaagttctcagcaacaacagattgcagagcttgaaaaacagagtaaagaattagcctgccagacagaagcactgctggaaagcgccgattttgccaaatcgcggattgagtttctatctaaagatataacccattatgaaggcttgctaaatgctcaggggggcgcttttgcccagactaaagcgcaggaaaaacagaaagtcgaaacgctgctaaaagataaagaacatctggaaaaagcactgagacaagaatgcgatggctcgctaccttatgcgcttgcgcccactattttgtctcatttgctgcaacaaattgctgatgaaacgcaaattaaacaggcaaaaagctttgaaaaagagctgagccagtttttaacgcaactcagaaatgatattgcatttcgttctgcggggactggcaaaatagcagctgaagcgattaccgataatctaaaagattatatggcaacgaaaccaaaaggtgatttgctctttgatatctctgagcgtgaagcaggtatgcttcaacagtctattgagatagatagtaaaagagcatggcagcgtttcgagctttatcgcacacagttatctgagattgaacaacagttagaacaagcggctgctaatattgcccgcgctcctgaagatgagcagctgatggatctctttgaaaaattacgtgacctggataggcagcgcgaagcccaattgcagaaatatcggtcattgctagaagatgctaaacgtaaaaaacagcagcaactggattgtgttcgtcagattcaaaaagcgcatgacgccgctcgttatcagcacagttatagcagtgcgtttaagaatgctcaggaaacgataaatttactcgatcgctacagcgatgtattaacccaggctcgggtaaaaacgctgtcgacaaacttcgagcttgcttaccgtaagttggctcgcaaagaggatttacaacttagtgcgcatatcaaccctcaaacgtttgatgttgaattaattgatgagaatggctcagtaattaaccgtaagttactttctgctggtgaaaaacagatttatgcaattgctattcttgaggcgctggcgaaaacctctggccgtgatttaccagtgatcattgatacaccattgggtcgtctggactctcaacatcgagataaattgattaatcactacttccctgaagccagtcatcaggttgtgttgctttctaccgatactgaagtagatgaacgttattttgttgatcagttgcgtgatgatatctctcatgcttatgagattgtgtttaatgcacatactaagtcatcaacgctgaagcctggttatttctgggaattaactaaggaggctatctga

SEQ ID NO: 21701 - DNA, 216 bp, Escherichia coli
atggcggaaaatcgtgttgaggccaacgcccataatgcgggcagttgcccggcatccaacgccattcatggccatatcaatgattttctggtgcgtaccgggttgagaagcggtgtaagtgaactgcagttgccatgttttacggcagtgagagcagagatagcgctgatgtccggcggtgcttttgccgttacgcaccaccccgtcagtagctga

SEQ ID NO: 21702 - DNA, 570 bp, Escherichia coli
atgagagaactacctaaagattattttttaggagtagatgatgagctcgtcgattatcttgaaaaacaaggggaagagacgatacgagagattcatctttctaacaaaaccaatgttgagaatggatacaaacttctgaacattcagattgttggaattggttcatcttttttattgctgacacagaaaactaatttcgattttctcaccgccggaattaccacatttacattactatggacatggtgcgccatttacttgatatgtactggtttatctgtgaaggttaggggcctgatcaatgcccctcctgatcatctatatcatgaaaaatataaggatatggagccctcgagctttaaaatattcgctgatgcaggatatttaggacctgataagttattgccgcttatacgaaggtatcgccttgttgacttgagtgatacagcaagagagttactgttggaaaatgagaaaatccgcacgagtctcgataaagcaaggatgtataccatccttgctccggtagcggcgatgtttatctcggctgtttttttatatgttcaatga

SEQ ID NO: 21703 - DNA, 162 bp, Escherichia coli
atgtctgaaaaaaacaagccacaagatgaaaataaacctcagcaacccgtggcaccaaaaccaactccaacacaaagtactacagactttgctacacgtcgtgtttttgttggagattctgccgactcagtcattgaacatataaaaaaacagccgagataa

SEQ ID NO: 21704 - DNA, 342 bp, Escherichia coli
atgaaaatgcacaatgcccctcattcctggcctgacttactggaactcttacaaagttggtggcgtggagatacgccgctgggtgcagtggttatgtcaattattatggctggtttgcgcattgcctattttggcggtggcggcggctggaaacgaaaaacgcttgagattctgctttgtggtgctctgacgctgacctttgcatccgcgcttgagtatgtcggatggcctaaatcactttctgttgccattggtggtggggtggggctgattggtgttgatgctattcgtggtgcggcaatgagggtcatcggtaacaagttcggtgcccataaggagtaa

SEQ ID NO: 21705 - DNA, 465 bp, Escherichia coli
atgagcagagtaaccgcgattatctccgctctggttatctgcatcgtcgtctgcctgtcatggggtgttaatcattaccgtgataacgccatcgcctacaaagaacagcgcgacaaaaatgccagagaactgaagctggcgaacgcggcaattactgacatgcagatgcgtcagcgtgatgttgctgcgctcgatgcaaaatacacgaaggagttagctgatgcgaaagctgaaaatgatgctctgcgtgatgatgttgccgctggtcgtcgtcggttgcacatcaaagcagtctgtcagtcagtgcgtgaagccaccaccgcctccggcgtggataatgcagcctccccccgactggcagacaccgctgaacgggattatttcaccctccgggaacgactggtaatgatgcaggcccaacttgaaggtgctcagcaatacataaccgagcagtgtttaaagtaa

SEQ ID NO: 21706 - DNA, 282 bp, Escherichia coli
atgaaacacgtatccacccgtgctgccaatgcggataataatcgcatcgtaactggccgggacatttacgaaatcgcattcacaccaccaattcacgccaacgccgtgttggggttgacggggacggttatccttactggcaatgccggcgaggttaaagccttcctttctgcggccgctaccgggcacagtggttgcatggtaacaccatcacctgtactggctcatgacacctggctgcgtatccgcctgctgatgggcgagatgatggatgcaaaataa

SEQ ID NO: 21707 - DNA, 348 bp, Escherichia coli
gtgacctttgagcagaaaaaagcccgggccattgccctgatggacagcaaaaagatgtggcggagcaattatgcccctcctcttctgcgtattctctggcggctgggtatccggcttccgccattaccctttatgccgttctggcaggtcacgctgttgatggggagcttatggggcatttcctggggatgtgcaatgtggtttatctactgggggccgtcaggaatggtggcaggtgaggccattattataagtatcacgggtggttttttgttcggactgctcatggcctctttccactggtggcgcaggaaagttaaccggcttccatcatgggatgacgtgtaa

SEQ ID NO: 21708 - DNA, 552 bp, Escherichia coli
atgaaaactaaaacattccggttccgaaaatataaaaagaaaaacgtcctgctgcaaataatagtttccagaaaacaagtgatattgttacgcaatattatgacggactctttattattttgctcggtaggttttgtgtttatgaatatgtgttattcaaaatatacgttgatttctggtgagggtggtttacgtgctgattgtgccgattatttattctttgccgtatatgcaattgcgttgctaatgataattttatggatgacagcttcagttatttattctattgaagaatatacgagtcaggaaaaatacggtaaaagtaaagtctatagctactctgttattgaaacatgtccggttatgttctccgaatggcaggtatcaataaaatcacttttccccgattgtgtgtcaaagtcaacgtgggtgaatctgtgtacatcctgccatatggtgaaacagacaggacaggtaacaggtagtttaccttcagctattttttcgcagctttcaaccagttgctgcgccttgttgtatctgacgttatag

SEQ ID NO: 21709 - DNA, 1413 bp, Escherichia coli
atgcaagaagaagaacaacttgtttattggtattcagggctctatttacaacctcagcactttcagtcaattgacttgcatcatggcttcatgcttgccagaagcaggcagttatcacaaccccatcatcaggggtactatgaatgttgtatcaatgatgatcttcttaaggaagatactgtcagagttgaaaaaataaaggctgttttatcttcagggtattatatcgagtatccgggtaactgtgtggtacaggataagtgcctgacaaatctcaaaggttcagatcacggtaccgtggatttgtggcttgcgcttaagagattcaattccggtcataaaaatgtctccagtgttaatgataaacgaggctctgccagatggataagttcagatgatgaacgtaacatgcgtaatgtttatcatgacagtcaggatgccgatattacaagaataaaatatgatattcagattcttacagatgaggaaaaagataatactacagactatgagtatttacccctgacaaggatcatatatggaaataattcattgtgtattgatgatgagtgttcatttcccgtgatgaggttatctgcgaatcacaaacttagaaataagatcgcagagatctattcggatattaagttctacaaaaatagactggagaaatacagatatacagaacgaacagtgtccgatggacatctttataactttttaattctatgtgctattaataggacattaccacttctttcttcattcattaatgaagatgccattcacccatggttgtattatatggcattatgtcagtttgcaggggaaatatctacatttcataactctggactttcagatactaggattgtcgaactatcatacaatcattatgagcagatctcatgtttcagtgatctgcagtattatattaagttaatactggatgattcatgtcgagataagattattagtgttgaattcagaaaaataactactgatacattgatctgtaatttcgatgagtacggtgccggaagtaattcagattactatattaagttaacctcagataccttcagaaagaataagctgattgcattgccagagattaagattgctccatctgaacatatcgacatgataattcagcatgctcttccaggaatcaagtttacagtgatggatgccgttacatctgatttgcaggtaagagagaatacaatctggttaaagatagataaacattcagaattatggacgttagctcagactcaaaaaagagttgcattctattggtcatgtagtcctgatgatttacttgtagagttagtattatcgcaggaaaagtatgccgtaagcaggcctaaacaggataacggttctttccatccggcggttggcagataa

SEQ ID NO: 21710 - DNA, 282 bp, Escherichia coli
atgaaagatctaacactcaaatttgccgacagggccgacttttcggcctttatgggaagtattggctattataatgacgagtcgatgcaggatgatattctgattgatgtgataggtaacgtgtacaaagaaaccggagagctgactgaagatggcgaaccggtatgtgttaaggaagatggatattttgtaaacgtgcgcatcattaaggatacgcaaatatcgtcattattcgatgaatacgcggttgctgttgagcatcaacttcgtggctggatgtga

SEQ ID NO: 21711 - DNA, 2406 bp, Escherichia coli
atggcagcagtaaaaatctcaggtgtgctgaaagatggtgcgggaaaaccaatacagaactgcactattcaactgaaggcaaagcgtaacagcaccacggtactggtgaacacggtggcttctgaaaatccggatgaagccggacgttacagcatggatgttgagtatggccagtacagcgtcaccctgctggttgaaggttttccgccttcacatgccgggaccattaccgtctatgaaggctccagaccaggtacgctgaatgattttctcggtgccatgacggaagatgatgtcatgccggaggcattgcgtcgttttgaggcaatggtggaagaagtggcacgcaacgccgaagccgcctctcagagcgcagcggcggcaaagaaatccgaaactgcagcggcatcatcaaagaacgcggcgaaaacctcagaaacgaatgcagctaatagtgcacaggcggcagcgacctcaaagactgcatcggcaaactccgcgacagcagccaaaaaatcagaaaccaacgcgaaaaatagcgagacagccgcaaagacgagcgaaaccaacgcaaagtccagccagacggcagcgaaaaccagcgaaacgaatgccaaagccagtgaaactgcggcaaaaaacagccaggttgcagcagcccaaagcgagagcgcggcagccggttctgcgacttcagcagctggatcagcaactgctgcggctaacagccagaaagctgcgaagacgagtgaaactaacgcaaagtccagccagacggcagcgaagaccagcgaaacgaatgccaaagccagtgaaactgcggcgaaaagcagtcaggatgcagcggcccaaagcgagagtgccgcagccagttctgcaagcgcggcggctgcttctgccactgcatcagctaacagtcaaaaagcagcaaaaaccagtgaaaccaacgcaaaggcgagcgagactgcggcggcgaactcggcgcaagcatcggcagcaagccagacagcagctaaagcaagtgaagacgcagccagagagtatgcaagccaggcagcggagccgtataaacaagttttgcagccgttgcccgatgtgtggataccgtttaatgattcactggatatgattacgggcttttcgccatcatataaaaaaattgttattggcgacgatgaaataacaatgcctggcgacaagattgtaaagtttaaacgcgcatcgaaagcaacttacattaataaatctggtgtgctgacagaggctgccattgacgagccacgatttgaacgtgatggcctgcttattgaggggcaaagaactaacctgctaatcaattcaacaaatccgactaaatggaacaagtcgtcaaatatgatcttaagtgcatcaggtgtagatgatttcggattccagtacgcaaaatttacattaaaaccagaaatggtagggcaaatttcagcgattaacatagtaaccgtttccggcagtaaaggttttgatgtaacaggcggagaaaagtatgtaaccatatcatgcagggtgcaaagtggcactccaaatttaagatgccgattacgatttgaaaactatgatggttctacctacacattcttaggtgacgcttacttaaatacgacagatttatctattgataagacgggtggtgccgctaatcgcattactgcaagggctgttaaagatgaagcaagcaaatggatcttttttgaggcgacaattaaggcacttgatacagaaaatatgataggtggaatggttcagtatgccccggcaaaaggagtgggcactggcgcggatgattatatttatattgcgacccctcaagttgaaggtggggcgtgcgcttcatcgtttattataacaggcgcatcccctgtaacacgcgccagcgatattgtaacggtccccatttctctaaattggtgcaatcccgctattagttcattagaagaagttaataccaattgggatgaatcgccaaacaaagaaggtagcgcacgtattcttaatatttccactacgggagatacaactgaaattgcagatgaaagttatatgtatttggggtatacatctttgggagcacgcgcaatcattacaaatggtaaaggcactaaaatagaatataaaagcgttatagaacgaccagagagaaaaagcattatcggctttagattcacagaaagtcgagaattgtgtgttgtggttaacggtaatattggtgctaaggtagtttctccttataaaaaacacaaatatacaggaggcttcattaatattggtggtcaatcatcatccggcaaccgtcacctatttggacacgttcgaaatctgcgtatttggcacaaggcattgactgatgctcagatgggggagtcaatctaa

SEQ ID NO: 21712 - DNA, 273 bp, Escherichia coli
atggacaataacaccatttctcttcaggagttgctcgactgcatttccaggcttcgggatgatgttaatgcccttactgtcgcattttcatatctggcattgtcaattcccagggaacaaatgcaaccaacactggcatcgctccagcttgaatcacacagccccaaatggtcccaggaacaacaaaattccttcaagtggctggtggcattactggaagagaaatatgctgttaaaattaacattccggcggagtcttcagataaccagtaa

SEQ ID NO: 21713 - DNA, 216 bp, Escherichia coli; identical to SEQ ID NO: 5123

SEQ ID NO: 21714 - DNA, 822 bp, Escherichia coli
atgggttgcatgaaggaatatatgcaggatctggaagctgaacggtttgatgaatggcttgaggagaattacccggatgttaatcccaactctgaagaatgggagcaggccgcgaacctgtactgctgggagcaggaagcgctggccgatcaggctcagtgggaacatgaacacgggctctttgtggcttccctgaacaatgttcatctgcgttacatacacgcaaaggaggagctgaagaagctgtataccctactcgataaggagcagcctgaactggtgtacaggatgtctttcgtccatgccgtgactgtaatggaggcgtacctgatgtactgcgccagggctctgcttgagcatgactggccccttaaacgtttccttaatgagtactatctgaaatccgcacctaaggtcactaataaagataaaaccgccgcccgcacaatggatgttgaactgttcaggcctgcagcccgaaattatgtttcccgaatgacatttcataacgttaaaaccattgagcgctatttcggggccgtgctgcacatccctcccgtctggccaactgagccactgggcatcatctcagactggcgaaatgatcttgtacaccgcaacggcgtggatgaacatgatgtgccacgggggatatcagcacagcagctgcagaataccctgcagaaagtatcggacctgatagaggctgctgacatatccctgcgtcaggaagttgactatttcggtaactggcgtaatgaggaaaaccgggcaatcatcgcatcagcactgaatatatcgccagtcggagagtcacactga

SEQ ID NO: 21715 - DNA, 1212 bp, Escherichia coli
  misc_feature (1147)..(1156): n is a, c, g, or t
atggcatcaatatgccatgcgcttgatgattcattaagtgacaaggaaaaaaatgatatactgcagtttcctgatagattgaaaggtctaaagtattcacttgacatatttatttccacattctgtattgagaacgtttttttctctcagacggaaattgccgggatctgtttatctggtgaactcatgggggagaaggacaaaaactgtatttttgctgatatccttatttccgagatactgccacaaatacatgattcagacgttattcatgttaacaaacaaagagtgaatgtatcgtttaaatcagttatagtcatgactgcattgtgttttgttggatatagcggatattgttcatataatgtgtataacatcagacatggttctgttgataccagccatgcatttctgacagagcagatatcaaaatatgaagacaaagttaggtctaacatgcggtatttcccttttaagcctgcactagatgataaatatctatttttcagagaatctcttcataaaacaacaagattcgatatcagtcctgtctcatggcgcgttactgaatataagaagaatttcatgcaagcttcaccatcaggaaagcgagaactaattctgtcgctctcatcatcacttatcagttgggataagatgatgaaagatgaatccctgagtgacttagcaaaatctcctggtattcatgagttactgaagataaccagacctcatgataaaatatcatcaatagcttcacttgctgtagaaagagatgagatacagaaaaataatggaattgagaatatttatgtgttcagaaacctcctgactgagttggttcagagtgacccgtcttattcatggtttgtttctgaagatgttaatattcctgctgtaagaattacggacttttgggaagatgaaaactcttctgtctatctttccggaatatggacacaaccgggacagaataaacttcatcagtggtatgagactatcaaagaggcatatggacgtgatacggttccggaggcgttctcatcctttgtgctatacctggatgaaagtcgtcaggagcatttcagacagtttattatgtctgttgcaagggcacgtaaagactcacatgcaggtttaatgaatnnnnnnnnnntcaggtttaatgaatccgctgcaactgaccaatattatacacaatcgctcatctga

SEQ ID NO: 21716 - DNA, 924 bp, Escherichia coli
gtggcaaagcaaaagttcaaaatcaccaactggcccacctacaataaagccctcatcaaccgtggctccataactttctggctggatgatgaagctattcaggcctggtatgagtcagcaacaccttcttcacgaggcagacctcagcgctattctgaccttgccatcacgactgtgctggtcattaaacgcgtattcaggctgaccctgcgcgctgcgcagggctttattgattccattttttctctgatgaacgttccgctacgctgcccggattacagctgtgtcagcaggcgggcaaagtcggttaatatcagtttcaaaacgcccacccggggtgaaatcgcacacctggtaattgattccaccgggctgaaggtcttcggtgaaggcgagtggaaagtcaaaaagcatggccaggaacgccgtcgtatatggcgtaagctgcatctggcagttgacagtaaaacacatgaaatcatctgcgctgacctgtcgctgaacaacgttacggactcagaggccttccccgggttaatccggcaaacccaccggaaaatcaggtcagccgccgccgatggagcttacgatacccggctctgtcacgatgaactgcggcgtaagaaaatcagcgcgcttatcccgccccgaaaaggtgcgggttactggcccggtgaatatgcagaccgtaaccgtgcagtggctaatcagcgaatgaccgggagtaatgcgcggtggaaatggacaacagattacaaccgtcgctcgatagcggaaacggcgatgtaccgggtaaaacagctgttcgggggttcactgacgctgcgtgactacgatggtcaggttgcggaggctatggccctggtacgagcgctgaacaaaatgacgaaagcaggtatgcctgaaagcgtgcgtattgcctga

SEQ ID NO: 21717 - DNA, 504 bp, Escherichia coli
atgccgggcaactgcccgcattatgggcgttggcctcaacacgattttacgtcacttaaaaaactcaggccgcagtcggtaacctcgcgcatacagccgggcagtgacgtcatcgtctgcgcggaaatggacgaacagtggggctatgtcggggctaaatcgcgccagcgctggctgttttacgcgtatgacaggctccggaagacggttgttgcgcacgtattcggtgaacgcactatggcgacgctggggcgtcttatgagcctgctgtcaccctttgacgtggtgatatggatgacggatggctggccgctgtatgaatcccgcctgaagggaaagctgcacgtaatcagcaagcgatatacgcagcgaattgagcggcataacctgaatctgaggcagcacctggcacggctgggacggaagtcgctgtcgttctcaaaatcggtggagctgcatgacaaagtcatcgggcattatctgaacataaaacactatcaataa

SEQ ID NO: 21718 - DNA, 1359 bp, Escherichia coli
atggaaaaagactatttgagaattagtagtactgtattagtgagcttattgtttgggcttgctttggttttggtgaatagttggtttaatcagccaggcgttgaggaagttgttccacgatcaacctatctgatggtaatgattgctttattttttatcgatactgttgcatttatttttatgcagttgtatttcatttatgaccgtaggcaattttcaaactgtgtacttagtttggcttttctgagttgtttgatttactttgttaaaaccgtcattatcattcagcaaattattgaggagcgtttgacaagcagtgttgtccaaaatgacattgcaatctattatttgtttcgtcagatgagtttgtgcatattaatatttctggcattggtgaataaagttagtgaaaacacaaaacagcgcaatttattttccaaaaaaatgactttgtgcataagtttgttttttgtttttggggggccgatagttgctcacatactttctagtcattatgagagctacaatttacacattgccgagttaaccaatgaaaatggtcaggtggtttggaaagcctcatatgttaccataatgattttcatgtggttaaccttgctttcggttaatctatactttaatggtttacgctatgatatctggaatggagtgacggtgattgctttttgtgccgtactgtacaatatctctctgttatttatgagcaggtatagcgtgtccacttggtatattagtcgcgctattgaagtagtcagtaagttaaccgttatggtaatatttatgtgccatatattcagtgcgctacgagtaacaaagaacattgcacatcgcgatcccttaaccaatatatttaacagaaattatttttttaatgaactgacagttcaatcagcatcagcccaaaaaacgccttattgcgtcatgattatggatatcgaccacttcaaaaaagtcaacgacacctgggggcatccggttggcgatcaggtgataaaaacagtggtgaatatcattgggaaaagcatacgaccagatgaccttttagcgcgcgtcggcggcgaagagtttggcgtcttgctgacggacatcgatactgaacgtgcgaaagctttagcggaaaggattcgggaaaatgttgagcgtttaactggcgataatcctgaatacgctataccacaaaaagtgacgattagtattggcgctgttgtgactcaggaaaatgcgttaaacccaaatgagatctatcgactggctgataacgcactttacgaggcgaaagagaccgggcgtaataaggtggttgtgagggatgtggtgaatttttgtgagtcaccataa

SEQ ID NO: 21719 - DNA, 840 bp, Escherichia coli
atggtttatcaaatgcctcagctatttccaacagccgattctgataacttggttatttatattaacggtagtggcaatggtgggaaaccgttctctgcattaatagttaatgcaattccagatttgaatatgcagcactcaggtgggcaggggtttcctttatattattatgagaaatcttcgagtgatgaagtagttaaagaatacaaaaggaaagaagcaatttctgacgcaggattgttttatttcaaagacttttactcaactgaaagcataagcaaagaagatgttttcaattatgtatacggattgcttcattctgaagattatcgtggacgttatgctgataacctttctaaggagttaccgcgtataccttgtgtcaaaaaatatgacgacttcgtgattttttctcaagctggacgagatttagccttttggcatttgaattttgaagaagtcgagccatacaaagcaactattgattctggcaacttaaattattctcaattaccgaaagaggatttttatgtagagaagatgaagtttgctaaaaaggctgacaaaagtacagtcatctataaaaacaaaatacggataaaaaatatcccatctgaagcctatgattacgtagtaaatggtaaacctgcacttgaatgggtaatggaacgacagggtgttttaacccataaagatagcggtattgttaatgatgccaatgactgggctatggaagctatgggaaatgcgaaatacccattggaactatttctaagagttatcactgtaagcctggaaactcagaagatagtaaaaggattacctaaactcgatatataa

SEQ ID NO: 21720 - DNA, 837 bp, Escherichia coli
ttggcagcatcaccgtcagcaacgaataagaatgccctgtatgattcttatattcgagctattcggtgggcaagtgatcgtataggcgagaaaggtgtaatcggatttgttacaaatggatcgtatattgattccaactctgcagatggtttacgtaaatgtcttacagaagaattcagcagcttatattttttccatctgaggggaaatcaaagaacctctggtgaaaaatcacgtcaagaaggtgggaaaatatttgggagtggaagtcgagctccaattgtaatttcaatcttggtcaagaatcctaatgttcaggctcatggtcagatatattttcatgacattggtgattacttaagtcgtgaagagaaattggagaaagtttctgaatttaatagtgttaatggcattactaaaattaatggttggcagttgatcgaacccgataagcataatgactggctgaaccagcgtgacgagatatttaattattttatcgagatgggaaataaaaaagataaagactcagtttgcatatttagcacctattctaggggggttgctaccagtcgtgatgcatgggtttataacttctcagcaaaaaaattaattgaaaatgtgtcagaaatgattgtgtattataactttcaagttaatgagaagaagaaagatccggagtttaaagaaataattgataccacgataattagctggaaccgcagtttgctcaatgactttaataaattaaagaatcattcctttgacaaaaattgtatttataaatcggtttatagaccgtttaacaaatcaaatctatatttagcagggcgttaa

SEQ ID NO: 21721 - DNA, 300 bp, Escherichia coli
ttgctgtccgcacaaggggcaacgctgttaagaacagcaatgctggattattataaccaggacactacgggaacctcggggatagtcggcatgggattcaacaatgaagattccattacagaccttcgtgagggcagctttaaaatgccggacgggacaacattcagcgatcctgtcatagcaatgtcagacaatggtatgcaggctactattctgacctctatcagaagcgggtatgcgaagggtatcactgtcagaccccgtagcattgcacttaattacattgtgagggcagtttaa

SEQ ID NO: 21722 - DNA, 462 bp, Escherichia coli
atgctccacacactcactgaccagatacatttccaccgccgaaaaacgtgctccccggttcaggatggcatcgagcaccacgggcaggttttcgtcgtcttcatcgagccagcaggggtgatcgctttccttcacaaccaggcgaaagcggcgcgtctggcgggtcagcaacgtctgaccggttgtggtcagcgccgccctgatacgctgcgcatcttctgccacccggcaactgacactgcgtaccgcatcgcgcactgcatcaagaactgccctgatttcgtcttcggtcagccattctccggcatacgggaaaaacacctgtgttccgtctgccggaagtaccggcagcgactgccactgactgccagacagtaccagttccgccccggttccggtcagtttctgaatggcggaggccaggagcggcggcagtacgccgccgtgacggttgataagtaa

SEQ ID NO: 21723 - DNA, 606 bp, Escherichia coli
ttgactaatgaagatctattagaaaaactaaaacaaaaattagaatctaatggaaaactatcaggctttatcattgatgaagatgatacaggcccttcatcttctgtttatagaacccgatttggtggtcttttaagagcatatactttgattggttataagccagaacatgattacagctatctcaaaataaatgaagcactaagatcattttactcagagataattgaggattttaagggtgaaattttaaaaagcaactgtcatatagacgagtataaatatgccccaatgctttacatcaatgatgagtttttaatttccgtccttgttactaaatgcatacatatgaaatcaggtaaacttagatggaaagtccggtttgataactcacagaaagcagacataacaattgttatacgaatgaattcacaaaatatttcacctcttgatttttatatcataccaaacattgaaaacgaatataataaaatgtgcatgacggaaacaaacaacattcgattagatctctatagatttgataatcttgataaacttctacaaattattactcgcatgaaagtgagggaactatatgctgcctga

SEQ ID NO: 21724 - DNA, 240 bp, Escherichia coli; identical to SEQ ID NO: 14012

SEQ ID NO: 21725 - DNA, 297 bp, Escherichia coli
atgaacggccagtcgttttcctgttcccggtatcctcagcttgcccgtgcttatcctagctgtaaattgcccgatctgcgcggtgtttttatccgtggctgggataacgggaagggacttgatggtgatcggaacagacaactcctgagttatcaggccgatcaatcaggcgtctatcacgaacgtggcggatggctgaaagggcatcatagtggtatgccatactgggcacaggggagtaccacagaaatgcgtcccaaaaatattgcattcaactacattgttaaagccagctag

SEQ ID NO: 21726 - DNA, 240 bp, Escherichia coli; identical to SEQ ID NO: 14012

SEQ ID NO: 21727 - DNA, 297 bp, Escherichia coli; identical to SEQ ID NO: 21725

SEQ ID NO: 21728 - DNA, 240 bp, Escherichia coli; identical to SEQ ID NO: 14012

SEQ ID NO: 21729 - DNA, 297 bp, Escherichia coli; identical to SEQ ID NO: 21725

SEQ ID NO: 21730 - DNA, 297 bp, Escherichia coli; identical to SEQ ID NO: 21725

SEQ ID NO: 21731 - DNA, 240 bp, Escherichia coli; identical to SEQ ID NO: 14012

SEQ ID NO: 21732 - DNA, 252 bp, Escherichia coli
atgaccggctgggaactgcgaatctggcgaaaaagcatgctctggtcacgcgaaaaagcggccagagaatttggcgtgacgcagagaacatggcacgcctgggaaaatgcggaacaggtggacgtcaccgtctggaggaccacccaggcactttcagtccgtgacctgctgcctcacatgcaggggatgcgtaaggcagatatcatcaggcgactggaaaatgaactgggggaaacggcagaggatgtgtga

SEQ ID NO: 21733 - DNA, 135 bp, Escherichia coli; identical to SEQ ID NO: 10665

SEQ ID NO: 21734 - DNA, 135 bp, Escherichia coli; identical to SEQ ID NO: 10665

SEQ ID NO: 21735 - DNA, 252 bp, Escherichia coli
atgaccggctgggaactgcgaatctggcgaaaaagcatgctctggtcacgcgaaaaagcggccagagaatttggcgtgacgcagagaacatggcacgcctgggaaaatgcggagcaggtggatgtcaccgtctggaggaccacccaggcactttcagtccgtgacctgctgcctcacatgcaggggatgcacaaggcagatatcatcaggcgactggaaaatgaactgggggaaacggcagaggatgtgtga

SEQ ID NO: 21736 - DNA, 2280 bp, Escherichia coli
atgagcgagccgttaattgtcggcatccggcatcatagcccggcctgcgcccggctggtgaaatcgttaatcgaaagccagcggccacgatacgtattgattgaaggcccggctgattttaatgaccgggtagacgaactgtttttagcccaccagcttccggtagctatttacagttattgccagtatcaggacggtgcggcccccgggcgtggtgcctggacgccatttgctgaattttcgccggagtggcaggcgctacaagccgcacgtcgtattcaggcacaaacttacttcatcgatttgccttgctgggcgcagagtgaagaagaggacgattcgcctgatacacaagatgaaagccagaccttactgctgcgtgccacccgcatggataacagcgataccctgtgggatcacttattcgaagatgaaagccagcaaactgcattaccctctacgctggcgcactattttgcccaactgcggggcgattcccccggagatgctctcaatcgtcagcgcgaagcctttatggctcgctggattacatgggcgatgcagcaaaacaatggcgacgtgttagtcgtctgcggcggctggcacgctcctgcactggcaaaaatgtggcgcaaatgcccgcaggaaatgaacaagccagaattgtcctcgctggcagatggcgttacaggttgttatctcacaccctacagtgaaaagcgccttgatgtgctggcaggatacctttccggaatgcctgccccggtctggcaaaactggtgctggcagtgtggcttacagcaggcaggtgaacaactgctgaaaacggttcttacccgtttgcgccagcacaaattgcccgcttctaccgctgatatggctgctgctcatctgcatgcgatggcactggcacagttgcgcggccatacactacctctacgcactgactggctggatgccatagctggctcgctgattaaagaagccctgaatgcgccgttgccgtggagctatcgcggagttattcatcccgataccgatccgattttgctaacggtgatagacacattagcgggtgacggattcggtaaactttccccttctacgccacaaccgcctctgccaaaagatgtcacctgcgaactggaacgtaccggaatctctcttccggcggagcttaccttaaatcgctttacccccgatggactggcgcaaagtcaggtgttacatcggttggcaatactggagatcccaggggttgtgcgccagcagggaagtacgctgacacttgcaggcaacggtgaagaatgctggaaattaacccgcccgcttagccagcatgcggcattgattgaggccgcctgctttggtgccacactccaggaagccgcacgccataaattagaagccgatatgctggacgcgggtggaatcggctgtatcaccacatgtcttagccaggcagcgttagcgggtctggcgtctttcagtcagcaattactggaacaactcacattattaattgcccaggaaaatcaattcgccgaaatgggccaggcgctggaagtgctatatgccttatggcggctggatgaaattagcggtatgcaaggcgcgcagatattacaaacgacattatgcgcggccatcgatcgcacgctgtggctatgtgaatccaacggcagaccggatgaaaaggagtttcacgctcacctgcatagctggcaggcgctttgccatatcctgcgcgatctacatagcggcgttaatttacccggcgtttcgctttctgcggcggtagccttactggagcgccgcagtcaggcgattcatgccccggcgctggatcgcggcgcgactcttggcgcactgatgcgtctggaacatcccaacgccagtgccgaagcggcgctgacgatgctggcgcagttatccccggcacaatccggcgaggcgctgcacggtttgctggcattagcccgtcatcaactggcctgtcagccggtatttatcgccggtttcagcagtcatttaaatcaactgagtgatgccgattttatcaatgccctgcccgatttacgcgcggcgatggcctggctaccaccacgagaacgcgggacgctggcgcatcaggtgcttgagcattaccagctcacacagcttcccgtttcagcgctgcaaatgctgttgcattgtccaccacaagccattgcacatcatcaacaactcgaacagcaggcactggcatcgctgcaacactggggagttttccatgtctga

SEQ ID NO: 21737 - DNA, 1851 bp, Escherichia coli
atgaaacgtattttacctctgatactggctctggttaccggtatggcacaggctgacagcaacagtgattaccgggccggttctgattttgctcaccagatcaaagggcagggaagcagcagtattcagggctttaagccacaggagagtatccccggctataacgcgaatccggacgagacaaaatattacggtggcgtgactgccggcggggatggcggcctgaaaaatgacggcaccacggaatgggcgaccggtgaaaccggaaaaactatcacagagtcattcatgaacaagccgaaagacattctttcaccggatgcgccgtttatccagaccggcagggatgtggtgaaccgggctgacagcattgtgggaaacaccgggcagcagtgcagtgcgcagcagataaaccgcagtgagttcacaaactatacctgtgagcgggacacgatggtggaggaatactgctcccggactgccagtatcaccggagactggaagtacacggatgaatatcgtgaggtgacgataccgcactcacagttccggttcagtatgaacggtctgaaactggtgttcagcgttaccgtacctgttgccgggacagtggaaagtgcctcgctatcggttcatgcagggctatatttccttaactcccgttacgactttatgaacacaacctttaatgtgcaactggttacaggacagagcgggactttcaccatacctgtgccctccgggttttctgtcacacaggggcaggttctgaccggtagtggctgtactgcaaacggtaattgcctcccgcacgggaatggtgacaggaaagtctatgaatcgcttgtcagtggtgcttccacctttacgctgaaactcaggatgaaggtccgtgataaagaatgggttccccgggtggagtgggtggagagttgtccgtttaataaagcggatggcgtgctgaaaggcactgagtgttcagagccgggtggtacgaaaacgggtgtgatggaaggtaaaccctggagcatcacacaggcatgctgggcataccgggataaatatgtcactcagtccgcagataacggcacctgtcagaaatatgtcgataatccggcctgtacgctggcctcacgtcagtgcgcgttttattccgatgagggaacctgtctgcatgagtacgccacgtactcctgcgagtcaaaaacatcaggaaaagtgatggtctgtggtggtgatgtcttctgccttgacggtgaatgcgataaggcacagagcggaaaaagcagtgattttggtgaagcagtatcacagctggctgcgcttgccgccgcaggtaaggatgttgccgccctgaatggtgtggatgtcagggctttcacgggtgaggcgaaattctgccgtaaggccgcagccggcttcagtaactgctgtaaggatggcggctggggtcaggatgtggggctggcgaagtgcaacagtgaagaaaaggcgctgggaaaggcaaaggacaataaactgacggtgagtgtgggtgagttctgttcgaaaaaggtgctgggggtctgcctgcagaaaaagcgcagctactgccagtttgattcgaagctggcgcagatagtccagcagcaggggcgtaacgggcagttgcgtatcgggtttggcagtgcgaagcatcctgactgtcgggggattacggttgatgagctgcagaaaattcagttcgacagactggatttcactaacttctacgaagacctgatgaataaccagaaaatcccggacagtggcgttctgacgcagaaagtgaaagagcagattgctgaccagctgaaacaggcaggacagtaa

SEQ ID NO: 21738 - DNA, 1539 bp, Escherichia coli
atgcaacaacctgtagttcgcgttggcgaatggcttgttactccgtccataaaccaaattagccgcaatgggcgtcaacttacccttgagccgagattaatcgatcttctggttttctttgctcaacacagtggcgaagtacttagcagagatgaacttatcgataatgtctggaagagaagtattgtcaccaatcacgttgtgacgcagagtatctcagaactacgtaagtcattaaaagataatgatgaagatagtcctgtctatatcgctactgtaccaaagcgcggctataaattaatggtgccggttatctggtacagcgaagaagagggagaggaaataatgctatcttcgcctccccctataccagaggcggttcctgccacagattctccctcccacagtcttaacattcaaaacaccacaacgccacctgaacaatccccagttaaaagcaaacgattcactaccttttgggtatggttttttttcctgttgtcgttaggtatctgtgtcgcactggtagcgttttcaattcttgaaacacgtcttcctatgagtaaatcgcgcattttgctcaatccacgcgatattgacattaatatggttaataagagttgtaacagctggagttctccgtatcagctctcttacgcgataggcgtgggtgatttggtggcgacatcacttaacaccttctccacctttatggtgcatgacaaaatcaactacaacattgatgaaccgagcagttccggtaaaacattatctattgcgtttgttaatcagcgccaataccgtgctcaacaatgctttatgtcggtaaaattggtagacaatgcagatggttcaaccatgctggataaacgttatgtcatcactaacggtaatcagctggcgattcaaaatgatttgctccagagtttatcaaaagcgttaaaccaaccgtggccacaacgaatgcaggagatgctccagcaaattttgccgcatcgtggtgcgttattaactaatttttatcaggcacatgattatttactgcatggtgatgataaatcattggatcgtgccagtgaattattaggtgagattgttcaatcatccccagaatttacctacgcgagagcagaaaaagcattagttgatatcgtgcgccattctcaacatcctttagacgaaaaacaattagcagcactgaacacagaaatagataacattgttacactgccggaattgaacaacctgtccattatatatcaaataaaagcggtcagtgccctggtaaaaggtaaaacagatgagtcttatcaggcgataaataccggcattgatcttgaaatgtcctggctaaattatgtgttgcttggcaaggtttatgaaatgaaggggatgaaccgggaagcagctgatgcatatctcaccgcctttaatttacgcccaggggcaaacaccctttactggattgaaaatggtatattccagacttctgttccttatgttgtaccttatctcgacaaatttctcgcttcagaataa

SEQ ID NO: 21739 - DNA, 372 bp, Escherichia coli
atgagttctgccaagaagatcgggctatttgcctgtaccggtgttgttgccggtaatatgatggggagcggtattgcattattacctgcgaacctagcaagtatcggtggtattgctatctggggttggattatctctattattggtgcaatgtcgctggcatatgtatatgcccgactggcaacaaaaaacccgcaacaaggtggcccaattgcgtatgccggagaaatttcccctgcatttggttttcagacaggtgttctttattaccatgctaactggattggtaacctggcaattggtattaccgctgtatcttatctttccaccttcttcccagtattaggtgatgctgccaacttactgatttag

SEQ ID NO: 21740 - DNA, 549 bp, Escherichia coli
gtgcaaataaccgaagccttaatttcagagccgggagacatccggcgttttgttcagcaggcggtggaccactggccaaatctgttggcatttcacttcacactctattcggcagaaggaaacatcaacgggcaacagattcatgcattctgtacttccttttaccgacaggtgcacgaacgtattactgagcgtaatcacacggccagtccatcctcgccggtggtattacgctggttgcgggaacaatatggaggagcaacaattcgatgcctgttgctgctcagccagacgagtatttgtcacccgcgagccagtgtcacagttgatgaacaatgttcgcaagtggtggatttactgcaacagagctggcaggtgataagtgctggtggacaatgccgggtggaaaggtgttttcgggttgcccggggtgatacatccggccagtatgttgcgttaaaaacagtcgcattgtctctggggttaccggttgtgaccgccattacccatcgtccggtacagcgctgtacactgattacagctcagtga

SEQ ID NO: 21741 - DNA, 624 bp, Escherichia coli
atgcgtacacgaattgattatctggcggataaatactgttttacagaacggaacgaatcgccccgtcttcgcctgcagtggcaggatgttctggaggagtgccggcagacagaggccgggccagaagaacggttgcgtattgcactgctgaatgtggattacgtcaccagttttgaactgccttttcgcttgctgcttacccggacaccgcaattgattgccgcgctgcgtgaagaatggggcatcagccagaaaaatgtggtgtttaacgataaacggtttggctgcgtgtacagcctgaaggccagcctttctggtgtgccggatacattccggtatcatctgtctcaccgtattcgtcgcgtggttgggaatgaaaacacatcatcgccatatcagcaggttgcccggaaagtgaaagcgccccgtgaacggctgaagtatgcactggaggcgggtttactggtgactgcactggacgacctgttctggtttggcagtcagcgtattgcggctgatgttctgaggcggagaaaggccggaatgccggtggtgaccacgaccgtggaggtgcacgataacctgacaggaacaacccgcaaagtaccggcataccatctctga

SEQ ID NO: 21742 - DNA, 1215 bp, Escherichia coli; identical to SEQ ID NO: 5959

SEQ ID NO: 21743 - DNA, 1092 bp, Escherichia coli
gtgaccattcagaactacaagcgcaacgtgctacgcaccccggcgaacaacaaaatccgcctcgatgacgagcgcggcaaagagcatatcaaggtcagtaccgagtacggcggcaagagccagctcaacctcggccatctggtggatgccggaaaacagcagcgcggggaaggctttgaactgcgtaccgatctgtggggtacagtacgggcaaagaaaggcatctttatcagctccgacgcgcaggacaaggcgcagggtaaggtgcgcgaaatggctccggcgatggcaatactggatggcgcacagtcacagatgaagtcgctgtccactgatgcgcagacggcgaatgccgatccggcagatctgtcatcacagatagcgctgttgcagcagagtgtaaaagatctgacgcaggctgcgatcctgctaagcgcacccaaaggcgtggcgatcgccagcggagagcacctgcaactggcggcgtcgaaaaacctgatcgcgaacgcaggaaatcacgctgatatcggtgtcgtgaagaatatgtttatcggcgtgggtcaggcgctgagcgtgtttgtacgcaaagcgggtatcaaactgtttgccaataaaggggcgatctcggtacaggcacagaacgatctgatggaactgttggcgcagaaatcgatagagatcaccagtacggaagatgagattaaaatcaccgcgaagaagaaaatcacccttaacggcggtggcagctacatccggctggatgcctgtgggatagaggccggtacgccgggagaatataacgttaaggcgggatattacgggcgtaagccgaaggcgaagctgacgccggagctgatggcatttccggtgattaagtctgaggattttaatcagagctttattttgctggatgaaaatactgggcaaccacttattaattggccctatgaactagaactggaaagtgggctaaaaatgagtgggattactgatgaaaatggaaatacagaactaatatcctctgataaggaggaggtcgttaatattagtgtgtttgaacccgatgagtttttagacgatgaaattaattaa

SEQ ID NO: 21744 - DNA, 456 bp, Escherichia coli
atgacgcgtgaatcaacgatggctttgactgccagttcaatatcggcatcgtccattacgatagccggtgctttaccccccaattccaggcacactttggtgatgtttttcgccgcagtcgccataatcttttcacctgcagagacgctgcctgtcatactgaccattgcaacctttgggttacccgccagttcttgcccaacgttttcaccacgcccgagtacaaggttaaacacgccgcgcggaaggcctatttcatcaacgattttggcgaatgcaatcgcattgtttggcgtaaattcactgggtttaatgacgatggtattaccggtcaaaagagcgggagccattttgcgggcaatgaggaagaacggaaagttccacggcagaatgccggtagtcacgccaagcgcacgtttaaacagaaggatattttctcctggacgatcgctttga

SEQ ID NO: 21745 - DNA, 210 bp, Escherichia coli
ttgcgtcagaaagtacccggtttacgtaacgttgctttaacggcaccgtacttccatcgcggtgacgtgccgacgctggacggggcagtgaaactgatgctgcgctatcaggtaggcaaagagctgccgcaggaggatgtggatgatatcgtagctttcctgcacagtctgaacggggtttacatgccgtatatgcaggataaacaataa

SEQ ID NO: 21746 - DNA, 489 bp, Escherichia coli
atgccgggcattggcggtcttgaggcgacgcgtaaaatcgcgcgttccacagctgatgtcaaaatcatcatgcttaccgtccatacagaaaaccctttaccagcgaaagtcatgcaggccggagctgcgggctacctcagcaaaggcgcggctccgcaggaagtcgtgagtgcgattcgttctgtctattcagggcagcgttacattgcttctgatatcgctcaacaaatggcgttaagccagatcgaaccagaaaaaacagaaagcccatttgccagtttgtctgaacgtgaattgcagattatgctgatgatcaccaagggccagaaggtcaatgagatctcagaacagctcaatctcagtccgaaaacggtgaacagctaccgctatcgtatgttcagtaaactaaacattcatggcgatgttgagctgactcacctggcaattcgccatggtctgtgtaatgcggagacattatcaagtcagtga

SEQ ID NO: 21747 - DNA, 699 bp, Escherichia coli; identical to SEQ ID NO: 6085

SEQ ID NO: 21748 - DNA, 645 bp, Escherichia coli; identical to SEQ ID NO: 8435

SEQ ID NO: 21749 - DNA, 651 bp, Escherichia coli
gtggctaaagtcctttatctggatgcagatatcatttgtcaggggactattgagccactaattaaattctcatttcctgacgataaagtcgcaatggttgttacagaagggcaagctgactggtgggaaaaacgcgcccattcgttaggtgttgcgggaatttctaaaggttactttaactccggttttttattgattaatactgccaaatgggcagctcagcaggtttctgcacgagccattgcaatgctaaatgagccagaagtaatcaaaaaaataacacatcctgatcaggatgtattaaatatgttgctggcagataaacttattttcgctgatattaaatataacacccagtttagcttaaattatcaactaaaagaaagctttataaacccagtaaccaacaatactatttttatccattatatcgggccaaccaagccctggcatgattgggcctgggattatcctgtatcacaagcctttatggaggcaaaaaatgcttcgccatggaagaatacagcgttgctgaaaccgaacaatagcaatcaattaagatatagcgcaaaacatatgcttaaaaaacatagatatctaaaaggatttagcaactatcttttttattttattgaaaagataaagcattaa

SEQ ID NO: 21750 - DNA, 297 bp, Escherichia coli
gtgctgtatctgaataaccagaatcagctgattgccggtgaaaccctcttcaccggcaccatcaaccgcacggaagtccatccccgggaagtgattaaacgcgccctgtatcacaatgccgcagccgtggtgctggcgcacaatcacccgtccggtgaagtcacacccagtaaggcagaccggcttatcaccgaacgtctggtacaggcactgggcctggtggatatccgggtgccggaccatctgatagtcggtggcagccaggttttctcctttgccgaacatggtctgctttaa

SEQ ID NO: 21751 - DNA, 645 bp, Escherichia coli
atgagcagaattatcaccaccaccgtgtatacactgcatgagctatcctccaccgcacaggaaaaagcccgcgactggtaccgtcagcatcatgctgacagcaactggtatgaaaacgtgtatgaggacttcagggcggtctgtggcattttcggaattgacctccgccagcgcgttttccggctcagcaacggcaggtttatggaagaggcgtgcatctggttcagcggattctgcagccagggggacggagcctgttttgaaggacgctggcactggcagccagcgacaccccggaaaatcagggaatatgcccctcaggaccatgaactccatcgtatcgcggatgccctgcaggcggtgcagaaacgtaacttctggcaactgcaggctgaaatccaccaccggggacgttactgccatccgtacagcatggatatcactgttacccggaacagtccgactggtcaggctatgacagccgatgcggaagccgctgtcagcgaagccctgcgcgacctggccttctggttgtaccgtcagctggaaaacgagtacgacaggctgacctctgatgccgctgtggatgaggcccttctcatcaacgaatacaccttcaccgaagccggtctgcgcgccggctga

SEQ ID NO: 21752 - DNA, 432 bp, Escherichia coli; identical to SEQ ID NO: 7321

SEQ ID NO: 21753 - DNA, 267 bp, Escherichia coli
gtggtcgaggatacgcagcatgtgaccgttgttattgatattgtaggcaaatttttcgttatcaaacgcgacgccagaaccctgcgacagacctttaccctgcgaggtcatcgagtcagtagcgtactgaacaacaaacttgttaaagcccttcaggacactctgagtatgttcagcagtgaacaaccagccgtctttcgatgcgccatcaaccagacgatagttatcacgcaggttggcacgaccgtagtcgacacccagttctaa

SEQ ID NO: 21754 - DNA, 210 bp, Escherichia coli
atgaacgtcatgacgttggtagaagcgcttacctgcccagatggtggagcctggcagccattcgatcaggtttttaccctgcacgtttgcttcacggaaggccggatcggtagcttcccagtcattctgttgcgcgacggaataggccacgttagtgtcgaaatagaagctcttatcgccctctttccacacttcctgacccaattttaa

SEQ ID NO: 21755 - DNA, 444 bp, Escherichia coli
atggaagagccgtgcatctggttcagcggattctgcagccagggggacggagcctgttttgaagggcgctggcactggcagccagcgacaccccggaaaatcagggaatatgcccctcaggaccgtgagcttcatcgtatcgcggataccctgcaggcggtgcagaaacgtaacttctggcagcttcaggctgaaatcagtcaccggggacgttactgccatccgtacagcatggatatcactgttacccggaacagtccgactggtcaggcaatgacaaccgatgcggaagccgctgtcagcgaagccctgcgcgacctggccttctggctgtaccgccagctggaaaacaagtacgactggctgacctcagacaccgctgtggatgaggcccttctcatcaacgaatataccttcaccgaagccggtctgcgcgccggctga

SEQ ID NO: 21756 - DNA, 402 bp, Escherichia coli; identical to SEQ ID NO: 5076

SEQ ID NO: 21757 - DNA, 210 bp, Escherichia coli; identical to SEQ ID NO: 8156

SEQ ID NO: 21758 - DNA, 510 bp, Escherichia coli
gtgcctggcgtacaactgacgaacgaaggggataaccgtaagggcgtaagtattcgtggtctggacagcagctacaccctgattcttgtcgacggtaaacgcgttaactcccgcaatgccgtcttccgccacaatgatttcgatctgaactggatcccggtcgattccatcgaacgtattgaagtggtccgtggtccgatgtcgtcgctgtacggttccgatgcgctcggcggtgtagtgaatatcatcaccaaaaaaatcggtcagaaatggtcgggcaccgttaccgtcgataccaccgttcaggaacatcgcgatcgcggtgatacctataacggtcagttctttaccagcggaccattaattgacggcgtgctgggaatgaaagcttacggcagcctggcaaaacgtgaaaaggatgacccgcaaaactcaacgaccaccgataccggagaaacgccgcgtattgaaggattctccagccgcgacggcaatgtcgaatttgcctag

SEQ ID NO: 21759 - DNA, 573 bp, Escherichia coli
atgccaagagcgaacgaaattaaaaaaggtatggtactgaattacaacggcaaactgctgctggttaaggacattgatattcagtcgcccactgcccgcggtgccgctacgctgtacaaaatgcgtttttctgatgtccgaaccgggctgaaagtagaagagcgtttcaaaggtgatgatatcgttgacaccgtgacgctgacccgccgttacgttgacttctcctatgtcgatggtaacgaatatgtctttatggataaagaagactataccccgtataccttcaccaaagatcagattgaagaagagttgctgtttatgccagagggcgggatgccggacatgcaggtgctgacctgggacggtcaattgctggcgcttgagctgccgcagaccgttgatctggaaatcgttgaaaccgcaccaggcatcaaaggggcatctgccagcgcccgtaacaaaccggcgacattgagcactggtctggtgattcaggtaccagaatacttaagcccgggcgaaaaaattcgtatccatatcgaagaacgccgttatatgggtcgtgctgactaa

SEQ ID NO: 21760 - DNA, 1467 bp, Escherichia coli
atgaatacaatcgcctccgttacgctcccgcatcatgtacacgctccacgctacgatcgccagcagttgcaatcacgtatcgttcattttggctttggagcctttcaccgcgctcatcaggcgttactgaccgatcgtgtgctgaatgcccagggcggcgactgggggatctgtgaaatcagcttgttcagcggtgatcaactgatgagccagctccgcgcacagaaccatttatataccgtgctggagaaaggtgcggacggcaatcaggcgataattgtcggtgccgttcacgactgcctgaatgcaaaactggattccttagcggcaattattgagaaattttgcgagccacaggtggcaattgtttccctgacgattaccgaaaaaggctattgtattgacccggccaccggtgcactcgacaccagcaatccgcggattattcacgatcttcaaaatcctgaagaacctcactccgcgccgggtattctcgtcgaagcactgaaacgacgccgtgaacgcggccttgcaccgtttaccgtactctcctgcgacaatattcccgacaatggccatgtggtgaaaaacgcggtgctgggaatggcagaaaaacgttcaccagaactcgccgggtggataaaagaacacgtcagttttccgggaaccatggtcgaccgtattgttccggcagcaaccgacgaatcactggcggaaatcagccagcatctgggagtgaatgatccctgcgcgattagctgcgaaccgtttatccagtgggtggtggaagataacttcgtcgctgggcgtcctgcctgggaagtcgcaggcgtacaaatggtgaatgatgtcctgccatgggaagagatgaaactgcgtatgcttaatggcagccactcttttctcgcttatctgggttacctctcaggattcgcccatatcagtgattgcatgcaggatcgcgcatttcgccatgccgccagaacattaatgctggatgagcaagcgccgactctgcgaattaaagatgtcgatttaacacaatatgcggataagttaattgcacgttttgctaacccggcgctgaaacataagacctggcaaatcgcgatggatggcagccagaaattaccgcaacgtatgctggcaggtattcgcatacatctggcgcgcgaaacggactggtcgttgctggcattaggcgttgcaggctggatgcgttacgtcagcggcgttgatgatgccggaaatgccattgatgttcgcgatccgcttagcgataaaatttgcgaacttgttgcgggcagtaacagtgaacaacgcgtaaccgccctgctttctctgcgtgaagttttcggtgatgatctgccagataacccgcattttgtgcaggcaatcgaacaagcctggcaacaaatcgcacaattcggcgcgcatcaagcgctattaaacaccctcaaaatttaa

SEQ ID NO: 21761 - DNA, 1191 bp, Escherichia coli; identical to SEQ ID NO: 6254

SEQ ID NO: 21762 - DNA, 594 bp, Escherichia coli
atgactcttacccaaataaattctttactcgccgtgctggattacggtggctttactgaagccagcaagcgattgttcatgacgcagtcggcggtaagtcaggcaattgctgccctcgaacaagaacttggcgtgaatatactgttacgcgatcgccgtaaagctatacaactgacctctgcaggtcaccgcattatgcatcatctgcgcgccattaatcgggaagtgaacgcagtaaaagagatagccgagcaggaaaagcagaaccctcaaagaacgctgagacttggttgtttccccagcgtctgcgcctgtatcttaccggctgtgattcgctactttgaaattcatcatccgaatataaaaattattccttttgaggaaaatagcacagcgattattgattcccttcagaatgaatccattgatgccggttttgttcattttccggtgagcggaatgtactccgtgcccatttatcaggataaattcaccgtagtgttaccgcccaaccatgctctggcaaaaaacagcactattacagtggaagagttaatgggtgaaccattaattattagtaaaggacgctggtaa

SEQ ID NO: 21763 - DNA, 984 bp, Escherichia coli
atgcagataaaacgctcgattgagaaaatcccgggggggatgatgctcgtcccgctattccttggcgcactgtgccacaccttctcgccggaggcggggaaatattttggatcattcaccaacgggatgattaccggtacggtgcccattctggcggtgtggtttttttgcatgggggcgtcaataaaattaagcgcgacgggaacggtattgcgtaaatccggtacgctggtggtaacaaaaattgccgtcgcgtgggtggttgcggcaattgcctcgcgcattattccggaacatggtgttgaagttggattctttgccggactttcaacgctggcgctggtggcggcgatggatatgaccaacggcggactttacgcttccatcatgcagcagtacggcacaaaagaagaagctggggcatttgtgttgatgtcattggagtccgggccgctcatgacgatgattattctgggcactgccgggattgcctcgtttgaaccgcatgttttcgtcggcgcagtattaccgttcctggtgggctttgcccttgggaaccttgaccctgaattacgagaatttttcagcaaagcggtgcagacgctgattccattctttgccttcgcgctgggcaataccattgatttgactgtaattgcccagacaggtttgctggggatcctgttgggtgtggcagtaattatcgtgaccggtattccgttgattatcgccgataaattgattggcggtggcgatggcactgccggaattgccgcttccagttccgtaggggccgcggtagcgacacctgtgctgattgcagaaatggtgcctgcgtttaaaccgatggctccggcagcaacttcgctggtcgcgacggcggtcattgtgacttcgattctggtgccaattcttacctctatctggtcacgtaaagtcaaagccagagcggcgaaaatcgaaattttaggtacggtgaaataa

SEQ ID NO: 21764 - DNA, 1221 bp, Escherichia coli
atgtctatttataaaatcccgcttccactgaatattctggaagctgcaaaagaacgtattacctggacacttaataccctaccccgtgtctgcgtttctttttcgggtggtaaagattccggattaatgctgcatctgaccgccgaaattgcccgacaaatgggcaaaaaaatctgcgttttgtttatcgactgggaagcgcagttctcatgcactattaactatgttcagtcattacgtgagttttacgccgatgtcatcgaagagttttactgggttgcgctcccgcttacgacgcaaaattccctttctcaataccaacccgaatggcagtgctgggaacctgatgtcgaatgggtgcgtcagcctccgcaagatgcgataaccgatcctgactttttctccttttaccagcctggcatgaccttcgaacaatttgtgcgtgagtttgctgaatggttttcacaaaaacgtccggcggcgatgatgatcggcatccgtgcagatgagtcctacaaccgttttgtcgccatcgccagtttaaataaacaacgttttgccgatgataagccctggaccaccgccgcaccaggcggtcatagttggtacatttaccccatctacgactggaaagtggctgatatctggacctggtatgctaaccatcaacagctctgtaacccactgtataatataatgtatcaggcaggcgttcctctgcgtcatatgcgaatttgcgaaccttttggcccggagcaacggcaaggattatggctctatcacgttatcgaaccggatcgctgggctgctatgtgcgcacgagtcagcggggtaaaaagtggcggcatttacgccggacatgataatcatttttatggtcatcggaaaatcctcaagccagaacatttagactggcaagaatatgcattattgctgctcaatagcatgccggaaaaaacagctgagcattaccgcaataaaatcgccatttatttgcactggtatcagaaaaaaggcatcgaagttccacaaacccagcaaggggacattggcgcgaaagatatcccctcctggcggcgaatatgcaaagttttactcaataacgattactggtgccgggcattatcatttagtcctacgaaagcgaagaactatcagcgttataacgaacggataaaaggaaaacgtcaggaatgggggatactatgcaacaacgattaa

SEQ ID NO: 21765 - DNA, 630 bp, Escherichia coli
atgggggatactatgcaacaacgattaacgcaggatttaacccaatttctcgccagcttgccggaagatgatcgcatcaaagcgattaatgaaatccgcatggcgatccatcaggttagcccctttcgtgaagagccagtggattgcgttctgtgggttaaaaacagccaacttatgcctaatgattacaacccaaacaacgtggcaccacccgaaaaaaaactgctgaaaaaatccattgaaatagatggttttacccaacccattgtggtcacgcatacggataaaaatgccctggaaatcgtggatggttttcaccgccatgaaattggtaaaggctcatcatcgttaaaattacgcttaaaaggttatttgccggtgacctgtctggaaggtacgcgtaatcaacgcatcgccgcgactattcgtcataatcgcgctcgtggacgtcaccaaatcactgccatgtcagaaatcgtccgtgaactcagccagttgggatgggacgataataaaattggcaaagagctgggaatggacagcgacgaagtgttgcgcctgaagcaaattaacggcctgcaagagttgtttgccgaccgtcaattttcccgcgcctggacggttaaataa

SEQ ID NO: 21766 - DNA, 492 bp, Escherichia coli
atgaaaaaaaataacacacaacaaataaaatgcgtcatattcaactcattacgtgcactaggccatgaaaaagaaaattcacttaagcgcatcattaatagttttaattctgaactcatgggagaaatgccgaataatgataatataacagatcatttagctgaaccagaaataatatttttacataccgatcttcagcaatacttaagccaaagttgcggtgcatttgtgtgcatggcagccaaagaagtaattgaacaaagggaaagcaattctgacagcgctccctatacgttattaaaaaactatgctgacagatttaaaaaatattcagcagaagagcagtacgaaattgattttcaacatcgactgataaacagaaattgttatttagataaatatggcgatgcaaatatcaatgattattatagagacttagaaataaaacactcacaaccccaaaatagagcatcaggcaaaagagtaagttaa

SEQ ID NO: 21767 - DNA, 372 bp, Escherichia coli
atgaaaacgatgctggcagcttatttaccaggaaattcgaccgtcgatctgcgggaagttgcggtgccgacgccgggtattaaccaggtactgatcaaaatgaaatcctccggaatttgcggaagcgatgtccactatatctaccaccagcaccgcgctacggcggcggcacccgataaaccgttataccagggatttatcaacggtcatgaaccgtgcgggcaaattgtggcgatggggctaggctgccaccattttaaagagggcgaccgtgtgctggtgtatcacatttctggctgtggtttttgcccgaactgccgtcgtggttttcctatctcttgtactggcgaaggaaaagcggcttacggctag

SEQ ID NO: 21768 - DNA, 192 bp, Escherichia coli
atgaccacaccctcagatttgaacatttaccaactgattgacacccaaaacggtcgggtcactccgcgtatttataccgacccggacatttaccaactggagcttgagcgcattttcggtcgttgctggctatttctcgcccacgaaagccagatcccaatgcccgtatcacggctggtcttatggcattaa

SEQ ID NO: 21769 - DNA, 507 bp, Escherichia coli
atgccaggccaaaaaatctcaaacgacgatctgtattggttaatttctaattctccactccttcttatgctaaggcaagaaagtgcaccactggtcagtgaattgattagctgtagaaatagaatgtgggatgaaggggcagatttagataccaatttgtttgatcatcttatgcaactagcagtcgataacaaggcaaaactacgctctgaatacaacgcttatccagaaatagcaaaataccttaacgctgaaatacttggtggaccaggtcaaccagacctaaaaacaaaagatggttaccctgttgaggtgaaggtagatactttttctccttcagcattaaaacaattattaaggtatatggatgcttctggcgcagattttggttttgcttgtgcaaaaactctttctgtaaaactccctgaaaacataaagttcatccagttagattataaagataattgctatttcgtcgtgaaagatggaggcaatgaaaatgcgtaa

SEQ ID NO: 21770 - DNA, 666 bp, Escherichia coli
gtgatcctcgaaggggttatcgaaagtcgtaaacgtgagatcgaagggccgttcggtgagtttaccggccactactccggtgggcgcaacatgaccgtggtgcgcatcgataaagtctcttaccgcacgaaaccgattttcgaatcgctgtacctcggcatgccgtggacggaaatcgactatctgatggggccagccacctgcgtgccgctgtatcagcaactgaaagccgagttcccggaagtgcaggcggtgaacgccatgtacacccacggcctgctggcgattatctccaccaaaaaacgctacggtggctttgcccgcgcggtgggcctgcgtgcgatgaccacgctgcacggtctgggctatgtgaagatggtgattatggtcgatgaagacgttgatccgttcaacctgccgcaggtgatgtgggcgctctcctcgaaagtgaacccggcaggggatttggtgcagttgccgaatatgtccgtgctggaactcgacccaggctcaagcccggcggggatcaccgacaagctgattatcgacgccaccacgcctgtcgccccggacaaccgtggtcactacagtcagccggtggtggatttaccggaaaccaaagcctgggctgaaaaactgaccgctatgctggccgcacgtcaataa

SEQ ID NO: 21771 - DNA, 927 bp, Escherichia coli; identical to SEQ ID NO: 6330

SEQ ID NO: 21772 - DNA, 810 bp, Escherichia coli
atgactaagcaaccacctatcgcaaaagccgatctgcaaaaaacccagggaaaccgtgcaccagcagcagtaaaaaataacgacgtgatcagctttattaatcagccatcaatgaaagagcaactggcagcagctctcccacgccatatgacggctgaacgaatgatacgtatcgccaccacagaaattcgtaaggttccggcgctaggaaactgtgacaccatgagttttgtcagtgcgatcgttcagtgttcacagctcggccttgagccaggtagcgccctcggccacgcatatttactgccttttggtaataaaaacgaaaagagcggtaaaaagaacgttcagctaatcattggttatcgcggcatgattgatctggctcgccgttctggtcaaatcgccagcctgtcagcccgtgttgtccgtgaaggtgacgagtttagttttgaatttggccttgatgaaaagttaatacaccgcccgggagaaaacgaagatgcaccagtgacccacgtctatgctgtcgcaagactgaaagacggagggactcagtttgaagttatgacgcgcaaacagattgaactggtgcgcagccagagtaaggctggtaataacgggccatgggtaactcactgggaagaaatggcaaaaaaaacggctattcgtcgcctgtttaaatacctgcctgtctcaattgaaatccagcgtgcagtatcaatggatgaaaaggaaccactgacaatcgatccggcagactcctctgtattaaccggggaatacagtgtaatcgataattcagaagaataa

SEQ ID NO: 21773 - DNA, 189 bp, Escherichia coli
atgtataaaattactgccactattgaaaaggaaggtggcactcctactaactggacaagatattcaaaatctaaattaacgaaatcagaatgcgaaaaaatgctctcagggaaaaaagaagcaggcgtttccagagagcagaaagtaaagctgataaattttaattgcgagaaacttctgtcctcgtga

SEQ ID NO: 21774 - DNA, 282 bp, Escherichia coli
atgaatcttgtgacactcaaaacgtggggaaaactcagatatccggataacccaccatcaatatcaacgctgagacgatgggcaaggaatggaaacatttatcctgcacctgaactacacgggaggagttacagggtggttccggaggctttctatatcaacccaaataaggttgataccgatataacacaccatcagcctaatgggcgacaagggagagacagtccgttactggagaagttaaaacatgcagcggaaaaaatacgatcccaatttgcctaa

SEQ ID NO: 21775 - DNA, 1077 bp, Escherichia coli
atgcagcggaaaaaatacgatcccaatttgcctaaaaacttaacatatcgaaggagggacaaagcatattactggcgcaaccctctgacgaaagaagaatttacactaggtaaaatttcaagaagagatgcagtagcgcaggcaattgaagcaaatcattatatatacaaaaactactctcctgctgccttaattgaaaagcttaaagggttcgactcatttactatggcagactggattgaacgttacaaaacgattcttataaggagaaaagtgtccagaaatacttataaaattcgggtaaatcaactggagacaataaaagaaaaattgggggaaattttactgacagaaataaccactcgccatattgccgagtttcttgatttgtggattgaaggagggaaaaacacaatggcaggatcaatgcgttctgtgttgtctgatatgtttcgtgaggccattgttgatggacgtatatctcaaaatccagtaacgccaacaagagcaccgaaaatagtagttacaagagaacgactgaaactaaagacatacaactgcatcagggaggcagcagatcaacttccggcatggttcccattagctatggatttagcccttgtaacaggacaacgtcgcgaagacataacgaatatgcgctttagtgatatttatgatgatcgtctccacatcaggcaaattaagacaggaatgatgattgctatccccctgtcactcagccttcctgtcgctggtctacggcttggtacagtagttgaacagtgccgcctggtaagccggggagattatctaatcagtgccgggattagaaaaaacagccctgacggcagcattcacccggatggcctgacaaaaaaatttgtcgcagccagaaaattaacaggtatccagttcagtgaaaacccaccaacttttcacgagatcagaagtctggctggacgattgtacaaagaaacatgtggagaagaatttgctcagcgtctacttggccacacatcggagaagacaacaaaaatgtatcttgatgagagagaaaaaacgtacttactactctga

SEQ ID NO: 21776 - DNA, 1206 bp, Escherichia coli
atgtcatggcagcaattcaaacacgcctggttgattaaattctgggcacccatccctgcggtcatcgcggcgggtattctctccacttactattttggcatcactggcacattttgggcagtcacgggtgaatttacccgttggggcggtcagctcctgcagttgttcggcgtccatgctgaagagtggggttattttaaaattatccatctggaaggatcgccattaacccgcatcgacggaatgatgatcctcggtatgtttggcggctgttttgccgcagcgctgtgggccaacaatgtcaaactgcgcatgccgcgcagccgtatccgcattatgcaggccatcattggcggtattatcgccggttttggcgcacgtctggcaatgggctgtaacctggcggcgttctttaccggaattccacagttctcgctgcacgcctggttctttgccatcgccactgccattggttcatggtttggcgcgcgctttaccctgctgcccatcttccgtattcccgtgaaaatgcagaaagtttctgccgcctcaccgctgacgcaaaaaccggatcaggcgcggcgtcgttttcgtctcgggatgctggtctttttcggcatgctgggctgggcgctgctcacggcgatgaaccaacccaaactggggctggcaatgctgtttggcgtcggctttggtttactgattgaacgtgcgcaaatctgctttacttcggcgttccgcgatatgtggatcaccggacgtacccatatggcgaaagcaatcattatcggtatggcggtaagtgccatcgggatcttcagttacgtacagttaggcgttgaacccaaaatcatgtgggcgggaccaaacgcggtaattggtggtttactgtttggttttggcatcgtgctggcaggcggctgcgaaaccggctggatgtaccgcgcggtagaaggccaggtgcactactggtgggtcggtctgggcaacgtgatcggctcaacgattctggcgtattactgggatgatttcgctccgacgctggccaccgactgggacaaaatcaacctgctgaaaacctttggtccgatgggtggcctgctggtgacatatttgctgttgtttgcagctctaatgttgattatcggctgggaaaaacgcttcttccgccgtgcggcaccgcagattgctaaggagatcgcatga

SEQ ID NO: 21777 - DNA, 498 bp, Escherichia coli
atgacaggagtagactttttattaccgattgcagcgggagccgcgattagctgggccagttatagtgtagttgcccatgctgtatcaaagcagcacatcagcacgctacgcgcaactgtatggggggctctgggcagtctctcattggtgctgggtgtatgcgccttttctgctgtaggtgctgagcatcagacagcacgaaaagatatcgtatgtgcagatgacaacccggaatgctatgcgaaaacgcaccacaacccggtcagggagtgcaagcaggtaatggacaagaaagcgacgtttcgccatgtgtggcaggaaagtgaagcgcagccggtattcaacacctatctctggcatgacgagaacaaacgaactattcaaatgttcggacaacaggctaaggcaattaatagcctggagatgctaacaccacttcaatatttctgtatttttaacgccagcaccggggaagtcatcgcggcttcgtttgagtga

SEQ ID NO: 21778 - DNA, 849 bp, Escherichia coli
atggcttacacagcaacggttatccctgtaatgatcgcatcccctggtgatgttactgaagaaagaagaattatccgggaagtaatccacgaatggaatgatattaattctgccctctcgaaagttatgctaattcctgttgggtgggaaacccacacatcaccggagcttggcatgagacctcaggagttaattaatcagagactgctagttgattgcgatctattgattggtgctttctggacacgacttggctctccgacaggtgatgaagcaagtgggactgttgaagaaattcacaagcatttagacgcgggcaaacctgcaatgatatatttttcatctaaacccgtagtgcttgataccgtggatatggggcaatatgatgccctaaaagcattcaaacaagaatgcatgcaacaaggcttgattgagacctttaatgagtcaactgattttaaacataaattatataaacaattaacgctgacactcacaaataattcatatctgaaaaatatcataaactcttatcgttcagaaggaactgataatttaaaacaagaatctcctaagatgcttctatctgaagatgcaattttcgtcttgaagatggcatgcgaggacgaaagcggtgggatattaatattagagcatctggatggaacagatattcatgttggcggccaaagtctcggtggaggaaatgctagagaggttgctaaatggaaatctgctttagatgaattgaaatccaatgaattaatatcttctcgggattataaaggcgttcaattcgaagttactcataaaggatggactctttttgaatcattgaagaacaagtaa

SEQ ID NO: 21779 - DNA, 177 bp, Escherichia coli
atgattaaagacgcgattttttcaccgtgcggtcaatatcgctactcgttatcacgagtctgggacgaatcaaaaccatatgcccttttcatagggctaaacccttcatacgccgatgctgagaaggatgatcgcaccttgagccgctgcatatcgtttgccaaaagctggggctaa

SEQ ID NO: 21780 - DNA, 597 bp, Escherichia coli
atgacgggggcgcgagttaatgaaatcgctcagttactgctgagtgatgttctggcagacgacggcgtctattatttgaaccttgaaagcgataatgaaagcggaaagaaactcaaaaacgctaatgctcgccgcaagattccgctccattcaaagctgattagtctcggtttcatcgactacgtgaacgccttaaaagatgcagggtatacccgtctcttcccggagcttaaaccacataaaacaaaaggctatggtaggccagtttccgcatggttcaatgaatcgttgcttgcggggcggttgaaactcgagaggaacagaagcaaatctttccattcttttcgccactcagtttcgactttgctcaaggagaagggcgttagctcagaattacgagcgcagctacttgggcatgtgcgcggcgaaactgaaacggaagtgcgatatagcaaagacctcaaaccaattcatatgattgaagtcgtggagaaaattgatttttcgttacctgatatagcggaattcaacattcctgacgggctggatgctgtcagagatgcgttgcgaagaaagcgtggcaaacaaacaggttga

SEQ ID NO: 21781 - DNA, 1092 bp, Escherichia coli
atgtctcagcgatataaactctatcgtcgaaccagcggcatttatgttgtccgcattagcgttccccaacgttttcgtcgatacgcaggacagtgtgagattcacacttcaacaggcactcacgatcttcatgaagcaaagcagaagtccgcgttcctgttggcggtctggtatcagaccttacaagagtatgaacaattggattatcgaactttaagtgactgcgccccgctgcttgctggtgagggtatgatctcgctttctaactttgctcagtcagttgagttgcctgttgcgcaattaatacaggcggtgatgaaccgtaatctgcccgtattctggctggcgacggggcaggctggcttttatgttgcagcgctctctgaggctgagctagacccgcttgatggcagttacgttcttaattatggcgaagagaagggtatcgagggggttgctaaaggctatctgcaactcactgcgcaaccagcacatttacgtaacattattagcgacggttattcagaagcttcggtgttcaaaactgccggaagcgatgctaaaggcggttggtttttcacctccggttggccggtaattaaacccgatacgcttttgatcaataaagtccatgcagaaagcctaaggcttgattggctggctaagaccacgcctccagtcgctagcgttcatcctaccgtgcctcttgccgctcctgcccctactatcgataacgagtatgttaatcgaaagtattacactaagaacctgtcgtggttatgctctgaatatctaaagcatcggcgcaagggcaaggtatcggagtcggctataagtgatatccgtaactatttcagctttatgatcgaagcgatgggtgacattcagttggaagattttgatcgcgatttcctccgggcttatgagagcaaactgcgcacgatcccagcaaaccgtaatttagtcaaagctaaatatggagtgaaaacgctggatcagttaatcgccaaagcggcagaatgcggcgataaattgatgactgaggaatccgttaggaagtatatcaacggcatttatggtgcaatgaagtga

SEQ ID NO: 21782 - DNA, 381 bp, Escherichia coli
atggctcaagttattaatgaaatggatgttccgtcccattcgtttgtttttcatggtacaggtgagagatattttcttatttgtgtggtgaatgtgttgttaacgattataacgctaggtatctatttaccatgggcattaatgaaatgtaagcgttatctctatgctaatatggaagttaacggacaacgattttcttatgggattaccggtgggaatgtttttgttagttgtcttatttttgttttttttctatttcgcaatcttaatgacagtgtcagcagatatgccgcttgttggctgtgttttgactttgtcactgttggttttgcttatatttatggcagcaaaaggactgcgttatcaggccttgatgactag

SEQ ID NO: 21783 - DNA, 543 bp, Escherichia coli
gtgaaagaaagcaatcagcgatggtgctctgacgggttcgagttctgctgtgataacggagagagactgcgtgtcacgttcgcgctggactgcagtgatcgtgaggcactgcactgggcggtcactaccggcggcttcaacagtgaaacagtacaggacgtcatgctgggagcggtggaacgccgcttcggcaacgatcttccgtcgtctccagtggagtggctgacggataatggttcatgctaccgggctaatgaaacacgccagttcgcccggatgttgggacttgaaccgaagaacacggcggtgcggagtccggagagtaacggaatagcagagagcttcgtgaaaacgataaagcgtgactacatcagtatcatgcccaaaccagacgggttaacggcagcaaagaaccttgcagaggcgttcgagcattataacgaatggcatccgcatagtgcgctgggttatcgctcgccacgggaatatctgcggcagcgggcttgtaatgggttaagtgataacagatgtctggaaatatag

SEQ ID NO: 21784 - DNA, 1101 bp, Escherichia coli
ttgaatctgatgcgttttctgcgccgaccaatatcgctgcgccaacggctgatattgaccatcggggccattttgttggtgtttgagctgatcagcgtcttctggctatggcatgaaagtaccgagcagattcagctgtttgagcaggcgctacgcgacaatcgcaacaacgatcgccacatcatgcgtgagatccgcgaggcggtcgccagcctgattgtccccggcgtctttatggtcagcctgacgctatttatttgctatcaggcggtacgccgcatcacccgcccgctggcggagctgcaaaaagagctggaagcgcgcaccgccgacaacttaacgcccattgccattcacagcgccaccctcgaaatcgaagcggtggtttcagcgttaaacgatctggtcagtcgcctgaccagcacgctggataacgaaaggttgtttaccgctgacgtcgcgcacgaactgcgaacgccactggcgggggtgcgtttgcatctggaactgctggcgaaaacgcatcacattgatgtagcaccgttagtggctcgacttgatcagatgatggagagtgtctcccagctgctgcaactggcgcgtgccggacagtcattttcttccggtaattatcaacatgtaaaactgctggaagatgtcattctcccctcgtatgacgaactcagtaccatgctcgaccagcgacagcaaaccctgctattgccagagagcgccgccgacatcaccgttcagggtgatgcaaccctgctgcggatgttattgcgaaacctggtagaaaacgcccatcgttacagcccgcaaggcagcaacattatgattaagctgcaagaagatggcggagcggtcatggccgttgaagatgaaggaccgggtattgatgagagtaaatgcggggagttgagtaaagcgtttgtacgtatggacagccgttatggcgggattggtctggggttaagtattgtcagccgcattacacagttgcatcacgggcagtttttcctgcaaaaccggcaagagacttccggcacgcgggcctgggtacggctgaagaaagatcagtacgtggtaaaccagatataa

SEQ ID NO: 21785 - DNA, 1554 bp, Escherichia coli
atgtttaacaaagttttgatagggttaaggagtcatccagaattaataattcttggattaatggtgatgattatcgccatgctcataattccattgcccacctacttaatcgattttttgattgggctgaacttaacattggcaatacttgtatttttaggatcattctatgttgataggatcttaagtttttcttcattcccatcaattcttctcatcacaacgttatttcgtttggcgctggcgatcagtaccagccgacttatacttcttgaggcggacgccggagaaattataacgagttttggtgaattcgttattggcgatagcctggtagttggttttgttattttctccattgttactattgttcagtttatcgtgattactaaaggttcggaacgtgtggctgaagttgctgcccgcttttcgcttgacggtatgccaggtaaacaaatgagtattgacgccgatctacgcgccgggatcattgatgcagatttagcaaaagaacgtcgtagcgtattagaacgagagagtcagctgtatggttcctttgatggtgcgatgaaatttatcaaaggtgatgctattgcaaacattattattatctttgttaatattatcggtgggctatcagtaggagtaggccaaaatggaatggatttctcgacagcgttgaccgtctacacaattcttaccgtcggtgatggtcttgtttctcaaattccagctttattaattgctattagcgcagggtttatcgtaacgcgcgtgaatagcgatagtgataatatggggcaaaatataatgtcccagttattaagtaattcttttgtcattattgtgacatgtgtcctcgcgctaagtattgggttgcttccaggttttccccttcttgtgtttttatgtttggcagtaatcttaggaatttatttttactttaaattcaaaaagaaaggggttgaagaaacggttgttgagggagatatcaccgttgggttggaaccctataatcaggatgatgatatttcattaggtattattaataaacttgatcaggttattaccgaaacggtacccttggttttgattatgaatagtgtacaggctaaaaaatacactgaaatcaatcttgctgataggattcgtagtcagttttttattgagtatggtatccgtattcccggtattgtcattcgcgagggggaaggccttaatgatgaagatgtcatattaatgctaaatgaagtcagagcctcgcaatttaaaatttatcatgatctcgtcttgttggttgaatattcagatgaagtggtttcgactttgatcaagaaacctgtcatcgtaaatagtaatggtgaacaatattattgggttacaaaaagtgatgcccaaaaattaacaaaaattggctgttatactcgcacggccatggatgaaatgtacaatcatttatctgtatgtctggcgcataatattaatgagtattttggtatacaagaaaccaaatatattcttgatcaattagggaaggtgcgaacaagttcctga

SEQ ID NO: 21786 - DNA, 3057 bp, Escherichia coli
atggaccagatagccaacctggtcattgatttggggattgatgcggcagagtttaaaaatgaaattccccgtatcaaaaaccttctgaatggtgcagtcagcgatgcagaacggtcttctgcccgtatgcagcgttttatggagcgtcagactcaggccgcccggcagacaacgcaggcagcttcttcggctgcaacagccgcatccgtccatgcgcagacggtggagaagaacgcacaggctcatgaacgcatggcccgcgaggtggagaaaacccgccagcgcatggaggcactgagccagaaaatgcgcgaggaacaggcgcaggccatggctctggcggaggctcaggataaagcggctgctgcgttttatcgtcagattgacagtgtgaaacaggccagtgcggggctgcaggaattacagcgtattcagcagcagatccgacaggccagaaacagtggcgggattggtcagcaggattatctggcgctgatttctgaggttactgcgaaaacccgtgttcttacacaggctgaggaagaggctacccgacagaaagtggcgtttatccgtcagcttaaagagcaggcaacccgcctgaatctttcatcttctgagttgcttcgtgctaaggcagcccagctgggggtaagcagtgctgcagaagtgtatatccgcaaaatggagcaggcaggaaaagccacgcattcgctgggtctgaaaagtgcagcagcccgccaggagataggcgttctgataggtgaactggcccgcggcaatttaggggcgctgaggggatccgggataacgctggctaaccgtgccggatggatagacacactaatgtcacagaaaggcatgatgcttggcggggttattggcggtattgccgcggccgtctatggtctgggtaaagcctggtatgacggtcagaaggagggggaagaatttaaccgccagttgtcgctgacggggcattatgccggagtcactgccgggcagctgtggacgctcagtcgtgctatttccgggaatggtatcacgcaacatgctgcagccggtgcgctggctcaggtggtggggagtggtgcatttcgtggaaacgatatcggtatggtggcgagagctgccgcacagatggagcgatcggttggccagtcggtcagcgataccataaatcagtttaagcggctgaaggatgatcctgtaaatgccgcgaaggctctggacaatgagctgcattttcttactgccactcagcttgagcagatacgcgtccttggggagcaggggcggtccagtgatgctgcacggatagccatgtctgcactggcagaggaaaccggtcggcgtactgcggatattgataataacctcaatgcgcttggcagtacgctgaagtatctgtctgatttgtggagtcgtttctgggatgcggccatgaatattggtcgtgaagactcgctggatgaacagattgccgctttacaggagaaagtgtcgcgggcgaaaagactcccctggacggcatcatcttctcaggttgaatacgatcagcagcgtcttaacgatcttcaggagaaaaaacgccagaaggatttgcaggatgcaaaagagcaggcagagcggaattatcaggagcaacagaaacgccgtaatgctgaaaatgctgcactgaaccggatgaatgaaacggaagctgcacgacatcagcgtgaaattgcgcgtattaatgccatgcagtacgccgatcaggctgtcagggatgcggcgatacaacgtgaaaatgaacgttacgagaaagccctggcatccggtaagaaaaaaacacgcgaaacccgtaatgatgaggccacccggttattgctgcagtacagtcagcaacaggcacaggtggaaggacagattgctgctgcaagacagtcagcaggcattgccactgaaaagatgacagaagcgcataaacagcttctggctctgcagcagcgcatcagcgatctggacgggaaaaaactgacggcagatgaaaagagtgtgctggcccgtaaagatgaactgattcaggcactgacgctgctggatgtaaaacagcaggagcttcagaaacagacggcactcaacgatctgaagaaaaaaacaattcagctgaccagtcaactggctgaagaagagcgcgctcagcgtcagcaacatgacctggatatcgccacggttggtatgggtgatcagcagcggcagcgatatcaggtacaactgagtcttcgccagaaataccagcaacagctggagcagttgaggcgggatagtgagcagaaagggacatataacacggatgactacagaaaggccgagcaggcgctgacggagagtctgaaccgacaactgaatgagaatcgccgttactggcaacagcttgaaattgctcagggtaactggaaaaacggagtcctgcgtgcactccagaatgtcactgagaatgcggataacacagccgggacagtggaacagttgttcacgtctgcgttcagtagcatgagtgactggctggcgacattctgtactacaggcaaactcaatttcaaatcttttacttcttctgtgctgtcagatatgtccagaatcatggctcagatagctttaatgaaagcggtaaaaggcattgcttccgcgctgccttttgattttgtagccaatgctgatggcggtgtttatcagtcggctgatttgagtcgctacagtggcacggtggttaaccgtccgacgttttttgcttttgcaaaaggcgcgggtgtgatgggggaagctggacctgaagccattctgccactgcgtcgtggtgctgacggtaagctgggggttgtggcggatattggtggttcaggtatggcgatgtttgccccgcagtacaacatcgagatcaataacgatggcacgaacgggcagataggtccggctgccctgaaggtggtttatgatctcgggaaaaaagcggcagcggactttatgcaacagcaggcccgtgatggtggtcggttaagtggagcatatcggtaa

SEQ ID NO: 21787 - DNA, 312 bp, Escherichia coli; identical to SEQ ID NO: 16811

SEQ ID NO: 21788 - DNA, 129 bp, Escherichia coli
atgcagcaggaaaaagagttgctgcaactcagtttgcaacaagggaaatataaccagaagcgcgcggctgaattactggggttaacctatcatcagttccgcgcgttgttgaaaaagcaccagatttag

SEQ ID NO: 21789 - DNA, 999 bp, Escherichia coli
atgtcccctactatttatgatattgccagggttgcaggcgtatcaaaatccaccgtatcacgcgtgctgaataagcaaaccaatatctccccggaagcgcgcgaaaaagtgttacgggccattgaagaattacagtatcaaccaaacaagctggcacgcgcgctgacctcttcgggttttgatgccattatggtgatttctacccgttcgaccaaaactacggcgggtaatccgtttttctcggaagttttacatgccatcaccgccaaagctgaagaagaaggtttcgacgtgatattgcagacgtcgcacaacctggcagaagacttacataaatgcgaaagcaaaattaagcagaaaatgattaaaggcattattatgctaagttcgccagcggatgagtcattttttgcccaactcgataaatatgatattccggtagtggtaattggcaaagttgaaggtcaatacagccatgtttattccgtcgataccgataattatggcgacagtattgcgctgaccaatgcgttaattgaaagcgggcataagaatattgcctgcctgcatgcgccgcttgatgttcatgtttcagtggatcgggtaaatggttataagcaaagcctggctacgcataatattgcagtgcgtgatgaatggattgttgacggcggttatacccatgaaacagccttgcaagccgcacggcaattattaagccagtcgccgttgccagaagccgtatttgccactgacagcctgaaattaatgagcatttatcgtgcggcagcagagaaaaatattgctattccgcagcagttagcggtggtgggttatagcaatgaaacgctgtcatttattttaacgcctgcaccgggcggcatcgatgttccgacgcaggagttagggcaacaaagctgcgagttattattccgcttaattgccggaaaaccgtcaccacaaaatattaccgttgccacgcatatgtcgttgaaataa

SEQ ID NO: 21790 - DNA, 1431 bp, Escherichia coli
atgccagattttttctcctttattaacagcgtcctttggggatcggtaatgatttacctgctcttcggcgcaggttgttggttcacttttcgcaccggatttgtgcagtttcgctacatccgccagtttggcaaaagtcttaaaaatagcattcatccacagccaggcggtttaacctcatttcagtcattgtgtaccagtcttgcggcgcgcgtgggtagcggcaacctggctggcgttgcgctggctattaccgccggtggaccaggtgccgtcttctggatgtgggttgccgcgtttatcggcatggcgacctcgtttgccgaatgttcccttgcacaactttataaagaacgtgacgttaatgggcagtttcgtggcggaccggcatggtatatggcgcgcgggctggggatgcgctggatgggcgttctgttcgccctctttttgctcatcgcttacggcataattttcagcggagttcaggcgaacgccgttgcccgcgccctgagtttttcttttgattttcctccgctggtgacaggcattattctcgctgtctttgctctgctggcaatcactcgcggtcttcatggcgtcgcccggctcatgcaggggtttgtcccgttgatggcgataatctgggtactgaccagcctggtaatttgcgtaatgaatatcggacaacttccccacgtcatttggtctatttttgagagtgcttttggctggcaggaagcggcaggcggcgcggcgggatataccttaagccaggcgattactaacggttttcagcgcagtatgttttccaatgaggcaggaatggggtcgacgccaaacgcggcagcggcagcggcgtcctggcctccgcatccggcagcgcaaggaattgtccagatgattggcatttttatcgacaccctggtcatctgtacggcaagcgccatgctgatattactggcgggtaacggcacaacctacatgccgctggaaggtattcagcttatccagaaggcgatgcgggtgttaatgggttcctggggtgcggagtttgttaccctcgtggttattctgtttgccttcagctccatcgttgccaactacatttatgccgaaaacaatctcttcttcttacgcctgaacaaccctaaagcgatctggtgtttgcggatctgcaccttcgcaacggtcatcggcggcaccttgctaagtcttccgctgatgtggcaactggcagatatcataatggcctgcatggctattaccaatttgaccgccattttactgctctcgcctgtggttcataccattgccagtgattatctacgccagcgtaaactcggcgtgcgcccggtgtttgatccgttgcgttatccggatatcggccgccagctttctccggacgcgtgggatgatgtttcgcaggagtaa

SEQ ID NO: 21791 - DNA, 231 bp, Escherichia coli
atgcgcagcgccgatgatattacggctatgtggaaagcatggaatatcagaccagatcagcaagtttcattctactgcggcaccggctggcgcgcgtccgaaacctttatgtacgcacgcgcaatgggctggaataacgtctccgtttacgacggcggctggtacgaatggagcagcgatccaaaaaatccggtagcaaccggtgaacgcggcccggacagcagcaaataa

SEQ ID NO: 21792 - DNA, 249 bp, Escherichia coli
atgctctctctgttttggcaaattacccctcactttgaagggagcggagctataaaaatggtgttatccggcttcctgcattgcgggttttcgaaagaatcaatgggttatgttatcgtgcaaatttgcactctgccagccaacgcaatttctcgttggcggaaatatcaggtatttactgaacgaacggtctacccgcctgttcaactaccagttgtacatggctgctttatgtgcaaatggtggtga

SEQ ID NO: 21793 - DNA, 453 bp, Escherichia coli
atgcttaccgccctcacccatcttagccgttcgccgctggagcagaatatcattcagccactggtgttaagtttgctgcatctttgccgcaacgtggtgaatatgccaccgggcaattcgcagccgcgcggcgattttctctatcacagcatttgtaactgggttcaggataattatgcccagcagctcacccgcgagagcgtggctcagttttttaatatcacgcccaatcatctgtcaaaactgtttgctcagcatggaacaatgcgttttatcgagtatgttcgctgggtacgaatggcaaaggcaaggatgattttgcagaaatatcatctgtcgattcatgaagtggcacagcgttgcggttttccggacagcgactatttttgtcgcattttccggcgtcagtttggcctgacgccgggagagtacagcgcccgttttcagggctaa

SEQ ID NO: 21794 - DNA, 1614 bp, Escherichia coli
atgtatagcatcacagaaaaattaaactcaagatttaacactgcgcttatattcgctgtcactgtctatattattttatcatttattacagccattgattttcataaaaaaatagcagaaaactcttcacgcattaatcttatacttatcaataataatttgaataactttttttctaaagttgaaaaagaggcggatgctttaaaagatgccatttatctgttacacgatgaaaatgaaataaaacgcgcagttcttcatcggatgaaaaagatagattctgttaatttagtcggaataatgctaaataatggaaagtatcttagctttattcgaactgataatggtgatgttaaatttttggggcaatcagagccaggtcatgcttttactagccctgatggtgaaattaacgataactactttgatcctgaatcccgtccctggaataaattaccaacagggacttattcaaaatggtcaccatggtataactgctatggcattgccgggaaaaaatgtttttcgttttcattacgaccagccgaagcagaaaaagattcatttgctctgaagttaattcatttagatcttgatgaaagatattttagcaatttcctggacaaattaggaggaaatgcagatattttatttatggaacagaataaaaggattatggtaggtaatgaacaatcaatgttacatcttattgttagagatgcatctggacgttataacataagtaataataacggtaattatacggacgatattatttcactccccaggcttcctgatgtcaaatttcattattttcattatcaaaaagcagaagacacaaacataaataaatattttacactgatgtttgtatgtggtttggtttgtttctgtttattatggtacctttttgaaaagataacaaaaaaggttagaaacgactctggtaaactaattgagcatctgaaaaaattagcgagctcagtataccgaaatgataaaatcgaaatcgtgcaaaatgacagtagtgagattattgagctcaaaaaaatcattaataacattagtgacaaatacaaagagcggatggaacggttacttaatcttgtttcctatgaacaaggaagttgtttctatatcaacaaatctgtcattgaaactaataataaaacctattcagcagttggtatgctttgtatctatggattagagtttgtagaggctatacatggcagtcagaaattttatgagatcattaatgatataaaatcaaagatatcagcaaagtattctaaatattgtgatattgtaaaaatttctactgaaacatatttgttgctgtgtcacactcattgtgaagagttcatagaacgattatctgttttaaactttcctgagcatattttttgcataagaaatatttatgttcataaggttgctatttgtgaaactttttcaggggaaagtttgtcgatttatgaaggtaaactgaaactggcattaacagctatgcgagaaaataaagaatctgaatttatattttatgatgatattaaggctcatgaacttgatcaaaaggtttgggttgctggaaatataaaaaagcaattgtga

SEQ ID NO: 21795 - DNA, 678 bp, Escherichia coli
atgattaccctgatcttaatgggtattggtatacttatatccacaaggtatctatggtggcgttactcttcttcagttattcttgatgagtttcctgacagcttcttttcattgacgctgttagctgctgaaacgtatgcatggtttgttttattacttggttattttcaggtctgtttcccattgaacagggaaagcatacctttaccagataataaagaagaatggcctgatgtcgatatattcatacctacatataatgaaccctttactgtcgtgaagaatacagtttatggagcgctggctttagactggccaaaagataaattacatgtctggcttcttgatgatggtgccagagacgaattcaggaaatttgctgatgagtcaggtaattgctatgttgcaagagaaacgcatgaacatgcgaaagctggaaatataaacaatgcgcttaaaatagctaacggcgaatttgttgctattttcgattgtgatcatattccttccgtttcttttttaaaaaaaacgatgggctggtttattgccgataaaaaactatcgatgctgcaaacaccacatcattttttctctcccgatccttttgagcgaaacttggggcaatttcggcagaaaccaaatgaaggacatcttttttatggtttaatccagaggtaa

SEQ ID NO: 21796 - DNA, 276 bp, Escherichia coli
atgactaagctttatcaccgcatctcaacttttctctctgggtgctgggcgtttatcacgtctatttcgttcgccatctttagtttcggtagcacagcatgctcgcttagtcggggtatgtggcgtgctatttcagcactagcgccgaaatttttacctgaaaaggctgtttggcgaattgtagagcgaatgtgtagtgagagcgttcgcgagaagattaacgtatttggacgtcatcctcgaaatacaggcgcattgtgcagttcgttactgtag

SEQ ID NO: 21797 - DNA, 186 bp, Escherichia coli
atgcttagcctatcccaatcccttcaataccagaaagaaagcgtcgagcgagctttaacgtgcgctaactgcggtcagaagctgcatgtgctggaagttcacgtgtgtgagcgttgtatatatgaatgcttaaatatggtggaacataatgagaaatataagcaacatagacgaattaagaaataa

SEQ ID NO: 21798 - DNA, 351 bp, Escherichia coli
atggattattcacagttaagtgattttgaaattaacaaggctgtagctatttcagttggatttcaatgttattacggggatggaagctacacaaacaaccttggattgcgaggtgccattgtaaagggtgaaaacgatagcgggctatttatggttggagaatttaacccgtgcaacaacccggcagacgcatggccgattatcaaagaaaacatgataagcattatcaatctcgatgaagacgagtggggtgcacgcggtatggcctactgtaaatctaagcgagctatacatgaaaatccccttcgcgccgccatgattgtctttctcatgatgcagagaatccaataa

SEQ ID NO: 21799 - DNA, 333 bp, Escherichia coli
atggtgaaaaagactatttatgttaatcctgaccgcggacaaaacagaaaagtatctgatagaggtcttacatctcgagacaggaggagaatagcgagatgggaaaaaaggatagcatatgcattaaaaaacggtgtaacacctggatttaatgctatagatgacggtcctgaatataagattaatgaagaaccaatggacaaagttgacaaagcattagcaacaccatttcctcgcgatgtcgaaaaaattgaagatgaaaaatatgaggatgtaatgcacagagttgttaatcacgctcaccaacgaaatccaaataaaaaatggtcatag

SEQ ID NO: 21800 - DNA, 603 bp, Escherichia coli
atggttaacagttttgatggtgaaaaatggcttccggttcctgttgctccgtatggtgatgcttacctcgttagctcggcgggacgcatccgtggggttaatcgaattgctgaatcggaattttttattcgccaaattcgtggcgtgttcctcaagggaagagtgcgccgggatggatataaaaccgttaacctgagctacaaacgtaatcgccaaacttttgccgtacaccgtctggtagcgctggctttttgcagcaacccttacaaccaccctgaagtgaaccataaggacggcaacaagctgaataaccatgcatccaatctggagtgggttagccatagcgaaaacattcagcattctattcacaccgggctgaataattctcagggggcgaacaacaaacaatttaagggcctgattgtcgccacaaatattgcgaccagggaagagcaaaccttttgcgggaaaaaggcgctaattagtgccgggtttgatcacggtagtgtttatgctgttattgctggaagaacaaagtctcatcgcggtcaccatttcaggcgcctcccgctgaaccatggggaggcagcacaatgcagctga

SEQ ID NO: 21801 - DNA, 1083 bp, Escherichia coli
atgaaaaaattaacagtggcaatttctgctgtagctgcatcagtactgatggcgatgtctgctcaggcagctgaaatttataataaagacagtaacaagctggatctatacgggaaagttaatgccaagcactacttctcctctaatgatgcagatgatggtgatactacttatgctcgtcttggcttcaaaggtgaaacccaaatcaacgatcaactgactggtttcggtcagtgggaatatgacttcaaaggcaaccgtgctgaatctcaaggttcttccaaagacaaaacccgtcttgcatttgcaggcctgaaatttggtgattacggctcaatcgattacggtcgtaactacggtgtagcatacgacatcggtgcgtggactgacgttctgccagaattcggtggtgatacctggacccagacagatgtgttcatgactggccgcactactggtgttgcaacttatcgtaacaacgacttctttggtctggtcgatggcctgaactttgctgctcagtatcagggtaaaaatgaccgcactgacgtaactgaagccaatggtgatggtttcggtttctccactacttatgagtatgaaggattcggcgtgggtgcaacctatgctaaatcagatcgcactgacggtcaggtcgcctatggtaagagcaaattcaatgcctccggcaaaaatgcggaagtatgggctgcaggcctgaaatatgatgcgaacaatatctatctggctaccacatattctgaaactcagaatatgaccgtttttggtaataaccatattgcaaacaaagcacaaaactttgaagcagtagcacaatatcagtttgacttcggtctgcgcccatctgttgcttaccttcagtcaaaaggtaaagaccttggtgttcatggtgaccgagacttagtcaagtatgtcgatgtcggtgctacttactactttaataaaaacatgtccacttttgttgattacaaaatcaacttaattgacgatagtaagtttaccaaaacagctggtattgataccgacgacatcgtcgctgtaggtctggtttatcagttctaa

SEQ ID NO: 21802 - DNA, 1200 bp, Escherichia coli
atggcgcgcattacacgcccccttactaacaacgaaatcctcaaagcgaaaccccgcgaaaaagacttcaccctgcatgatggtgatggcttgttcttactagtcaaaacctccggtaaaaaactctggcgcttccgttatcaacgaccgggaagcagcagccgcacaaatttgagtctcggctcataccctgcccttacactcgcagcagctcgtcagatacgcgaccagcacttaatcacgctcgcgcaaggcatggatccacaacagcagctggagcaagcgtcagtacaacgccagattgaattagacagcattttctcaacagtggctgctaactggttccagataaaaagcagaagcgtcacagaagattatgcgaaagatatctggcgctcattagataaggacgtgttccctgcaataggcgcgatacctgttcaggagattaaggcaagaacgattgttgaagcattggagccaatcaaagcacgtggcgcattagagacggttcgtcgcctagttcagcgtattaacgaaataatgatttatgcggttaataccggtctgatagatgccaacccggcttcgggtgtaggaatggcttttgagaaacccaaaaagcaaaatatgcccacgctacggccagaagaattacctaagcttatgcgttctctggtcatgtcgaatctgtctgttccgactcgctgccttattgagtggcaactcctgacccttgttcgcccctcagaagcttctggcactcgatgggcagaggtagatctcgatgcaaagttatggacaattccagcagaacggatgaaagctaagcgcgagcacattgttcctttgtcaccacaagcattagaaattcttgagataatgaaaccgattagctttcaccgtgcgcatgtttttccgagcaggaataatactcagcagcctatgaatagccagacggccaacgcagctttaaaaagaattggatttggtggtaaattagtggcacacgggctgcgatctattgcaagtacagcaatgaatgaagccggttttaattctgatgttgttgaagcagcattggctcacattgataaaaatgaagtacgaagagcgtataatcgctccacctacatagcgcaacgtattgaattaatgagttggtggggaaaatatgttgctaaaggtattaaccattga

SEQ ID NO: 21803 - DNA, 1107 bp, Escherichia coli
gtggctgtatctaaagaaaaaataaaattttccattgctcaaaaaagatggaaaaacgagctagctcgcaaaactattgattatgatccatacagacctcgcaaaaaagggcctaagaaaaaggatgtcgaatatattcgctttcctgccaatttcagtatttattcagcagacaaagatagagactcatcatatcgagacacgatgaatatcgtgtcagctatatctcgctgcgatcaaaatattacaaaaaaagtgcatttagatttttctcaaacaaaaaacattaaagttgcatcaatattagttctctatgctgcaattgaattagccattaaaaatggtgttaattttaaaatagtctcatttcctcgagaattcaaagcaacaagaacaataaaacgttccggtcttgataagttatgtcgggatggggtttcaatacctgattttgatagtgacttcatacctgtcatcagtggagttggtggagattaccgtgatgaaatcgtagacttcattcaaagtaaaatatataacaatcaaatgtcagcacacactgaaagcatatatggaggagctatccaagaagctattaataatgtttcgtatcatgcttacccaaatattcatgacaataatgataaaaaatggtgggcaaaatgcgacctcgcaggagatcaattatttttagctatttatgatcttggtgttggaatcccagaaacagtgatgaaacgagcatggtatgggaacattttgcaacaaacataccctcaaatttatgataaaattcaatcagaactggaaaaagaaggagtaaccataggagaatttcgctataaatatggtagagttacagatgcaatgaaaattgccatttcaatggtcggagatgtcacgggaactgattccagcaagcatggtcaaggtagtaaaagcatcaaagctcttgtggctgataatgatattggaacgctatggatttatagcaatgatgggctatataagctaaaatctggtagtgttgagaccatagacttacccaaacgtatgcctggcacattgatacagtggaacattaaggttgatttagatgagaattaa

SEQ ID NO: 21804 - DNA, 339 bp, Escherichia coli
atgagaattaaaaaaatcagtataatcaatgactttaataaaaaaccatatggtcgctatccttctgatggtccaggtaatggtgaaaaatttcgtaaacaacaccttgtacctgctttacaagattttgacaaagtcatagtagatttaacaggatataaccgttacggtcgttccttcattgatgaagctttcggcggattaataagagcagaaaatttcacaaaaaaagaactggataataaattagagtaccatcatgatgagctaaaaagctttgaactcttgataaaagaacggatagagaaagctgattatgacacaacccataacagataa

SEQ ID NO: 21805 - DNA, 501 bp, Escherichia coli
atgacacaacccataacagataacactttagaccctaaatatatagcagtgattatctcttcgattatagccgtcctcggatggctattttcctcgtatataaacacaagggcctttagaagagctgaaacatcaaaactcaaagacaaaatagcgtccttgactgaggcttttttcgacggccttgaagaaaaaatgaaatcacggacactaaaggaaagtgaacttgatgattttatcagcggaaaaatatccattattgagttacacctcaaccacttagagagaaagataaatatcaatctcattacagcttcacaattatcaaagattcgcagtgagccttatgattacctatcaacttcaaatggtgattataaaaacaatcttactgagctaaaattcagcacacttgaaatgatcgaagaaagctacacatcatggtattttaaaaatgaaaacatgataaccaactttcgaaaaaaaataagtaaacaataa

SEQ ID NO: 21806 - DNA, 567 bp, Escherichia coli
gtgaccactctgaccttacagcaggcctgtgacgcctgtcagacgaacaaaaccgtgtggctgaaccgtaaaaccgaactggccgccgcaatgcaggaatatcaggaattattgctagatgacaatgcaacgggttcccgctgcttacagatgctgcgtgagctcatcgatataaaaaaatgggagattaatcaggccgccggtcgctatatccgctcacatgaggaggtgcaacgcatcagcatccgtaaccgactgcatgattttatgcagcagaacggtgcagaactggccgctgcactagcaccggagctgatggggattaaaaaccagcctgagatgataaaaaaccgtgcgcttgatcgttcagtagattacctgcgagaagctctttccgtctggctggccgcaggaaatgaaattaattattctgcacaggataacgacattttaacggccatcggatacaggcctgacgcgccttcgcgggatgataatcgtgaaaaattcacccctgtacagagcatgatttatacccgccgacgtgcagaactggccgcacgatag

SEQ ID NO: 21807 - DNA, 246 bp, Escherichia coli
atgatgcgctgccctttctgccgcacggcggcacacgttcgcaccagccgctatatgtctgacagcgtcaaagagagttacctgcagtgccagaatgtgcactgctcggcgacatttaaaacgcatgagtccatctttgaagtgatacgttcgccggtcgtcgatgagaaacccgcgccggtgccgacagcccccgtggcaccccgtcgggtaaaaggctgctacagctcgccgttctgccattaa

SEQ ID NO: 21808 - DNA, 738 bp, Escherichia coli
atgactcagaccgctgttattcccgactaccttaaacctgcaatggaacgccttgagactgcccgctcggcgcatctcgccaatgccagccgtatggatgaaaccacgacggctatcagccaggtgcaaacgcaaaaaaatgaactggagcaggaaaacggcaatgattccggcgcatggcgcgccgcctttcgtgccggtggtgctgtcgttaccgacgagctgaaacaacgccatctggcgcgcgtggcacggcgggaactggcgaaggaatgtgacaatatggctgaggttctgtcttttgagctggacagccttaagggagtctgtgaccggacggccagagcgtaccgtcaggcacattacagcgtcctcagccagtatgcagagcatgagctcgatgttgccctgcgtgatacctgtagcgcgctggtcagggcaatgaaactcaacatactggttcttaataacccgcttgccaataccaccgggcatcagggctatatccagccagaacaggccgttatgcagcaggtgaaagaccgacttgagcaggcggtgaaaggctgcgatatccgtctgaccgatgaaccggtgctgtttaaaacaggactgtcggcctccacgctgccgcatatggagcatgacgttgcggccactcccgttcagcgaaaagtctggcaggaaaaaatgcaggaacgtgaagctgacctgaaggctcgggggttattgtcatga

SEQ ID NO: 21809 - DNA, 267 bp, Escherichia coli
atgcacaccgctttttcttccccgtcttctgcccctgccgcgccgctgatgccggtctctgacgccgttcatgagcgttttattcgtctgcctgaagtgatgcatttatgcggcctgtctcgttcgaccatttatgacctcatcagccgggaagctttcccgaagcaaatctccctcggcggtaaaaacgtggcgtgggcgcagtctgaaatcaccgcatggatggcggatcgcattgccgaacgtaaccggggttatgacgcatga

SEQ ID NO: 21810 - DNA, 195 bp, Escherichia coli
atggctacgaccctcaccctgccacacccgcagtttgtctttgtgtttgccgccgttcgtcgcgcagaccgtaaaccccgtatctgtatgcttcgcaccgttgccggtgatgaacacgctgcacgtctttccctcgttcgcgattatgtcctctcgttcgctggccgtctgccggttgcggaggtgtgcgcatga

SEQ ID NO: 21811 - DNA, 228 bp, Escherichia coli
atgagacacaccaccattactgcccgtgacctcgaatgccttgaacatatgcgcaacgtcggtcagctcgtcagcgaactgatgcaggtgcaggactgtgccactgttcgccgtgacccggcgcagcagttacagctcacctccgtgatttaccttatgaccgcccagctcgacggcatggtcgaacgctgccatcagcactggctgaccggggaggacaacgtatga

SEQ ID NO: 21812 - DNA, 321 bp, Escherichia coli
atgaaacagccattaccgcccgtattacgcgccgcgctctatcgccgtgcagtggcctgtgcctggctgaccctgtgcgaacgccagcaccgttacccgcgcctcacccttgacgcgctggaaagcgccattgctgccgagctggagggcttctacctgcgccagcatggagaggaaaaaggccgccagattgcctgtgcactgctcgaagatttaatggaagccggaccactgaaagctgccccgtcgctgtccttcctcgggctcgcggtgatggatgaactttgcgcccgccatatcaccgcaccggtactgcactga

SEQ ID NO: 21813 - DNA, 2097 bp, Escherichia coli
atgaaaatgaacgtaacggaaaccgtaaaacaggcgtgcggtcactggccgcgtattctcccggcgctgggtgtgaaggtgattaaaaaccggcatcaggcctgtccggtgtgcggcggctctgaccgctttcgctttgacgataaagaggggcgcgggacgtggtactgcaatcagtgcggcgcgggtgacgggcttaagctggtcgaaaaggtgttcggtgtaaatccgtctgaggccgcccggaaggtgaacgccgtcaccggtaatctgtcgccggttgccccggaagcgattgcggccgcagaagccggaaccgatgccgaccgccaggcggcggccgcgctggccgtcaggctcatggagaaaacccgcccggccaccggcaacgcctacctcacccgcaagggtttccccgaccgggaatgtctgatgctcacagccatacataaaaccggcggcgtgacgttccgcgccggtgatgtggttgtcccgctgtatgacgataccggggcgctggttaacgttcagcttattaatgctgatggtctcaaacgcaccctgaaaggcggtcaggtcaaaggggcatgtcatatcatcgaggggcagaaacagcccggaaaacgcctgtggattgcggagggttatgcgaccgcgctcaccgtgcatcaactgaccggcgaaaccgtcatggtggcgctgtcctccgtgaacctcctttctctggcgagccttgcccgtcagaagtccccggcctgtcagattgtcctcgccgccgaccgtgaccttaacggcgacggccagaacaaagccgcagcggccgcaggagcctgcgagggcattgttgccctgccaccggtgttcggtgactggaatgatgcgtttatagaaaaaggtgaggaagccacgcggaaagccattcataacgccatccggccaccggcacaaagtccgttcgacaccatgagcgaggcggaatttaccgccatgagcgccagcgacaaggcgatgcgggtgcatgagcattacggcgaagcgctggctgtggacgcgaacggccagcttctgtcccgctatgaaaacggcatctggaaaaatatccctgccgccactttttcacgaaatgttgctgatttattccggcgcgtgcgtgccccgttctcgtcggggagaatcacctcagtggtggagacgctgaagctgattattcctcagcaggaggcaccggcgcgccgtctgattggttttcgcaacggggtacttgatacccaaagcggcctgttcagcccgcacagtaaatcacactggctgcgcacgctgtgcgacgtggattttaccccgccggtggaaggggaaacgctggagacccacgcgccaaacttctggcgctggctcgaccgtgccgccggtggcagaccggaaaaacgcgacgtgatacttgccgcgctgtttatggtgctggcgaaccgctacgactggcagctctttctcgaagtcaccggtcccggcggaagcggtaaaagtattctcgccgaaatcgcgaccctgctcgccggagaggataacgccacgtcagccgatatcgacacactggaagacccgcgcaagcgcgcatccctgactggtttctcgctaatccgtctgcctgaccaggaaaaatggagcggtgacggggcaggactcaaagccatcaccggcggcgatgcggtctcagttgacccgaaataccagaacccgtactcaacacatattccggcggtgattctggccgtgaacaataacccgatgcgcttcactgaccgcagcggcggtgtgtcacgccgccgggtgattattcatttcccggagcagattgccccggaggaacgcgacccgcagctcagggataaaattgcgcgcgagctggccgttatcgtgcgccagcttatgcagaaattcagcgacccgatggcagcgcgcactctgctccagtcgcagcagaactccgatgaagcgctcagcatcaagcgtgatgctgacccgacgtttgatttttgtggctatctggaaatgctgccgcagaccaacgggatgttggtgatgctgccaacttactga

SEQ ID NO: 21814 - DNA, 354 bp, Escherichia coli
gtggcgagtgcgcaggaaattgcatggacgccggggagcagtcgtattgatggtcatcagggcgaaaatattacctggtctctgtcatcgcagtctcctgccgataagtatgatctcatcaataaaacctcccgtgtttctcctgacagtggccgtttttatgaaccggacacagttctggatcaccgtgaacgggtacgcctttttattcagatccagtttccgcacgggagtgactggtctgaagtattgcgactgactgacattgttacagagaaggtctcttccggcagggctgcaggcgggtatcaccaccggcatacagggtacacctggtctgtttctgtgaattaa

SEQ ID NO: 21815 - DNA, 279 bp, Escherichia coli; identical to SEQ ID NO: 4619

SEQ ID NO: 21816 - DNA, 612 bp, Escherichia coli
atgcttaccacccttatttatcgtagccatatacgtgacgacgaacctgtcaaaaaaatcgaagaaatggtttcgatagcaaatcgcaggaacatgcagtctgacgtaacagggatcttactgtttaatggttctcattttttccagcttctggaaggtccggaagaacaggttaaaatgatatatcgggctatatgccaggatccacggcactataatattgttgagctgatgtgcgattacgcgcctgctcgccgttttggcaaagcgggaatggaattatttgatttgcgcctgcacgagcgagatgacgttttacaggccgtattcgacaaaggcacatcaaaatttcagctaacttatgatgacagagcgctacaattttttcgtacttttgtccttgcaaccgaacaagcaacctatttcgagatccctgccgaagactcctggctttttatcgctgacggatctgataaagaacttgattcctgtaccctttcaccaactataaacgaccactttgcctttcatcctattgtcgatcccttatcgcggcggataatcgcttttgaagccattgtgcaaaaaatgaagatagcccatcagctatag

SEQ ID NO: 21817 - DNA, 279 bp, Escherichia coli; identical to SEQ ID NO: 4619

SEQ ID NO: 21818 - DNA, 246 bp, Escherichia coli
gtgcttgtggtgggaaaccgtcgtattcccggcgcgtttattcagcaactgaaaaatggccggtggcatgtcatgcagcgtgtggccgggaaaaaccgttaccccattgatgtggtgaaaatcccgatggcggtgccactgaccacggcgtttaaacagaatattgaacggatacggcgtgagcgtcttccgaaagagctgggctatgcgctgcagcatcaactgagaatggtaataaagcgatga

SEQ ID NO: 21819 - DNA, 261 bp, Escherichia coli
atggccataaaaggtcttgagcaggccgttgaaaacctcagccgtatcagcaaaacggcggtgcctggtgccgccgcaatggccattaaccgcgttgcttcatccgcgatatcgcagtctgcgtcacaggttgcccgtgagacaaaggtacgccggaaactggtaaaggaaagggccaggctgaaaagggccacggttaaaaatccgcaggccagaatcaaggttaaccgggggggatttgcccgtaatcaagctgggtaa

SEQ ID NO: 21820 - DNA, 1896 bp, Escherichia coli
atggcagggaagtttcgctgcattttgctgttgatagttgggctttttttctcttcgttgagttatgcgaaaaacacggagaacccttcttatgaagaagggatctctctctttgatgttgaagccactctgcaaccggatggggtgctcgacatcaaagaaaatattcattttcaggcgcgaaatcagcagattaagcacggattttatcgtgatttaccacgactctggatgcagcctgatggggacgctgcactgctgaactatcatattgttggcgtcacccgtgatggtattcctgaaccctggcatcttgactggcatatcgggttaatgagtattgtcgtgggcgataaacaacgtttcttgcctcaaggcgactatcattatcaaattcattatcaggttaaaaatgctttcctgcgtgaaggggattctgatctgctaatctggaacgtgaccggtaaccactggccgtttgaaatttataagaccctattttcactcaagttgcctgatattgcgggtaatccatttagcgaaatcgatctctttactggagaagagggcgacacatatcgaaatggccgcatccttgaggacggaagaattgaatcccgcgatccgttttatcgtgaagatttcacggtcctctaccgctggcctcacgctttacttggtaatgccccggcaccacaaacgacgaatattttcagccatcttcttttaccctctacgtcatcgttgttaatttggtttccgtgtctcttcctggcgtgtggatggttatatctctggaagcgcaggccgcaatttacgccggtagatgtgattgaaaccgatgtcattccgccagattacacacccggcatgttacgtctcgatgcgaagctggtttacgacgataaaggtttttgtgccgatatcgtaaatctgattgttaaaggaaaaattcatctggaagatcagtatgacaagaaccagcaaatcctgatttgtgttaatgaaggcgcgaccagaaataatgcggtattactgcccgcagagcagttattactggaagcgttatttcgtaaaggcgataaggtcgttcttacggggagacgcaacagagtcttacgcagggcatttttacggatgcagaaattttatctgccgcgtaaaaagtcttcgttttatcgaccagatacgtttttgcaatggggcggaatggcgatattggcggtcattctctacggtaacctgagtcccgtaggttgggcaggaatgagtctggttggcgatatgtttattatgatctgctggcttcttccttttttattttgttcccttgagcttttgtttgtccgcgatgatgacaagccttgcgttaatcgtgtaatcatcactttgtttttaccgctgatttgttcaggcgtggccttttattctctctatatcaatgtcggagatgtattcttttactggtatatgccagcgggttattttagcgctgttttcctgaccggttatctcactggcatggggtatatttttctgccaaagtttacccaaactgggcagcaacgttatgcccacggtgaagctatcgttaactatcttgcgcgtaaagaggcagcaacacacagtgggcggcggcggaaaggggaaacacggaaactggattacgcgttgctaggttgggcagtctcggcaaaccttggaaaagaatgggcagcacgtatcaccccatcactcacagcggctgttcacgccccggaaattgcccgtagtggcgttttgttttcattacagatgcacctgagcctgggggccaataccagtttgttggggcgaagttattccggtggtggtgctggcggcggggcgggtggcggaggcggtggtggctggtaa

SEQ ID NO: 21821 - DNA, 2121 bp, Escherichia coli
atggcaatgaaggaagtagccagactaacaaacgttatttactgggactctgataaatcctcctggcgaaaagaagttaaacggcttgaggattataaaaaatcctggaagaaagctaccgacgatatagctaaagcggattttaaatcgaatcaggctgtgctcagaacacaaagaacacgcgctaaggtggaagagcagattgccagagctcagaggaaacaacaggaagcacagaagaaacaacgtgctcaggctgtcagccgtctgaccgggggcaacaatgccgaacttaactctatgcgcaagttctatcagcagcaagccagagaggccgccagacaacaaaaactgttagatcgtagtgttggagatgttcagcacagaaaagcacgtgtaggggccaacagtgcacgaatcagcagtatgtttgatggctccttggttgctcagttccaaagcagaatccagagagttaatgctgattatgctaaaggggctatcaacctgcagacctataatcagaggatggcccgactcagatctgaaatgaagatggcaacagctgaagccggaaaattccagagcagactggataaactggcatcaggtgccagcaaggtgcatgacaacctgggcaaaatcaactccacactgggcaagatagccattggccttactgccgctggctggggtgttcagcgtgctgttagtggtgctatgggtagccttgcagatcgcaacagtgcctacttcggtttgatggcacagaacaaggatgataaagccaagactgatcagcagatggcttttatcaagaacacagcctacacctatgggatggatgagcgggagatgcaagggggctacatgcgctttgctgcagctacccccaccatgaaggaatctgataagcaggctctctttgaggctatggctattaaaggccgctcagtgggtgctactggcgagcaacagaacagggcgcttgttgcggtccaacaaatggcttcaaagggaaaagttatggcggaagagctgcggggccaactgtcagaagcctttgcaggctcacaacaggacttccaacaggccgctattgatgccggaatcatcaaaaatacccaggaattcgataaagcccttaaagatggcaaaatcactctggacaaacttcttccttctctggtgaaaatctggggtgcagcaaaagaaactaaagcttttgctgaatccatgaaacagccagaagtagcaatgcagcgcatgaaaaacagctttaacgagctggcgattcagtttatgggtgttgtggatcctgcggatggcgttattagcttatctgaatctctgatctccatcttcgaagacctcaccactgatatggacggcagcgggagcgcggcaaaacagttcggtgaggcagtcggggctgccatgcgtgagatcatgtattgggtaggcttcgctaagggatatatcgaggtcaaggctaaagagttcggcatgaccggatcagaggttggcgagcttatcgggaaactggtagtcggcttagctggtctgaaagttattaccacactgctttcccctctaaccggatttgtttcacttgtcacccaactggtagctctcctgggcaaaatcccgggtatgagcaagcttctagcttctgcctcaggtggaacggcaacaggagcagcggtcatcagtgcaggatctaacgctgaaagaagtttcattgatggcaagacgcaggaaatgagtaaggagaactcaaaacagggtgctttgtttgagctgggaagatttgttagcaatgctggcgcactgttcacacctggcggtgatactggtcctttgttcgatcaggtcagaggctggtttaataaagggccaacattgacagtagacactggcatcagacctacaccaacaggcggcatagctatccagaatggtggatatcaaccagtccaagtaaatgtagccccacaaggtgagatttccggcaaatgggagataactattgatgaggggggaattgccagggtgattcagaaggaagtcagcgatcagttggattggaaagccacacaggaatctaaccagcttttctaa

SEQ ID NO: 21822 - DNA, 237 bp, Escherichia coli
atgaacacctacgaaaagatttatcaaaaactggttaaggactccgaagacacgcccgaaggggtgacaataggtcacctgccagaggcagcgaaagaggggtccaccattattaaaagtggcccacacacagaaggcctctcaatcgaagagctggcggagaaatataatattgataaagaggccctgaaaagggctatttcattatcaaaatctttaagacagggcgaggtataa

SEQ ID NO: 21823 - DNA, 384 bp, Escherichia coli
atgaatattgaagaaatgatagttgaattcgaagagggtgatttcctggaagaaggggagtttaaatactcccgttttaaacaggcgttatttagcagcgaggataaaccacacgttagtgatcttaatgatgatgatttatgtcgcttggtgtgcacccgcttatatgaagatggaaagtatacaggccaaaactttccaaatctctatttcaaagcacaaacatttgaggaagggcaaagagtgaaaaacctggtcgataaaatgctgtcagccggatatttgcataaagaattattaaatcctaaagctgaaagcaagcgccattatatttttgtgtggactattggcgataagtgtccactaagacgcaaaggcaaatga

SEQ ID NO: 21824 - DNA, 444 bp, Escherichia coli
atgtctcaaatcgctaaattattatcccaggttatcaaagctatcgacgctgaagattcaaaagttcgccaggatcttttagatggcaagtttaccaacaccctggcatttacccgtgacaaagagcacttcttaaaacacagacaccacgcttttgctgaatgcaagtccgctaatggtgatgttttctatgtcgatttggtggttatggcatgtaggctgtggatgattcaggaccttatgcgccaacacggtgatgatcctcttatcagcatgtggaacagcgcccaggatggctttgtgattgctgccttatccaaatcaatgattgaggcagaaggggcaagccttcagaacatggcagatctctttgaaataagcgtaggaatgatgcagaccatgctccaagctgtcaaacctctcaaactggttaatcttgattaa

SEQ ID NO: 21825 - DNA, 489 bp, Escherichia coli
atgttcaaatctgatctttctgattcccaatttgaaaaactggtagcactgcagaaatatctccccagtgatgatcaaccaacacgacaggctaaacacttattagtcgagggctttacccctgaattcgtggctgaatacacaggcgttaaacttgagaaagtccaaaaactatataatgagtcctggaatccacggtgtcgagttcccctcagtgtctacaacgaaatagatagagatagaaatgtcttcgaagatcgccgccgcaaatctcttttaatgtggaattgtgggatgaatattgaagagatagcaaaagaattaaaagtaacctgctttcatgtctggggcttgttgagtgaaatcctgccacgtaaggagcttaatcaacgtttgcctaagcccggtagtcgtgcttatcgtgaatttatattcatctaccgccgccatagcaataaagtccggaaagcaatggcccagaaagcctaa

SEQ ID NO: 21826 - DNA, 147 bp, Escherichia coli
atgtatggcgattttgattattacctggaaaaggaaaaatattttgaagatgaactatcacaacatttttcatattgggaagaatattgtggttggttagctgaagatccagcagatgaagaaaatgattctgatatcccttattaa

SEQ ID NO: 21827 - DNA, 897 bp, Escherichia coli
atggcaagtaattacggggaggtttttaatccccatttcgaacgcctcattcagtatacttttgataaaccagttgcaacaacaattgctaataaaaagactggaaaaacaaaagaaagatttaagttagacctgacggaggttacaatttatggaaaaatggcaggttttcatttaaacgggcaagaaatatttatctcagagcagaccttagcaaaaatatgtggggtgagcgatagaaaaatccgtgattcgattaaatctctagaaaatgccgggcttatttctaaagataatcggaaaggcatgtctaatatttacaaactactaattactccttcacaggtttgcaaaatgtgtgacgctcaaggaatacaacctatgagcaatgcaggtggtgaagataaacagcctcaggaagccccaaaacaagccgcacagcaagctaaaaaggctaaagtagtgcaattgcctacccaagacactaaagcgcctcaaattaacgctgttagtgacaagccacgccggggccgtcctgtgaaagatgtaaccgatggagggtggatcaccctgggtgagagtgaggctaaaggcataatgcgatcactgtgggaaagcaaatacaaagatttaaacaaacgtcgcccgatccttttgtcaaagattcaggaggatttttacaccacagaagaggtaagccaacataaagggaaaatagagggtgaaatctggaaaccggaagaatactggcatttaaccagacctgtgtttatttttgcaaataagcttattgggatgggatttgaaatattgttagataaaacctgcggagattatcccgaaatattgtggagaaatgttagaaaaaataaaaaaggcattttagagtttaaataa

SEQ ID NO: 21828 - DNA, 216 bp, Escherichia coli
atggctaaaaccggacccatcagtcagttggtaaactggactactgacgaaatcgtcgagaacgtgcttaaagggaactttcgaaaaacttccgtttatgcatttattcgtaaacacaaaggagaatatccacacattgaagcggcaattttagaactgaatcgtctccgccttgagcgtgagctggctaaatacaccaacaacattaataaataa

SEQ ID NO: 21829 - DNA, 201 bp, Escherichia coli
atgctttatattttatcagacattcgtcaaattgtcaacaatctttttgtatttatctatcattttttcttcgagattgtcgattgcagttactccggctatgtaggcaacaccgcaccacagtacagccaggttgatgatcgctattgcatcagtaatttccacattgacctccggatctgtttctccccctatttataa

SEQ ID NO: 21830 - DNA, 588 bp, Escherichia coli
atgaacattaaaactatcattgcagccatcaccattacctttagtgccaacacagccgctattgatgtaggggccgtaaaagatgcatcttgtactgataaactggcggcacttgatgcaggattcgatgcaccccagggctatcaaatggggctatctcttaaaaatattattctccctatggaatctggcgcttatgtatacggagcgataggaaaactggagaagccggaaattgacctgcagggtgtgagagcgaagatcacaaaaagaaatgaaagcctttgtgatgtagctgaaatagctttcatgtcggacgatgaaaaatctattttagccttttgcaaagatagcgatgataatgatcgcttctttaagatcacccacaacaggccaatctctttctactctaatgccactatgggcgcgggtatgcagtggctgaagagagctaaagtaactgagatcgacattgaaaaagaggccaatgcgggcagttatggattctggaaaggctggactggatacacgttccaacaatgcggcatcgatagtcaggcctacgataacggattttggtttttctaa

SEQ ID NO: 21831 - DNA, 261 bp, Escherichia coli
atgacgggggctaaagatatcaggagactgagggaagagctgatagctgaaattaaagcgaaggcaaagcaaatggagatagccgcacaaatggatgtagcggaacagatgtacaagatggttgaggagggaacaccacgacaggtcatcgctaaaaccttcggtgtggggatcgccaccgtgcacagaaggctaaaagcctatgccgactaccacaatatcgaaagaaaggaggatgggagatttaagaagaataaatag

SEQ ID NO: 21832 - DNA, 123 bp, Escherichia coli
atgggtatcaagaacagtgccagcgcatggcaaaaggccaggtttcatcacccacacattattaaggcaattgaggtggttggagtgttagccctgatgttagctctgtgtgtggaggtgtga

SEQ ID NO: 21833 - DNA, 336 bp, Escherichia coli
atgagagatatgactatccgcacacgcggacacatcatttcatacgccgcagatgagcaatttagtattcgcgacgttgaaattaaaaacaaagttaagactgagattccggctggcactgttgttgtggtgactgaggaaggcgaggttgaaacattcgttaaagcaacgcacaccggtaaaactccgctgctggttgtagaacgtgctgaggttggtgatgcttttatcgttgttgccaacaagggctgttatatcaatccggcctacgtggataaagaaggcttagccgctgttatcgctgccagcaatggcgatttgcgtgttgcacaataa

SEQ ID NO: 21834 - DNA, 1032 bp, Escherichia coli
atgaaaaaagaattcgaagtccgcgatctgtgtggcttgattaaagacatcccgctggataaccagattatttcagcaatggatatcttcaacactactgctctgtgcaatacctttaaatttgaatatgacaaagttcgccaggtgaaacaaaccgctttcggtcagtatccgcgctacggtgaacagatggcgaccattaccgcagatgagcgtgaaacgggcacgggtgatatggcattcactgccgcatcaagtgctatttatccttctgactggcagggtattcgtgttccgggcaaagattccgaagagaatttagagtctgtaaccgctcgtcgtgttattcaactgggtgaaggactacgcgcgacccatgaagaagcacgccagcttgctctctttgagaacaaaattatcctcaccaagggtaaagaactgaatgtgtgcgaactgctgggcgcacagcaaaccacctcagaagtggatttagctaaagatatccttaaacagctgcaggacctggttgcactgagcaaggttaaacagcgtggtgttgttcgcgctctgcgtggtttcaccctgttctgccgtgctgagctctttgctgcaattcagactgatgaactgttgcgaaaagtgctgttgttcggcaatcagaatattaccgataaaggtctgatgttccctgaggatattctgccgggcttcccgaccttccgcattccgggcttagccctgcgtgtggtgcaaatggatagtctgccagagaatactgcttatctggtcccacagttccagccgcatgcgttaggcgatatggtgggcgtttatactcaatttttcggcccttgcgctcgcaacctgaagcttgcaaacggcgctgcacgtgaagctttcatgtatatggaagagtccagaggcaaacgcgaaatcttcgttgaatcctcttatgctttcatgaacatgatgcctgaagttgtggttaaagtgagtgttaaaaacaccgccgccgctgccaaggctaaataa

SEQ ID NO: 21835 - DNA, 252 bp, Escherichia coli
atgaaaattgttttatacggcgaccgtgacgacgtgccttttgatattatccatatcgatgacgaggatctgccggaattcctgcgtatctccacatttgccgcctgctatgacgttagccgccaggctatgcataaataccgtgaatataataaatgcacctgggccgagactttcgaacattttattgcacgcaaacaagcccaggaccgcaaaaaagccctgaatgcccataatcgttttgcaaaataa

SEQ ID NO: 21836 - DNA, 804 bp, Escherichia coli
atggctagtgatgctctgacagctgcaaaacaagctgaatcgagatctcctgcattcactgttatgtgtgggggatattcacaaaacaaaaatataatggatggcttcaactataccgataacgtggctatcttctttgactcaatctctgatgtcagctattcgttccctgttgagaaatcgagctatgcggtcgaggatggcaccaccatgtcagaccatgccgtcattaaagataaatctgtcagctttacgggcattattacctcttcccctcatatcatccggaaagagaactacatcgaccggaacactgatccagataatccccttgaatctatgcgccctgctgccgctgttcaggcacttatagaaatgagagacaagcgccagctagttagcctggttagtgaagatgccggactccttgagaacttcatcatgacgaaatgtgaagttaagcgtagctcttcctctggtgactgcatcactattgattgcacttttgaagaattccgcaccttcaaggtgaagatggtcgaaaatgccggagttttcactaacagtaagaaggtgaataaaacacagcaaaagggtgctgttaacagtgctaaagagggtagcaacgctggcaacgctgctacgaaatccaccagggctaagcatcgcggggaatatgcacagggagaggctgctggaaagattgccgcaggtgataagtctgttgtgtcgaatgagttccacgaaacgatgattgataaggccaacatgttgctcgatgacatcacggagatcaacaaatga

SEQ ID NO: 21837 - DNA, 459 bp, Escherichia coli
atgagtccgaaagtccgttgcaccatagacaagcgcatgatggataagctgcataaagagctctcacagatggaaggtgtagcggttggctgggatgacggaaagcactatagcggcctgaattacgccacactggcggctatccactctgaggggtggggtgatctgcctaagcgctcctttatggaatctgcccacgctgcaatgctctatgagagcctgagacacacaaaagccctgattaatgcaatcgtaaagggtggaagctctgaggccgtcagaaagcgaattggcaagcgatacgccgacattctggagactatcctgattagtgggcaattcagcaataacaaggtttccccacaatgggcaagctataaaggcttcaatgatgcaatgcgccactatgatgatttgatcggtgcaatcaaatactggtcaaatgtggggagaggctaa

SEQ ID NO: 21838 - DNA, 1797 bp, Escherichia coli
atgagtaaggtctttatttgcgctgctattcctgatgaacaggccataaaagaagatagcgctgttgcggtggccactgccattgaagctggtgatgagcgtcgcgcacgcgcaaaatttcattggcaatttctggagcaattccctgcagctcaggactgcgcttataaatttattgtctgtgaggataaacccggcataccccgccctgccctcgattcctgggatgctgaatatatgcaggaaaaccgctgggatgaggagtctgcttcctttgtcccggttgagactgaatccgatccgatgaacgtcacttttgacaagctggcccctgaagtacagaacgctgtcatggttaagttcgacacatgtgaaaacatcaccgttgatatggttattagcgcacaggaattgttgcaggaagacatggcaacattcgacggacatatcgttgaagcgttgatgaaaatgccagaagttaacgccatgtatccggagcttaagttgcacgccattgggtgggttaagcataaatgtattcctggtgctaaatggcccgaaattcaggcagagatgcgcatctggaaaaaacgtcgcgaaggtgaacgcaaggaaaccggaaaatacacgtctgttgttgatctcgcccgcgccagagccaatcaacagtacactgaaaattcaacaggaaaaatcagcccggtcattgctgccattcatcgcgaatacaagcagacatggaaaacactggatgacgaactggcctacgctctctggcctggtgatgtggatgccggaaacattgacggcagcatccatcgctgggcaaaaaatgaagttatcgacaacgaccgcgaagactggaagcgtatctcggcatcaatgcgcaaacagcctgatgcccttcgctacgaccgccaaactatttttggccttgtccgtgagcgtccgatcgacattcacaaagatcccatagcactgaacaaatatatctgcgaatacctgacgacaaagggcgtgtttgagaatgaagaaacagacctgggcactgttgatgttctccagtcatcagaaacacaaactgatgcagtggaaactgaggtatctgatatcccaaaaaatgaaaccgcgccggaagctgaaccatctgtagagcgtgaggggccgttctatttcctcttcgcagataaggacggagaaaaatgcggtcgcgcaaacaaactttctggtctggataaggcactggctgctggcgccactgaaatcacaaaagaagaatattttgcccgaaaaaatggcacatacacgggcttaccgcaaaatgtagataccgctgaagattcagaacaaccagagccgataaaagttaccgctgacgaagtaaacaaaattatgcaggcagccaatatcagccagcctgacgccgataagttgcttgctgcatcacgtggtgaatttgttgaagggattagtgacccgaatgatccgaaatgggttaaggggatccagacccgcgattctgtgaaccagaaccagcatgaatcggaacggaactaccaaaaagcggaacaaaacagcccaaatgcgttacaaaacgagccaggaacgaaacagcctgaaccagtggcgcaacataccaggaaacattcgatgaagagtatcaggttgaagttcaggaagatgatccggaggaaatggaaggcgctgaacatccacacaaggagaacactggcggcaatcagcatcacgatagcgataatgaaactggcgagacggcagatcgctcaattaaggtga

SEQ ID NO: 21839 - DNA, 366 bp, Escherichia coli; identical to SEQ ID NO: 7050

SEQ ID NO: 21840 - DNA, 159 bp, Escherichia coli
atgcgggtactggtattggatgcggtaaacggcggagagatcattgagaggtcattctgggattttgacggaaaaattattgcgttgccacaggtgcgtaaaaattacccttttgagggggttgtagagtggcatcggaaagagttttttagggggtga

SEQ ID NO: 21841 - DNA, 246 bp, Escherichia coli
atgttttctataaaaccaggaccaggaaatttacctatcgacaaccccacattgttatcatggaacattactgacggggatctaaattccaaattaaatacattagaatatctaaactgtataacaaatattattaatgcttgtggagtttatcctcaggatttaaaagacagagaaattatatcaacttttcacgtagactggccccctgaatctccagacaaccaatatcacttaaataagtga

SEQ ID NO: 21842 - DNA, 264 bp, Escherichia coli
atgtttataggtaatgccagcatcgtcccgcgtaattaccgcaaatatctctatcacgcgtatctggcctatatggaagctaacggatacaggaacgtgctcagcctgaaaatgttcgggctggggctgcccatgatgctgaaagagtacggcctgaattatgagaagcggcacaccaagcaggggatacaaaccaacctgtcgctgaaagaggaaagctacggcgactggctgccgaagtgcgacgaacctgcaacaacataa

SEQ ID NO: 21843 - DNA, 255 bp, Escherichia coli
atggctagagatgatccgcactttaacttccgtatgcctatggaagtaagggagaaattaaaattcagggcggaggcgaatgggagatcaatgaactccgagttgttacaaatcgtccaagatgctctatcaaaaccatcgcctgtgactggctatcgcgacgaagctgaacgcttggctgatcagcaggcagagcagttcaagactgttgtgtttgagacacttaaaaagatttatggcaaggatgataaataa

SEQ ID NO: 21844 - DNA, 240 bp, Escherichia coli
atgatcagtttcagtcagtactttgttaagatattcagtgacgtgtgcggggataacctcgatcccaattggtgcttcttttacggacgcaaccacgatggcgcgggaataatccagcccgccaggcatggtgatgaatttgtcgcggaaaacagaaaagggcggtttattttcagcgataatttcctcgacacgtttagcgtgtgccggatgaaggttataaatgtccacgtccattga

SEQ ID NO: 21845 - DNA, 237 bp, Escherichia coli
atgaaggtacaggcaactacaaagcaaatggcgatggccatggtttatctgcaacttacactattgacggtttctcatttgctggtgcttatgcaaactctgaccgtactgattggcagtctggtgatggtaaaggcgaaagagccgaagtttgggcgttgtcaacaaaatatgacgctaacaatgtctatgctgctggatttgcccctatatttccagacacctgttatcacttaa

SEQ ID NO: 21846 - DNA, 399 bp, Escherichia coli
atgcgcatcagcaacatcgaatggctgaagaaacggatcggattcatcaggaagctcggagaacagaccgcacgacagagacagattattgacctgctcgacaacgaagcaggactcacagaacaggaacgcaaactcctccacgtactggcaacagcggaaaaaaacgacttacaggcacaggagagcgaacgaaaacaggcggtccaaaaacgaatcgagggaaaaaaacaacgacgggaacgcaatcaccggctctttctcgcggctgggctactgatcgaagcaggactggtagacacaaaaacaggcgagctatgctataaaaaagacaggatattacaagcacttaaggaacttaagtacgatctggagacatccccaaacccagacgcgtaa

SEQ ID NO: 21847 - DNA, 588 bp, Escherichia coli
atgcattatggcaaagttaaaattgtcgatataagcgaatccgtcgtaagtcaatatctggaaagtcagcataagctgacgaggactcgtctgactgacattccgctttacctgttgctggaacccaacaatcctgcgttggctgcggctttaattaccagccagggattttccggagaggccacggatatgtttcttatgatggcctgcctgtctctgtttgaaacagatgaacggatgtcattgtttttaagtggatgtttatccagcataagtgccaaagtcagggcgataattcagacagatatatcagcaagctggacgcttggtgcgattgctctacagttgcatatgagtgagagtttgttaaagacaaaactgaaaaatgaagggggcatgttcagtcgcttgttgctggaagagcggatgcgtgttgctgtaaatatgttatgttcccggcatggatatggacaggctatagcagaaaaatgcggttattcaagcaggtcctactttatttctgtatttcaccgctattatggcttcccgccagacagatatgtatccaggcaagggcttgattattga

SEQ ID NO: 21848 - DNA, 198 bp, Escherichia coli
atgctaaaacagcaggatatgaccgaaaccgccagagtggtgtttaatgagttaagcgtcaccgaaccggcgacagtcggggagattgcgcagaatacttacctttcacgcgaacgctgccagttaatactgacccagcttgttatggcgggtctggcagactatcagtgcggttgttacagacgccttcagtcctga

SEQ ID NO: 21849 - DNA, 552 bp, Escherichia coli
atgatttacccaacaaatacaggcaaaagcggggaacaccttcgtctcaccacgctggaaagtgtctggattcagggaaaactgcgcatgtgggggcgctggtcgtatattggcggcggtaagacgggaaatatgtttaaccggttactggtttcgaaaaagctgacgaaaacagcagttaatgaggttttacgcagaatgaagaaatccgggctggaaaaaccggaacttgaggcattttttcgggatatgacaagaggaaagcagaagagctggttgtcacattgtacagacacagaggcgttgattattgatcgcgttatcagtgaggtgcttggggaatatcccgggctaatcaatgttctccggcaaaggtacgaaggacggggaatgagcaaactgaaaatggccgaaaggttaaatgcagatcatcctgattggtcgttggttacgtgcagacgccgaattgatcaatggttgggggtatctgaatttatgttatatgcccccatgcgcatggcttttgttacagagaaaaatgttgcaaactga

SEQ ID NO: 21850 - DNA, 678 bp, Escherichia coli
atgttaattacccatatagctcataaacatctcaatcgtgccgtatacgaaaaaggcggtgatggtggtgcctctaaagctcaggcgaaggcccagcagcaggcaattgatttgcagcgcgagcagtggaatacggtgatgaataatctcaagccgtatgcagaagtcggattgcctgctttacaacaactgcaaggactgatgactctggaagggcagaataaagccgcgaatgatttctttggttctggtttatataaaacacaggcagatcaggcccgttatcagaaccttgtctcagcagaagctaccggggggcttggctcaacagctaccagtaaccagttatcttccattgcgcccatgctttataacaattggctcagtgggcaaatgcaaaattatggaaacctgctaaatgtcgggatgaatgcggcatcagggcaggcaacggcagggcaaaactacgccaataataccggacaactcttgcaggggcttggcgctattcgtgcaggtcaggcgcagcagccatccagtcttgcgcgtggtattggtggggcagcatcaggcgctttagcgggtgcgcaacttggttccgttgttcctggaataggaactgcggccggcgctattggtggtgggcttattggtcttgttggggggcttggattctaa

SEQ ID NO: 21851 - DNA, 1320 bp, Escherichia coli
atggcgacatggcaacttggcgggctgcctagcatggcaccgcaaaatgataatgctcctcgttcttccgttcctcagcctgtgcagtatcagcagcagccaaacgtaggtttaatggcgctacaggggctaagaggcgttgctgagattaatcagcaggcgcaaatttcccagcagttaaaagaatatcaggcacggttgggtagtgcggtagctaataatgatcgtgttggcgtgcagaagttaatggcccagtatccccagtttatggctgattctcaaaaacagatgggattcattgatgctgagcaaaatcgacagaccgctgacgctgccatgaatctgcgtcttgcgtcacaaactggagatccactgatcatgcagaaggccattcagcaggcaaatccagtattacagcgatttggtcttcctgctgaagaggtttatcagtcttggcagaatgacccacaggaattcaacagaatcactgacctcatccacctccatgctgatccaaatagttactttagtgttcaagagaagcagcaagggcagagcattgcacagcagaacgcagatacatccgcatataatgctcaggttaatgcggaacagggtaatcgacgtctcgatatggagcagttcaaagtcctatccgataaccaactacgcacgagagaaatggttctgaaagcacgacttggacgtgctcaaaatgacatcgagagagacaagctcaatgctgaactgagcaaggtacagcaggcgaaagtggagaagatgaacgataaaattaatactgttgcaggtaacatcgactccttgaactctgcgcttgaagtgggtcatgaactggcgggaattgtagggaaacatccttcggccgttacccgctcgcagaactataaccccctgacgctggggtttggattccttcctgatgtagcagaagacacacgaagcctacgcgccaaagctgatgaatacaacctaaaggttattctgcctagcctcaaagggacttttggctctaacccaaccgaaggggaaagggctgcccttatgcaatctcaaaatggcattaagtcagcaaccagcaatgaggcatttttgcgagagttgaataaagcgcaggacgtaattattcgaatgcagaaacgacagattgccgggctcggtattcctgtaaccaaatctaaggacgaagaaactgataccaaaatgctgttgcaggatccttcactggttaaggattatgtgaccgcacatggctatctgccggaaagttactatcaggcaaaacttaagggatggcaatga

SEQ ID NO: 21852 - DNA, 2721 bp, Escherichia coli
atgatggcacaactgacagaaaaacagaaagcctattcccgtcatctcgatgaaaaatatggtttcccatcagggacgatggaaacattagttggcaatgaatctagtggtaacggaagtgccgagtcaccgaaaggagctagaggatttgctcaactgatgccctcagtaatgagtgatgctggttatcgtggaacagatccgcgctcactgccatttgaaaagcaaatggatatcgcagcaaaccatctcaataaaggaatgaagcgatttggtgatataggtatggcattggctgggtataattctggctatgctcgtattaatgccgtcagaaacggtaaatctacactgccagatgaaacggctaattacgtaagtaaatttgcagatgccggaataatccctgatgacagtgaaatcttgcagtttgcacaaaccagtcaacatcgcaatcttcagcagcctgactactcagagcttgataaagaaatctctcaggtgggagatatttctgcatgggaagcaaaacgtcagcaatttaagaacatagaagcaggactaccaacagccagttcatgggagcagaaaagagctcagtttctcgccgatgaaaatgccggggaaccgcagcagcaagtagccaagtctaaccttaatcctgagatggaatatctttcgccaggactgaaagctgcgccagagcagatggccagagggattgctaatataccgtttgatgtaatggacgcaggcgtgggggtagtcaatgcggcgcaatcagccggagcatgggcagctcagaagcttggtgtgggtgatggcacatacacgcccatatcacctgtctttcgcccagtagaccaacctacagatccatacgcgcaggctggtgagcagctagcaccttaccttattacaggattaggtgcaggaaaggcagctaccgcagcttcttcagttgccaacgctccacgtgctgaacgtgcggccacaaaggtggctagtatgttggcagaaaacctgccaggtacattggtgaacgcccaaaagaacgggcagatcagcccagaagacctagcaaaagagacaggtattggcctagcaggatcgctaggagcacgcgctttaataaagagcggacagacagccagtgacgtaatgcgagatgtattgcggagtaatacaaatcaatcaggccatgtgttaggggcagcaaatactctggaaaccgccaatgatgtatcgaaagcagcgcgttctgccgtaggccgagagcatatcgcatcgcaggcatcaaacgtcagagatgatgtcgctaaggcggcgaaaatcactggtattaatatcaacaccctgacgcctggaatgcgctcaggtagtcgtggaattgcccaagcagaaggtgttctggcatcaactcctgggaatgttcaggatgctcaccttacggccttcaatgaaatatcctcaaagttgaataagcagttgtctgatttcggtgctgagtctggaagcgcatcagaaaaaagcgcagcaattaaagagcgcatcatcgcgagcctcagtgatatgaaaacagcagagaatatggcatgggcagaactgcgaagcacgatgccacgcgaaaggatgaaaatgagtaatgggatggctgtcgtccaagcagaaaaagcagccaatgttccactcagcccggagatgaaacagtttcaggctgccaacaaccaaggtggcggcataaccttcgacgggatgaaggcatggcgtactaagtttgctgatgctgaacaagcaaacacccgggcaggtaaggccaatgccgcccggattgccggagaaatgcgcagagctatcactgatgacatgcgcatcatggctgaaaaaggaaacttcctcacagaatggcagaaagctaacgatctctctaaaagttacattatcgccaaacaaaatgccgaatctgtttttggtcgagatctcgcatcagacgctatggtaagaaaaggtgccgatacgcttaaggcatccgcaaacactggaacgggagcttttcaccgtcttatctccgcgctgccggaagcagaacgccaacctgcaatagcatctattcttcagcatgctgtggcgcagggagagaagggaggaatcggtgaagagtcaggtatccagtattttgccaagctcatgacccagcagaatgtaaacgccatcagtcgtcatgcgccagatctcggtagaatgatgaaagagttcggtgtactcgctaaagccagtaccagaccgcagcgatacgtagagcgcacgggaagaacaactgaggctctcaaaacgctcgattcaggccttccaaagatcgtcggcgtgattatgaacggagttcaacagtcaggtgcgatcgctggaggctttggcggtggtgtaattggttcgataagtggtttggttgctggtggcgcgctaagaaatgctgtggctaagattggggcgacaagaagtggtcgatatgcgatagagaaagccgttcaggaagctacaaaagcagtgcgcgcaggggcatcaccagcagcgatcgccgcagcagagaaacgattttcggccaataaaattgccatgaaagcaattcgtgatgccgttggggctgaagaattcgtgaaactgacaagggccgggattgtagctaccctcagtggcatgaaagatgttagcgaatgggaatag

SEQ ID NO: 21853 - DNA, 183 bp, Escherichia coli; identical to SEQ ID NO: 17660

SEQ ID NO: 21854 - DNA, 3516 bp, Escherichia coli; identical to SEQ ID NO: 4891

SEQ ID NO: 21855 - DNA, 132 bp, Escherichia coli; identical to SEQ ID NO: 14458

SEQ ID NO: 21856 - DNA, 210 bp, Escherichia coli
atgctgtcgctggcaaaagagatgaaaagcgtggttgacaacacatcgaaatatcctgactggagtaaacgcgatgatattaaagcgaaactgaaagttgaacttattctgcttctacacaagcataagttcccgccagtagcgaatgatgatgtttatatggggggactggcgcaagcagagaactttaagaaaaatcacatgagttga

SEQ ID NO: 21857 - DNA, 699 bp, Escherichia coli
atggaaaacagagaggaatttctcgttgcgatcgccagaaagcttggcagaccagtaagacatattcccgaagcaatgccggagcctgtaaatacgctggctacaacacgtttaacagagttgacatcagaccaacgctgtgaggcgtttattaaatttgcctcagaagtgatgcttgccgagtgtgttctggtgtcgcctgaaaacgcaccatcaaaagccttagacatctgttggaagttcggttccgggccagtcattatcagcaacgatcaacgactggtcgatacagggattacgccattgctacaaaaagaaatgggcgctgctctgtgggatccggagaagggcgatgaaaatatccatattgctgaaaaggcaaaaactggtgtcgttttcgctgagtatgggctgacagaatcaggaggcattgtcttattctccgcaccagaacgtgggcgctcagtaagccttttgcctgaagcatcattatttgttttacgtaaaagcaccattctccccagagtggcgcagcttgcgcaaaaacttcatgatatggctcaggaaggacaacggatgccgtcctgtataaatctgattggaggcccaagttctactgcagatatagaactgatcaaagttgttggcgtacatggtcctgtacatgcaacctatttgatcattgatgattgcgcttaa

SEQ ID NO: 21858 - DNA, 1416 bp, Escherichia coli
atgtctttgaaaacaagtgatatcaggtttaaagagcgtatccgtattcagattcaggacccgatcatgcgaaaagctgtggctaacgcacaggagcgcatagggactaatcgacagaaaatggttgatgaactgggactctgggaggaatggcgttcacgagctgaacagattcgtcggcatgttctggaaaatcttgatgcttatttgtatcaattgtccgaaaaagttaccgcgaatggcgggcatgtatattttgcccgtaccagagaggatgcaaccagttacatactgaaggtggcgaaagaaaaaaacgccaggaaggttgttaaatccaaatcaatggtgactgaggaaattggcatgaatgccgttcttcagaaagccgggatacccgtgattgaaacggaccttggggaatatattcttcagctagcacatgagccgccatcgcatgtggttgtgccggcaatacataaggatcgccatcaaatccgcagagttttacatgaacatctggggtatgacgggcctgaaactccagaagcaatgacattgttcatccgtgagaaaatcagacaagattttctgagtgctgaagttggcgtaacgggatgtaactttgccgttgcagaaacagggtcagtttgccttgtgacaaacgaaggcaacgcacggatgtgcaccacattacctaaaacacatattgctgttatgggtatggagcgtattgctccgacattccaggaggtggatgttctgattaccatgcttgcaaggagtgctgtcggggcgagactgacaggttataacacctggcttacaggccccagagaagaaggacatgttgatggtccggaagagttccatctcgttattgttgacaatgggcgttcagagattctcggctcagaattcagcgatgtattacgatgtatccgctgcggggcttgcattaatacctgcccggcttatcgtcagattggtgggcatggttatggttcaatctacccggggccaatcggcgcggttatttccccattgcttgggggatatgaagactttagggatttaccctatgcctgctcattgtgcactgcctgcaatggggtatgtcctgtaaaaatacctctggcaacgctaatacaaaaacatcgccaggttatggcagagtctgaaatcacaccattaacggaacgccgtataaccagagcattcaattacataaacagccatccggcgttgtggaaggtaggtatggttgctggggccaaaacagcccgtctgttcatcaggaaaggaaaaacgccgattagtgttggagcgataaaagagtggactgaagccagagacctgccatcacctgatggagaaagcttccgtagttggttcaagcgacataagaaggaggggtaa

SEQ ID NO: 21859 - DNA, 720 bp, Escherichia coli
gtgaatgttaactttttcgtcacctgcattggtgatgcgtttaaatcccggatggcacaaaagagtgtgctgttactggagcaattgggttgcaatgtccatttccccgaaaagcagggatgttgtggtcagccagcgataaatggcggttatgttcgtgatgccatcccaggcatgaaaaatctcatatcttcgctggaagagaatgactggccggtagtatctcctgccgggtcatgcacttacacgataaaaaattacgctcgctatctcagtgaagaacctgagtgggcagcacgagctgaaaaagtggctgaacgcctgcatgatttgacatcatttatagtaaatcatcttggcatcacagatgttggggcaaaactcaatggtcgcgctgtgtaccatccctcctgcagcctttcccgtaaactgggtgtaaccagagagccgcttttgctacttgagaatgtacaggggcttgagctactgccgtttcacgctcaggaaacgtgctgcgggtttggcggcacattctctgtaaaaatggcggagatctctggtgaaatggtgaaagagaaagttgggcatattatggatgttaaacctgattttcttatcggggctgacgccagttgtctgctaaacatcggcggtcggcttaaccgtgaagggcatcctgtaaaagtgatgcatattgctgaagtcctgatgcacagatga

SEQ ID NO: 21860 - DNA, 795 bp, Escherichia coli
atggcaaaaaaccgtaaagaaaaaacagaacctgaatttcttattgatacttcagcagatagcgccagcgcactttcatactctcgtggggcgttgttacgtgcgtgctcaatctacatcctgatttttctgttcattctgctttgctctccactgttcccgacgataaaaagtgcggtgtctcagattgcctcgtcactcagtttctctctgagtaacggcagcaatctgtcgatgaagattgaatggatcgcaacccccggtgttctgattatcattgccagtgttattggcggcttgatacaaaaagcatccctgtcatgtctgttaaacgtatttatcagtacggtaaaacagctcaaaaactccattattgccatttctgcgattgttgccatggcaacggtaatggatgtttgtgggttaattggcactctggcacaaagccttgtggatctcactggtggagcctacctcttcattgctccggttattggcgctcttggtacatttgttacaggcagtgacacaaactccaacattctgttcggtaaattgcagaccactgcggctgaaaaattgcatgtggacccgctctggctggctgccgcaaatacatctggcgcaacaggcggcaaaatgatttctcctcagagtattgctatcgctgtttcagccacccgtatggatggtcagggcagcgtaatcatgtcaggaacactgaagtactgctttgcttatattgttattcttggactgaaagtaggccttgtctaccacctgttcatggcctga

SEQ ID NO: 21861 - DNA, 249 bp, Escherichia coli
atgatgctcatgatcaaaatcagcatattgtttgagctgctgacaggtcacggcccaaaaccaacgaccgactttatccaggcgctcccgagcttcatcaagccttattttaaggatatcgtgaatatcttcatcaaaatgctcaagcaactgttcttgcgtcttctgcatcttgagattgatttcatcttccagctctttctgcaacctttcaaaagccagctctatctcctcgggggtacggcatga

SEQ ID NO: 21862 - DNA, 273 bp, Escherichia coli
atgcagaccaagttgttcttctacaattccaacaaagtccccgtgaggttcattttctttgagaataataagtcgtttacctgcttccagcatggcctcagcgctctgtgccatataaaaccgagcctcatgaactatgcgatcacgctcatagggctgaccatcgccaaactgctgcatgatctccatacgatgctgtgtcatggcgttcagactgacattgagatcatccgacagcggtacctcggcgttcagttcagtgttaatcggtga

SEQ ID NO: 21863 - DNA, 462 bp, Escherichia coli; identical to SEQ ID NO: 6061

SEQ ID NO: 21864 - DNA, 1035 bp, Escherichia coli; identical to SEQ ID NO: 7141

SEQ ID NO: 21865 - DNA, 690 bp, Escherichia coli
atgagtagcttttgggaaggtattttgtcatcaagcatttcatttgcaattattggatttgtttgtaaggcttttttacaacatattgataaaagagagttagaatcatttaaaaataagttgaaatatgaaagtgaacagagaattaaagaggatgaacgtgcttataattttaaaaaagcaagagatcttgaaatcggacgttgggggttaacattacttagtgctgcaaatggttttttaggaaggctatgttatattaaagatcacaatgacctatcgtcggatcaatattatattgatagtacaagattctatctatgccaatatttttgctgggtacatcaattcaggaaaaatagagattcatctgtattttcaccaactaatgatgaaatgttaataactgaattaatcaaaaatatttctatagccctacgagagaacgatattggttttccttgtattagatctcttgaacaaaagtatataggtgaaagccttagcattggtgctgaatgtatgtcctataaagattttatcgattctaaagtattagaaaactatgcacctctaaatgattttgttgaagcaattctacaaaataataataaagattatatcgataaactcgttatcccattccaagatctcaagaccagatttgatgcggcattacaaaataaatga

SEQ ID NO: 21866 - DNA, 1077 bp, Escherichia coli
atgcatggtattccacttgataatgataaattaaataaaacccctagatatattcatgctgatgaaaagcagcttttcgatttgattgatgctcttcatacaagaaaactacataagtttacgcatgaaaataagcatcacttaaaaaattgctctgttactaagataaaagataataaagctcttgaaataaaggtaggaattgatgatagaagtggtaatgacacaataaaagttgcgttggcaaatatgagagttgaacgtcgtaatattgaaagtgcttgcagaaaagatcagtctccaaatttaagttatgaacgacaaagaaacctttatcgtattctcaactcggcaactgaagaaaatgtgcagatattactactccctgagttatcaattcctgtgtcgtggttaccttttatggcagcacattcaaggagaaaacaaatatctttgattttcggattagagcattgggttattaacgaacacgcatataatattttggttgaaatgctgccttatacttcaaactttaaacacaaatccagtatgttagtttttcgagtgaaaaatcattacgcacctagtgagattacgatgctgaattctttaaggttaaaaatatcctctcctaaacctagtaaacaacggtatcatttgattaagtggaaaaacgtatcattttctacatacaactgttttgaactggctaatatcgagcatagagcattatttcgttcgcagttggatattttatttgcttgcgtatggaatcaagatataaattattatcaacatatcactgagtcagcgacacgggatttacattgttatgtggctcaatcgaatacttcgcattatggcggttcttgtgttctacaaccgaccagtagcactatttcaaataagatatatgtaaaaggtggggaaaaccattgcatcctaactactactttaaatatatatgcattgagagaggctcaatatcgttcattcagaattaactccgatactattaaacacaatcctccagggtttgactataatgctctattagagcgaggtgagaaatga

SEQ ID NO: 21867 - DNA, 798 bp, Escherichia coli; identical to SEQ ID NO: 1593

SEQ ID NO: 21868 - DNA, 1035 bp, Escherichia coli
atggcgatgtctgctcaggcagcagagatttacaataaagacagtaacaagctggatctgtacggaaaagttaatgctaagcactacttctcttctaacgatgcagatgatggcgacacaacttatgttcgtctgggcttcaaaggcgaaactcaaatcaacgatcaactgactggtttcggtcagtgggaatatgaattcaaaggcaaccgtgctgaatctcaaggttcttccaaagataaaacccgtcttgccttcgctggcctgaaattcggtgactacggctccatcgattatggccgtaactacggtgtagcatacgatatcggtgcatggaccgacgttctgccagaattcggtggcgatacctggacccaaacagatgtgttcatgactggtcgcaccacaggtgttgcaacctatcgtaacaacgacttctttggtctggttgatggtctgaactttgctgctcagtatcagggtaaaaatgaccgcactgacgtaactgaagctaacggtgatggtttcggtttctccactacttatgagtatgaaggattcggtgtaggtgcaacctatgctaaatctgaccgcactaatgatcaggttatctacggtaacaacagcctgaatgcatctggtcaaaatgctgaagtatgggcagctggtctgaaatatgatgcgaacaacatctatctggctaccacctattctgaaacccagaacatgactgtttttggtaataaccatattgccaacaaagcacaaaacttcgaagtagttgcacaatatcagttcgacttcggtctgcgtccgtccgttgcttacctgcaatctaaaggaaaagacttgggtgcgtggggtgatcaggacctggttgaatatattgatgtaggtgcaacctattacttcaacaaaaatatgtccacttttgttgattacaaaatcaacctgattgataagagcgatttcacgaaagcatctggcgttgctaccgatgatatcgttgctgtaggattggtttaccagttctaa

SEQ ID NO: 21869 - DNA, 798 bp, Escherichia coli
atgttaaaaggtatcgttgaccgaggagcaccaacgatagcaacagatgtattacgctggacacgccgtatctttgactatgggataaaacgccacgctctggagataaacccttgttcagcgtttgaagtatctgatgctggtggtaaagaggtttcccgcgaccgttggctaactcgcgatgagcttatcaggctattcgaggctatgcgcaccgcaaaaggattcagccgccagaacgaactgacatttaagctattgctggcactatgcgttcgtaagatggagttatgcgccgcacgatgggaagagtttgatttagatggtgcggtatggcatttgccggaagaacgcagcaaaaacggagaccctattgatatacctctaccttccccagccgttgaatggttgagagagctacacaccttttcatgtaatagcgcatgggtgcttccggccaggaagatgcaaaacagaatgatcccacatattcaggaaagcactttacccgtagcactggctaaggttcgcgccgaaatgccggatgtgcctaatttcacgattcacgacttccgacgcaccgcacgtactcatttagcagcattgggtgttgatcctgtcgtggcggaacgatgcctcaatcatcgcattaagggcgtagaggggatttataaccgtcatcagtattttgatgagcgtaaagcagcactggcacagtgggcagatctgctggtggcactggaaagcgggaaagactacaacgtaacgccattcgataaagcccggaggcaaatgtga

SEQ ID NO: 21870 - DNA, 651 bp, Escherichia coli
gtgaacaacatcttgagaaaatcgccaatcgaacggctttgttcatctgtatcgattacccctcatgaaatggctgtggccttggctggcctaaacccatctatgcgcattagcgatgtgcctgaggaaaatttcgaatatgtcgattttgtcagaactcatcttgccagagctatcaaggtgtacagaggtgaaaaaactagtaaagatgagccttgccatgcccttgatattttcttagcttcttacccatttattgacacaaatacaccagaaataattgttcagaaaatatcagaagcgattgatgatttgcgtggcaccaagggctgggaagaaaaagcccgaaaccttggaggactccagttagtaaactacatcaaagaaaccaaccgcagcggacgtgggcagcatagaaagcaggatgaggaaaacgggacaatgaaaatgatggggttgatagtacatctgctgataaaaaaatcaggctcatcttcctacatccaaaatgggaaacctaatcgcacagctatataccgtgacatagaaaccttaatcaaggatgaagggatatcccataaaggaatagcaaaagccacattcctagaaaaaatctcacgggctttattagctgtccacgatctcgactaa

SEQ ID NO: 21871 - DNA, 216 bp, Escherichia coli
atgaaaaaagtttttgctgtttcagcagttaccgctgcctgtatgcttgcagcaaatgcgggtgctgaggaaggtaaaagcggattttatctgaccggtaaagcaggtacttcagcagtatctctttctgaccagagtttcctgtccgaaaataaagaggaaacatcaaagtataggggggggatggccataacacggtattcagtggaggtatag

SEQ ID NO: 21872 - DNA, 600 bp, Escherichia coli
atgcgtaaattatgtgcagccattttgtccgcagccatctgtctgtccgtatccggtgcgcctgcatgggcgtctgaacatcagtccacactgagcgcggggtatcttcatgcccgtacgaacgctcccggcagcgataatctgaacgggattaacgtgaaataccgttatgaatttacggacacgctggggctgattacgtctttcagttatgccgacgcagaagatgaacaaaaaacgcattacagcgatacccgctggcatgaagattccgtgcgtaaccgctggttcagcgtaatggcggggccgtctgtgcgcgtgaatgaatggttcagcgcgtatgcgatggcgggtgtggcttacagccgtgtgtcgactttctccggggattatctccgcgtaactgacaacaaggggaaaacgcacgacgtgctgaccggaagtgatgacggtcgccacagcaatacctctctggcgtggggggctggcgtgcagtttaacccgaccgaatccgtgaccattgaccttgcttatgaaggttccggtagtggcgactggcgaacggatgcatttattgttggtatcggataccgtttctga

SEQ ID NO: 21873 - DNA, 354 bp, Escherichia coli
atggggattgttttaatcagcgaccgcaatatgcaatcgttagctaactactggcgaaaacacaactctgcaatatctgctgtcatatataatgatgatggtcttgatgttgccaatgaaaagatcagacaactatttattggtcgttatttatcatttaccagaggtaacacattaactcagatggaattcaccataatggggtatatggtttctggttataatccatatcagattgctgaagttctggatatggatatccgtagcatctacgcgtacaagcaacgaatcgaaaagagaatgggtggtaaaatcaacgagttatttattcgttcacattcggtccaacattga

SEQ ID NO: 21874 - DNA, 909 bp, Escherichia coli
atgtactggattattaacgataatattgagttctggcctgagcaccgaaaattaatatcggtacataacgccgatcttaacgtcgttctgacaacgccagccagtcgttgtttatcacttctacttgaagcttttcctgatgtggttgcacaacaagattttttcaccagagtctgggaagaagaaggtatgcgtatgccaactaacacgttatatcagaacatatccattatcagacgcggatttcgcgctgttggtgataccacccactcgcttattgcaaccgtgccgagaagaggattcaagattcataatgacattaacatacaaaatcatgcaataaactcttcaacagacgcacatacacacaatgccccacctgccgtaaaaggtaatgcggggtacaaagagagcattggtagcgcaaacaatttcaataacaaaatcctcaaacatataaaaagttatctaattatgttgagcatatttgctataggcgtatattctgcacattggctatggaataataatcaaccgaaaccattcttcaaggattacaagactgttgcggaaattaatggctgccattttaatgtaacagaagatacaattgatgggttgaaagagttcgataaatataagacacggatactggattcggggattaactgtaaaaaatatccgtggttatacttccctcttgcaaaatcctcaccagggatgattgttatggcatgcaataaaaactataaccaacatgaagtggcaggctgtttaaccctgtcttaccgtgaggttaaggaaggtgcgaataagcggggaaattcttctcggctgactcagtcatttcatttcttcatgtttgagccgattttttctcccgtaaatgccttgaatcagcctatttag

SEQ ID NO: 21875 - DNA, 234 bp, Escherichia coli
gtgcagttctatcccgggaaacatccgtgcgaaaaaccggcagaaatgctgcagcagataatcagcgcaagcagtcgtccgggtgacctggttgcagatttttttatggggtcaggttcaacagttaaagctgcactggcactgggccgtcgtgctacaggcgttgagctggagactgaacgttttgagcagacggttcgggaagttcaggatttagtcagtcagaacggatga

SEQ ID NO: 21876 - DNA, 174 bp, Escherichia coli
atgaatatactatttacggaatcatcaccgaatataggtggtcaggaattacaggctgttgctcaaatgaaggccctgaagaaaatggggcattcagttctgcttgtctgcagggagaacagcaaaattgcttttgaagccagtaagtttggggtgatgctgccaacttactga

SEQ ID NO: 21877 - DNA, 327 bp, Escherichia coli
atggttgctgtgactgtactgatccccgccgtctggctggtgactgagatatccaccgtaccgtccggctctgtgatgaccgccggagcaaccgttgcgctgttgtctgccaacacgctgaccgtctgtccggcaagcgcattcccgaacgcgtcggtgaccctcgcctgcagcgtattcgccgtcgcaccgtcagccactgagccgtccttaatgaccaccagatcagcaatcttcgccgtcctgacatcggcgacaaacgtcacgttccggctctggctgctgctgttgatgctggcggtgactgcactggctcccgccgtctga

SEQ ID NO: 21878 - DNA, 303 bp, Escherichia coli
atgagacgaacatttacagcagaggaaaaagcctctgtttttgaactatggaagaacggaacaggcttcagtgaaatagcgaatatcctgggttcaaaacccggaacgatcttcactatgttaagggatactggcggcataaaaccccatgagcgtaagcgggctgtagctcacctgacactgtctgagcgcgaggagatacgagctggtttgtcagccaaaatgagcattcgtgcgatagctactgcgctgaatcgcagtccttcgacgatctcacgtgaagttcagcgtaatcggggctga

SEQ ID NO: 21879 - DNA, 807 bp, Escherichia coli
atggcgaaaaggccaaaaccgtgcttactggatcaaaatttaccattgcgaaagcttgttctggaaaagctggagatgaaatggtctccagagcaaatatcaggatggttaaggcgaacaaaaccacgtcaaaaaacgctgcgaatatcacctgagacaatttataaaacgctgtactttcgtagccgtgaagcgctacaccacctgaatatacagcatctgcgacggtcgcatagccttcgccatggcaggcgtcatacccgcaaaggcgaaagaggtacgattaacatagtgaacggaacaccaattcacgaacgttcccgaaatatcgataacagacgctctctggggcattgggagggcgatttagtctcaggtacaaaaaactctcatatagccacacttgtagaccgaaaatcacgttatacgatcatccttagactcaggggcaaagattctgtctcagtaaatcaggctcttaccgacaaattcctgagtttaccgtcagaactcagaaaatcactgacatgggacagaggaatggaactggccagacatctagaatttactgtcagcaccggcgttaaagtttacttctgcgatcctcagagtccttggcagcggggaacaaatgagaacacaaatgggctaattcggcagtactttcctaaaaagacatgtcttgcccaatatactcaacatgaactagatctggttgctgctcagctaaacaacagaccgagaaagacactgaagttcaaaacaccgaaagagataattgaaaggggtgttgcattgacagattga

SEQ ID NO: 21880 - DNA, 288 bp, Escherichia coli; identical to SEQ ID NO: 19303

SEQ ID NO: 21881 - DNA, 528 bp, Escherichia coli
atgaaccgtaaaagtcttgctgctattgcaatggtgctggcaacatcatgtggatatgccgccacaataaaagtccccatgaaccttgttaatgccgatggtaaagaggtgagcgccggaacaataactatccaggaaaccagctatggtctcctgttcacaccagatctgcactctttacctcagggcattcatggatttcatgtgcacgaaaagggaagttgcgcgccggctctgaaagatggagtatctgttgcggcattagcagctggcggtcactttgacccgaaacagactggaaaacatcttggtccctggtctccggatggtcacctgggcgatctcccggctctgtacgtgactcatgacggaaaagcaaactatccggttctcgcaccaaaactgaaagaattaacagaaataagcggacggtctcttatgatccacattggcggtgacaactatcatgaccatccagatccactcggcggcggcggtgcaagaatgggctgtggtatcatcccataa

SEQ ID NO: 21882 - DNA, 543 bp, Escherichia coli
atggcagtggtgtcttttggtgcaaatgctgctgataccgttgcgccatctcaggggtcagggcaggtgaactttaaagggactgttattgatgccccgtgtggcattgaaacgcagtcagcaaatcagactattgattttggccagatttcgaaattgtttctggagaatggtggaaccacccagccgaaagatcttgatattaagcttgtgaattgcgatatcaccaattttaaaaaggcagctacaccaggcggtgcagctaagacaggtacggtatccctgacttttgcaggtgtgcctgcaggaaacgcaagtgacatgctgaagaccgttggtgaaaccaatactgctattgtggttcttaatccacatggctcgcgtgtgaagtttgacggtaaaacgtcaacggggccttctaatctggttgatggtgataatactctccactttacaacctatgtaatgaaagatgatagtggcaactctgtaaaagaaggtgccttctcagcagttgcaaatttcaacctgacttatcagtaa

SEQ ID NO: 21883 - DNA, 525 bp, Escherichia coli
atgggaaactgggttattcaggagctaaaatcactggatataggggactcaagacttgataaaagagtaaaacatatcctcaatagcctcagtcgttcaccagaagaaagtattcctgtttcctgccgtacctggagtgaaacaaaggcagcttatcgttgtttttcaaacgataaagtctctgctaataaaatcatggctcctcacaaagaaaatatcactgaaagagctcagcagtttaaaagagttttagttttacaggatacaacagaacttaattattctggtcagaaagaaaaacaaggagttggtcccaaaaaacataaagatgaaagaaacttatttcttcatcctcaactcgtcatcagtgagtcaggtgtttgcctcggtgtttatgatgactatcagtggttcagggatgaattaaaaaccagtaaaaatacccgacaagaaatctgcaatgatttacttcataaaaaacatgtcagtgaaaaagaaacctggcgttgggttgaaggatattag

SEQ ID NO: 21884 - DNA, 774 bp, Escherichia coli
ttgcgacctgattataccatagatataggcggtgatggtaatggcggaaaattatgccagcgccctgggccaaatacaaaaaaagtacaattagtccctttcgagaaagaaaaattactggcttcaatggaagtcattaatagcatgagcgcttatgtagaacttctgaatgaggacatggcaacgacagaaagtcagcaagtggcattacttaaacaggctctggatcacgcaaataacgcacaaacactacttggtatttcacatagcaaagatttagcacaatctgcagcagcggttaaagatttggtaaattatttcaatgagttatatataataaaagtcaattctggaaaaataggcaaaacggtagatgaaaactgggtaagacttatagggaacatgacagttttgcgtaatgatatttatacaaaaagcaataagattgaaaattatacctttgcgaatgtgcatgataatatgttttattatagtacggcatctaaaaacgctaagaatacagagtttaacactctgaaaaacaggaaggagtttctaagttcagtaatcaatgtgaatgaaaccaggctacaggcatcggcacctgccatgcccgcaattgaggctttaaatgcctttatagataagggtgattatctgaataatttatatgttaataaaacacgcacggcagctgaacaaaaaaggttaaatgagatattgcgcgcacaggtcattagtgggttaggtgatgctgccaacttactgatttag

SEQ ID NO: 21885 - DNA, 327 bp, Escherichia coli
atgacactgcaggttgaattctggacggtggtgagttttttgctcaccttcatggggtttgtgggagggctcgccaaatggttgttcagtaaaacagaagaacgccaggcggcacgattcgcctcccttgagcaggccctgcaacagtccgcctccaactggggcgaactggaaaaagaatttatgcgatttaaagcggatttaccgctgaattatgtccgtcgcgaggattatatccgtggccagacagtcatcgaggccaaactggacgcgctctacaacaaactggaagtggtacagcagtaccgcaataccggaggtcaataa

SEQ ID NO: 21886 - DNA, 618 bp, Escherichia coli
gtgttgataacctacaaaggaaagctaccgggaagaattacttgttctctgaagatgccgccgtcaacactgcggtcagaaaaagatgatgttgaatcacgtattgaaaaactggagagctacgtcgttgagctgaataagaaatggtcgatattggtgccttctgacgatgaaaagcagtttgctgcgtttgacgattattgtcggaaagtgatgagcagaaatctcgcagagtgtttcagtattcataatgataatttcagtgagctggaatgggagtgtaaccggccatcctttgttgtatccggtgatgctgggaaaataaccatctcagaaaatgggaaagtaacacctccatcgcaccagcacagtgaggagctcattgaatttgccattgattacctgaagaacaataaaaagcaggggctgatgaagcgcgttggccgttgcatgggatatcttcaggtagccgctgagattgaagcgctggccagtggtgctgataaggatgcaattgtgcgggaggctcttcttcgtgattttaatactccaccctttaaaaaagtgccggcttactggcttcatccggggctgacttatcttaaagtgcgtatttag

SEQ ID NO: 21887 - DNA, 297 bp, Escherichia coli
atggatatcacgccgatacttcatgcaatttgtgcagtagccgtgcaggggctggtcgggtgcattaccggtgactgggtttacggtgcagccattgcctgtacgttctttattgcccgagaacatacccaggcagaatatcgctggattaagcgttttggtgatggtcaccgacataagatgccgtggtggggcggttttgatccgcacgcgtgggatgtggcaagcctgatggattttgtggtgccggtggtggcctgtgcgggattgtatggctgtatgctgatttttagctga

SEQ ID NO: 21888 - DNA, 270 bp, Escherichia coli
atgtcagaaatcacatccctggtcactgctgaggcagtgaaggaagtcctgcgctctgaagaagtcctgagcgcactgaaacagaaactccgccagaaccttgaggcgcgtcttgatgcagaagtggatgccattctggatgagctgctgggcgtaccagcggttccggagccggaaggcatttcggatgacagtactgtttcagatggcgtcgggtctcagcctgacggtagtgaagagcctcagcctgacggcgaaatgatgatgtaa

SEQ ID NO: 21889 - DNA, 327 bp, Escherichia coli
atgacactgcaggttgaattctggacggtggtgagttttttgctcaccttcatggggtttgtgggagggctcgccaaatggttgttcagtaaaacagaagaacgccaggcggcacgattcgcctctcttgaacaggccctgcaacagtccgcatccaactggggcgagctggaaaaagaatttatgcgatttaaagcggatttaccgctgaattatgtccgtcgcgaggattatatccgtggccagacagtcatcgaggccaaactggacgcgctttataacaaactggaagtggtacagcagtaccgcaataccggaggtcaataa

SEQ ID NO: 21890 - DNA, 285 bp, Escherichia coli
gtgtggtacaggtcgcaatgcgaaaatgacaggcgtgactgggggttctacggattgattgccgaggaagtaggagaaattgcccctcagtttgtacactggcgaccagctaacgaagatgatgctcctgaagctatttccagcaatggccttgttgccgaaggtgtaatgtacgaacgtctggttgttccactgattcaccatatccaaaagctgacagaaagagttgatgaacttgagtcagaattaaagttgttattaacttcccgaagcgatatcggataa

SEQ ID NO: 21891 - DNA, 327 bp, Escherichia coli; identical to SEQ ID NO: 21889

SEQ ID NO: 21892 - DNA, 270 bp, Escherichia coli
atgtcagaaatcacatccctggtcactgctgaggcagtgaaggaagtcctgcgctctgaagaagtcctgagcgcactgaaacagaaactccgccagaaccttgagtcgcgtcttgatgcagaagtggatgccattctggatgagctgctgggcgtaccagcggttccggagccggaaggcatttcggatgacagtactgtttcagatggcgtcgggtctcagcctgacggtagtgaagagcctcagcctgacggcgaaatgatgatgtaa

SEQ ID NO: 21893 - DNA, 270 bp, Escherichia coli
atgtcagaaatcacatccctggtcactgctgaggcagtgaaggaagtcctgcgctctgaagaagtcctgagcgcactgaaacagaaactccgccagaaccttgaggcgcgtcttgatgcagaagtggatgccattctggatgagctgctgggcgtaccagcggttccggagccggaaggcattgcggatgacagtactgtttcagatggcgtcgggtctcagcctgacggtagtgaagagcctcagcctgacggcgaaatgatgatgtaa

SEQ ID NO: 21894 - DNA, 543 bp, Escherichia coli
atgggacgtcgcagcagcattgattctctgccgacggatgtccgccgctggctggagcgggcgctgacggagaataatttcaccggctatgctgaacttgaaagtttgttaaaagagaggggatatgtgataacccgctcctccctgcagcggttcggctacaaaatggagcagcaactggcccgtgttcgtgcggcaactgaagcagccaggctgatggctcgtgaagcgggggatgatgcggatgaccgttctgcgggactgatgacgttgatccagacggagatgatcgacatcctgatgcgtctgcaacaagtcagtgacgagaatgatccgactgatcgggcgaaattgctggccaccgcttcccgcaatattgcgaccctgacccgcgcctctgtcaatctcaagcgttttcagagtgaggtcaaggaaaaagcagaacttgcagcgaatgcggccgagaaaattgcccgtaagggcggattgtcaagcgacgcagtacaggcacttcgtcgcgagattctggggattgccacatga

SEQ ID NO: 21895 - DNA, 270 bp, Escherichia coli; identical to SEQ ID NO: 21893

SEQ ID NO: 21896 - DNA, 312 bp, Escherichia coli
atgctggggcgtcgtccggacagcatactcaaagccggtcagcatcgttatcagcgggcatttatccagcgattaaataatgggcgctggcatgttatgcaacgtcttccccaggccagatatgaggagggcaatgacgacaagggaaggaaaaagcgtaatcgccttcccattcaggtggtgaaaatcccgatggcggccccactgaaacaggcatttgatgagaatgttgaccgtatccggcgtgaacgcctgcctaaagaactggcatacgcgctgaaacaacaactgaggattgcgataaaacgatga

SEQ ID NO: 21897 - DNA, 270 bp, Escherichia coli
atgctgggccgtcgtccggacagcatacttaaagccggtcagcatcggtatcagcgggcattcattcagcgattaaaaaacggtcgctggcatgtcatgcagcgtgtggccgggaaaaaccgttaccctattgatgtggtgaaaatcccgatggcggccccactgaaacaggcgtttgatgagaatgttgaccgtatccggtgtgaacgcctgcccggagaactggcatccgcgctgaaacaacaactgaggattgcgataaaacgatga

SEQ ID NO: 21898 - DNA, 327 bp, Escherichia coli; identical to SEQ ID NO: 21889

SEQ ID NO: 21899 - DNA, 132 bp, Escherichia coli
atggaagcgataaagaaaattcaggaggagcagcgtaaaaaatcagaggtaggagttgcgccaacgatccacgaaattgctcggggattaatggataaggcgctggcttacactttaactggacgtgggtaa

SEQ ID NO: 21900 - DNA, 222 bp, Escherichia coli; identical to SEQ ID NO: 4904

SEQ ID NO: 21901 - DNA, 405 bp, Escherichia coli; identical to SEQ ID NO: 1309

SEQ ID NO: 21902 - DNA, 1683 bp, Escherichia coli
atggttacctggacccaaatgtatatgccgatgggaggactggggctatccgctctggtcgccctgatcccgataatattcttcttcgttgcactcgcggtattacgtctgaaaggacatgtcgccggagcaacaacccttatattatctattctgattgcgatattcgcctttaaaatgccgattgatatggcatttgctgctgcgggctatggctttatttatggattatggcctattgcgtggattattgttgcggcggtgttcctgtataaattaaccgttgccagcggtcagtttgatattatccgcagctcggttatctccatcactgacgatcagcgtttgcaggtgttactgattggtttctcctttggcgcgctgctggaaggggcggctggctttggtgcgccggtggcgattaccggtgcgctgctggtgggcctgggcttcaaaccgttatacgcggcggggctgtgtctgattgccaacactgcgccggtggcgtttggtgcgttgggcgtgccgattctggtcgccggtcaggtaacgggaatcgatccgttccacattggcgcaatggcgggacgtcagttaccgttcctgtcggttcttgtgccgttctggctggtagcaatgatggacggctggaaaggggtgaaagagacgtggccagcggcgctggttgctgggggaagcttcgctgtcacgcagttctttacctctaactatattggtccggaactgccggatattacttcggcgctggtgagtatcgtctcactcgctttattccttaaagtctggcggccgaaaaataccgaaacggcaatcagcatgggacaatccgcatgtgcgatggtggtgaataaaccatcttctggcggtcccgtgccttcagaatatagtctggggcaaatcattcgtgcgtggtcaccgtttttaatcttaacggtgttggtcaccatctggaccatgaagccgtttaaagcgttatttgctccgggcggcgcgttttattcactggtgattaatttccagatccctcatttgcatcaacaagtcttgaaagcggcccccattgtcgcccagccgacgccaatggacgcggtgtttaaattcgaccccctctctgctggtggcaccgctatttttattgcggcgattatctctatcttcatcctcggcgtggggatcaagaaaggtattggcgtctttgccgaaacgctaattagtctgaagtggccgatactgtcgattggcatggtgctggcatttgccttcgtcaccaactattccggtatgtccaccacgctggcgctggtactggctggtacaggcgtgatgttcccattcttctcaccgtttctcggctggctgggcgtattccttaccggctcggacacttcttcaaacgccctgtttggttcactgcaatcgaccacggcgcagcaaatcaacgtctctgacaccctgctggtggcagcaaacaccagcggcggcgtaactggcaagatgatctccccgcaatctatcgccgtggcctgcgccgcgacgggcatggtgggtcgagaatctgaactgttccgctacaccgtgaagcacagtctgatttttgccagcgttatcggcattatcacgctgttgcaggcgtatgtgtttaccgggatgttagtttcgtaa

SEQ ID NO: 21903 - DNA, 1203 bp, Escherichia coli
atggcagtattgacggatacgaaagcaagacatatcaaacctgatgacaaaccattgccccatgggggaattaccggactgacccttcatccttcttcagtaaaggggcgggggaaatgggtttttcgttatgtaagtccggtgacacaaaaaagacgtaatgctggattgggaacttacccagaggtcagtattgctgaagctgcacgtactgcccggataatgcgagagcaacttgctgcaggtgatgatcctctggagattaaaaaggctgaatctgagaaagtcgttatcccaacatttgccgatgcagccaggcgtgtacatgcagaactgtctcctggatgggaaaatccaaagcatgtaaggcagtggttatcgacgcttgagaattacgcgtttcctcaactgggagcaaaaacgctggattcgattacggctgcggacgtggcagaaacactgcgtccagtctggttaaccttgtcagaaacggcaagccgggttaaacagcgcattcatgttgttatgcagtggggatgggcgcacggtttttgtgtggcaaatcctgttgatgtggttgaccatttgcttcctcagcagacaagaggacgtgatgaacaccaacccgcaatgccctggaggcagttaccgctttttgtggcgaccagtgtgtatagtgatgaaccttataatgttacccgcgcactgttattaatggtgatacttacagcaactcgctcgggcgaagccaggggaatgcgctgggctgaaattgattttcataagcgggtatggactatacctgcagaaagaatgaaagctaggctacagcatcgtgttcctttatcccggcaggctatttacattctggaaaatatacgtggcctgcatgatgaactggtgttcccttcacccagaaagcagcagatcctttccgatatggtgttgacaagttttctgcgtaaaaagaaagccgtcagtgacattccggggcgagttgccacagcacatggttttcgctcaacattcagggactggtgtagtgaacaggggtattcgcgggatctggcggaaagggcgctcgctcatacgctgaaaaataaggttgaggcggcatatcatcgtactgatctactggagcagcgtgtaccgatgatgcaggcatgggcggattatgtgatgtctcaaattgtgaataaataa

SEQ ID NO: 21904 - DNA, 1818 bp, Escherichia coli
atgtataattttatcactataatgtatgatgtcttttcatattttggtgttctggctaaaaaccagaatacccgtgacatccgaaatattaaaaatttttcctcacatcaacattcactgggcgacatgtttgatgaattaataaacattattgataaagaacaagtattgagtacagaacaacgaaaagttatatttaggagatatgaagatctctatgttaagctaatgcactattctgtttttacagacaaaacacatcaaataataaaacaaaaatattttaatgacattgtaccaatgattctcgcactcgacatcaggaacacatatcgcccggataatgagatggcattttactatcatattcattcttttctcactcagataccggataatgaggatgatatatatcatgctgcaaggacatatcagcgaaattacgttaagttatgtttatccggatacacaccagcgaatgcgcatttcaaatatatctttgatggcgtatatgaattcattcgtaatattcgcaaaaacagtacaccaggaaaaacaaaacttaccgcaactatcaacacatgcaaagaaacctgtaaacatctgctttatttaagtaatgaagacaaggaaaaaataatttctgacttagataaaattcaagttgcatgttattatctcactatattactggctttcgaaagacgaacttcattaacaagcgccctggcaactttatataaaatgctgataagcgaaagagaagtttcagaatatgaatgccagttattatatttaaccaacccaatagatgtaatgaatacactgaacaaatacatatattactttcctaatgagaactcaccattttatacactgaaaattgacagtgcattatcgtgggaggccattgacgcaatacgagactatagtatttctgatatttatctttatcctgaacaaaaaacaataaattgtgtcgttgagattgaaaacattgtctttggcggttacatttatacattgaacaacggcgtcacattacaaaacatagaaaacactttaaaagattcttcatgccattatgtcttaaatggctatacggaatttgttaactgtttgatacaacttacttcaggaaagactgaaagtgttcatcgcaccatcaataaactgaactatgagaaattaccttttggatttatcattgccgcgtttgctatactaaagatagcatttaaaataaaattcagtaaaaatcatgtaaatatccgagcattattaaatgacatcaattattttatgacttatcagggcgagtccattaaccttatttcactggatcacgaatacccagagtcctgtcttcaaaatgacacaaacacatatttattaggaagagtaatatttctgtataactcaatgatttataagttcataaactgtcaggaacatgaaaccaataacattcactcagctatgataaataacctattacaggaagttgatatagcccttggtaaaataaataacattatagacagcagaaacatatcagccccccatgaactggcaaatattcttacccgcgaaaaaatacttacagcacgggaaaaaaaaggaaacctgataagcctgtttgatggattcactttattccattgtgttggaatgataacctttcttatccattatctcagaacacctgaagaaaaagttgaaaatatatttatgttatatggtgcagataaaaacaataaactacgcagaagactgatttatgacgcactaggaataattcagtctcagcaggagtga

SEQ ID NO: 21905 - DNA, 711 bp, Escherichia coli
atggtgaaaaaagcgatagtgacagcgatggctgtaatcagcctctttactctgatgggatgtaataatcgggccgaagtcgatacgctttctccggcgcaggctgccgaattgaaaccgatgccgcaaagttggcgcggcgtgctgccgtgtgctgattgcgaaggaatcgaaacctctctgttcctcgaaaaagacggaacctgggtgatgaatgagcgttatctgggggctcgtgaagaaccttcctccttcgcttcctacggtacatgggcgcgaaccgctgacaagctggtattaaccgatagcaaaggtgaaaagtcatattatcgcgcgaaaggagatgcgctggagatgctcgatcgtgaaggtaatccgattgaatcgcagttcaactacacgctggaaccggcacaatccagcttacccatgacgccgatgaccctgcggggcatgtatttttatatggctgatgcggcgaccttcactgattgcgcgaccggaaaacgttttattgtggcgaataacgcagagctggagcgtggctacctggctgcgcgcggtaacagtgaaaaaccagtgttactgtcagttgaaggtcactttacgctggaggctaatcccgataccggtgcgccgactaaagtattagcgcccgatacggcaggtaaattttacccaaaccaggattgcagtagtttggggctgtaa

SEQ ID NO: 21906 - DNA, 777 bp, Escherichia coli
atgcgtcagtatcgtttattgtcacctatgattaaggtagtcatagtattattttcccttttattctctacagcacaagcaggcttagtgatcggtggaacgcgttttgcgtatccggaaaatcagtcctcaatatctgttgaactcaaaaacacttcagacagagatatgttagtcaaggttgcagtctcccctgatgatgctcgtcagttgacgggaacggttgaatctttgccctcatattctgaaacggtatttatcgcaactccgccactgtttattttgaagcctgacaaaaatacaaaaataagaattaatcgtgttggtggcagtttacctgccgaccgggaaagtttatttatactgaatgttgcagcattaccaacgttggaaaatagtcattcagtcaaaactgataatcaattgcaaatagcagtccgcaatcgtatgaaaatattctatcggccatcaaatttgtctgaagacccgaatatgtcatatcaaaaattacgctgggcacgaaaaaatgaaattgttaccgtttataatccaggccccagatatgtgacactctataacctacatgttgatggtaaagttatagatggtggtatggtcgcaccatttagccatcgccaacaatcatggtgtaaatcgcaaggggtttgtgaaatagcatggcagacattggacatttataataatgtattgccaattttgaaagtaaaattaaatccttcacagttggatgttactggctttgcatttagtcaataa

SEQ ID NO: 21907 - DNA, 330 bp, Escherichia coli; identical to SEQ ID NO: 20328

SEQ ID NO: 21908 - DNA, 378 bp, Escherichia coli; identical to SEQ ID NO: 10109

SEQ ID NO: 21909 - DNA, 501 bp, Escherichia coli
atggccgacagtttccagaatgaagttcccgccgctcgtgtaaatatcaagcttgatctgcatacaggcaatgctaaaaagaaagttgaactccccctcaagcttcttgccgtaggcgattacagtaacggaaaagagcaacgtccgctgtccgaacgggacaaggttgatatcaataaaaacaacttcaacagcgtcatggctgagttttcgcctgcggttaatttaacagtagaagatacgctaaacggaaacggtaatgaacaaaatatcgcgcttgaatttaaaagcctgaaggattttgaacccgaacaggtagcaaaaaatattccgcaacttcgtgtattactcgctatgcgcaatttactacgtgacctgaaatccaatctgctggataacgcaacgtttcgccgtgaactggaaaatatcctgaaagacccgacgctcagttcagaactgcgtgatgaactggcgaaaattgcgccgcaggagaacgtttaa

SEQ ID NO: 21910 - DNA, 819 bp, Escherichia coli
atgtgtcaggtatttggtgtatccaggagcggttattacaactgggtacagcatgaaccctcagacagaaaacaaagtgatgagcggctaaaactggagattaaggtggcacatatccgcactcgcgaaacatatggaacccggcggctccagacggagctggcagagaatggcatcatcgttggtcgtgaccgactggcacgtcttcgtaaggagctaaggctacgctgtaagcagaaacgcaagttcagagcgactacgaactcgaaccacaatctgccagttgcgccaaatctgctgaaccagacgttcgctcctacagcaccaaatcaggtctgggtggcggacctgacgtatgttgccacacaggagggatggttgtacctcgctggcatcaaagatgtttatacgtgcgaaattgtcggctacgccatgggagagcgcatgacaaaagagctgacaggtaaagccctgtttatggcgctcaggagccagcgcccacctgccgggctaatccaccactctgatcgaggttcacagtactgcgcatacgattaccgggtcatacaggagcagtttggtctgaaaacatcaatgtcgcgtaaaggtaactgttacgacaacgctccgatggaaagcttctggggaacgctgaaaaatgagagcctgagccactatcgttttaataaccgggatgaagccatctcagtaatacgggaatacattgagattttctacaatcgtcagcgtcgtcactctcgtctggggaatatctccccggcaaccttcagggaaaaatatcatcagatggctgcttaa

SEQ ID NO: 21911 - DNA, 303 bp, Escherichia coli
atgagcagaaaaaaccaacgttactctaaagagttcaaagccgaagctgtcagaacggttcttgaaaatcaactttcgatcagcgaaggcgcttcccgattatctcttcctgaaggcactttaggacaatgggttaccgccgccagaaaagggctcggtactcctggttcccgcacggtggctgaactggaatctgaaattctgcaactgcgtaaggcgttaaatgaagctcgccttgagcgagatatattaaaaaaagcaacagcgtattttgcacaggagtcgctgaaaaatacgcgttaa

SEQ ID NO: 21912 - DNA, 312 bp, Escherichia coli
atgggagttgagcagaatgatttcagggacatgttctccgtttatctctccggcccgccgcagacgcagcatgtgttttgtgtatccccggcggcccgggtcgcgcacacgggtctggcaggcgaagaatggctgaaagccttcccgctgcaggctttccagtacggtgatggtgggaatgtacgtatagttctggcttcgggacgtgtgtttatcttccccgaaaatccccggaacatagtgcatcagttcttcgtgtgtcagcggacggtcacggcgtatctggttcgtataaccaaaacgactggctaa

SEQ ID NO: 21913 - DNA, 1491 bp, Escherichia coli
atggccatctggcatctctatgaattgctccgtgaacgcgataatgaacaaaagcaggagaaaatagcgagcactacattcataaccagcaatgagcccatcgagaacaagatcatcctacattcaccaactaacgtgatcttctttggcccccctggcactggcaaaaccttcaggttgcagcaaaaaatgaaagagtacacttctcatgctgttccagctgatcgtgatgcctggctggattctcgccttgaatcgttgaattggatgcaggttataacgctggtgctgctcgatcttgggaaacgagccaaagttcgccaaattattgaacatatgtggtttcaacgtaaggcattattaaacggtcgtaatggcaacctatcgaatacagcctgggcagctttgcaatcctatacagttcccgagtcgttaaccgttgattataagaatcggcgtgagcctgccgtatttaacaaaacagataacagcgaatggttgctagttgattcacagctcgagcaagtggaggatttggtagagctctacgccgaacttaaacgaggccctaaatctgccgaagccatccagcgttttgcggtggttacgttccaccaatcttacggctatgaagaatttattgaaggtatacgcgctcgctctgacgagagtggcaatatctcttatcccattgagccgggtatctttatgcgcctttcccaacgtgccaatgccgatccaggacatcgctacgccattttcattgatgagatcaatcgcggtaacatatccaagatctttggtgaactaatctcactcattgaagtagacaagcgtgcaggcatgcccaatgcaatgagcctacaactggcttatagcggtgatcacttcagcgtacccgccaatgtcgatatcatcggagccatgaatacagcggaccgttctttagctctgatggacacggctttgcgccgtcgctttgactttgtcgaaatgatgcccgatctctctttactgagtggagctaaggtgaaaggcatagagctcgagtcgttgttagagaaactcaatagccgcatcgaggctctttacgatcgtgaacatacgctggggcatgcgttctttatgccggtaaaaaatgcactcgatgccggtgatgaagaagctgcgtttaaacaattgaagatcgcattccagaaaaagatcattccgcttttacaggaatactttttcgatgactggaacaagatccggttggtgctggcagacaatcaaaagcaagacgacaacctgcaattcgtgattgagaaaaccgacgatctcgatacgctttttggtaacaaccatggtttacgacaccatgatcagcaatcaacagcttacgaactcaaagatttcgatcaagagatctggaatattccacaggcttatcgttcaatttatcagccccagcagactccccttgatgagcaggctgtaaatcatgggtga

SEQ ID NO: 21914 - DNA, 183 bp, Escherichia coli
atgtgcttacttgcaccagaaaatccttatccgatatatgcactaccaccgctggtgagaaatgcaataattgaaactcaaaaaaatacacaggcacctttggctatggtggcaacatccgcattaacagcgacctcaattgcctgtcagaatcagagagtaaagattaacaggcccacgtaa

SEQ ID NO: 21915 - DNA, 1029 bp, Escherichia coli
atgggattgtttacgacccgccagttactcggttataccgaacaaaaagttaaatttcgtgcgctgtttctggagctgtttttccgccgtacggtgaatttccataccgaagaggtgatgctggacaaaattaccggaaaaacgccggtggcggcctatgtctccccggttgttgaaggaaaagtgctgcgtcatcgtggtggtgaaacccgcgtgttgcgtccgggctacgtcaagccgaaacacgaatttaattaccagcaggcggttgagcgccttcctggtgaagatccatctcaactgaatgatccggcttaccgccgtctgcgtatcattaccgataacctcaaacaggaagagcacgccattgtccaggtggaagaaatgcaggcggtaaatgctgtgttgtatggcaaatacaccatggaaggagaccagttcgagaaaattgaggtcgattttggcaggtcgacgaagaataacatcactcagggtagtggtaaggagtggtcaaaacaggatcgtgacacgttcgatcctacacatgatattgacctctactgcgacctggccagcggtcttgtgaatattgccattatggacggtaccgtctggcgtcttctgaatggttttaagctgttccgcgaaaaactggatacccgtcgcggttcaaattctcaactcgaaacggcagtgaaagatctgggcgcagtggtgtccttcaaggggtattacggcgatctggccattgtggtggcgaaaacgtcttatatagcagaagacggtatcgaaaaacgttatcttccagatggcatgctggttctggggaatactgctgcagatgggatccgttgttacggtgccattcaggatgctcaggcgttgtccgaaggtgtggtggcctcttcccgttatccgaaacactggctgacggtaggggatcccgcccgtgaatttaccatgacgcagtccgcgccgctgatggtgttgccggacccggatgagtttgtggtggtacaggtgaaataa

SEQ ID NO: 21916 - DNA, 348 bp, Escherichia coli
atggtgacgaaaaccatcactgaacagcgtgcggaagtacgtatttttgccggtaatgatccggctcataccgccacaggcagcagcgggatttcctcgccaacaccggcactgacgcccctgatgctggatgaagccaccgggaaactggtggtctgggatggacagaaagccggtagtgcggttggcatactggtactgccgcttgaaggcacagagacagcgctgacgtattacaagtcgggaacctttgcgacggaggcaatccactggcctgaaagtgtggatgaacacaaaaaggccaacgcctttgctggcagtgccctgagtcacgcggcgctgccgtaa

SEQ ID NO: 21917 - DNA, 207 bp, Escherichia coli
atggttacagtcgctgaactgcaggcgctgcgtcaggcgcgccttgatttattaaccggtaaacgggtggtgtctgtccagaaagatggacgaagaattgaatatacggcggcctctctggatgagcttaaccgtgcgatcaatgatgctgagttggtactggggacaacccgccgtcgccgtcgtccgctgggagtgaggttatga

SEQ ID NO: 21918 - DNA, 633 bp, Escherichia coli
atggggcgctggcttgctggcagactcatgaaagagctggggctggtcagctgtcagcagccgacttaccggtataaacgtggtggtcatgaacatgttgctatccctaactaccttgaacggcagttcgccgtgaccgagccaaatcaggtgtggtgcggtgatgtgacctatatctggacgggtaagcgctgggcgtacctcgccgttgttctcgacctgttcgcaagaaaaccagtgggctgggccatgtcgttctcgccggacagcaggcttaccatgaaagcactggaaatggcatgggaaacccgtggtaagcccgtcggggtgatgttccacagcgatcaaggcagtcattatacgagcaggcagttccggcagttactgtggagataccggatcaggcagagtatgagtcggcgtggaaactgctgggataacagcccaatggagcgcttcttcaggagtctgaagaacgaatgggtgccggcgacgggctatgtaagcttcagcgatgcagctcacgcaataacggactatatcgttggatattacagcgcactaagaccgcacgaatataatggtgggttaccaccaaacgaatcggaaaatcgatactggaaaaaactctaa

SEQ ID NO: 21919 - DNA, 303 bp, Escherichia coli; identical to SEQ ID NO: 6057

SEQ ID NO: 21920 - DNA, 651 bp, Escherichia coli
ttgatttttatgcatattgaagcagtaccttgtcctcattgtggagctagtccagatcatcaagatctggaaaaaatatgtgatggggacgttaattctattataaactcagctacagccgagatagttaaaattgaaacgttgttgagtgagctaaataatacagtatcggatcttcgtggtgaagagcaacatctaaaaaaagaatactcaaaatgtgaggaaacttatcagcatttagataaaacaattcgagatatagttgctccaaaagttgataattttagccatgcttatacagcattagttgataaaaaatctgaaattcaaaggtctgttgatttatttataagaagggaacggctggaaaaaagaaaagccgatttattgaataaaagttgtattgtacatgagaaaactcagttggaaattggtccctctgattctgtaatgcataacctttcattgaaaatttcctccatactaaaagcatggaatttccctggtgaatgcaacgtatttttcgacaaagttgcttcagactttgtgatagatggtaagcccagaggtagtcgaggaaagggactacgagctattacacatgcagcagttagtgtcgcattactagagctgtctcttatacacatctga

SEQ ID NO: 21921 - DNA, 249 bp, Escherichia coli; identical to SEQ ID NO: 12861

SEQ ID NO: 21922 - DNA, 510 bp, Escherichia coli
atggtcgggaagcgctgtcatgagcgcactgaccagcgtatccagttcccagccggtgcaggccgatacggccacaaccggatgtacgggccggaacagccggaataccgcatctgttttctcacgaatattctgtgcctgtgcgggagaaggcttaataccggccatatcccattcatggcagggctccgttttatcggcctgcgtcaccacaaacagtacccgctgatgtccccggtgcaggatgtgtcgccagaaatactcatccacagacagggcacggtcatcggctttaatcagccacagtaccaggtccagttctggcagaatgtcacggtacagggcttcatactctgcatccctgtcccggctctcgcccaccccgggcaggtcagtgataatcatgctgtgaccgtggccactcagacggaagcgccgcacttcccgggtgccggcgtgaacatcactgaccggggtgacctccccctgaaacagtgcattacagagtga

SEQ ID NO: 21923 - DNA, 279 bp, Escherichia coli; identical to SEQ ID NO: 14406

SEQ ID NO: 21924 - DNA, 414 bp, Escherichia coli
atgtacggtgatggtggtatgggcggatggcaaaatatgcaggggaatacccctgtgacgccactggtggatgccggatgcaatatggtgattgtgtcgcatctgagtgacggttctttatgggatcgccgggcttttccggacaccacaatccttgaaatccgtccccggaaaaagctgaaacaaacaggggaagaaggcaaaagtggcggtctgctcagttttacatcggcacatatcgacacctggcgtcagcagggctatgaagacacgatgctggcgatggagcatatccggaaaccactggaggcgcgtcaggcactgacccggtcagaggcggtgttgcagaaaagtctggagaaaacggaagaggcagatttggcactgagaaacgcgatggcccggattaaataa

SEQ ID NO: 21925 - DNA, 723 bp, Escherichia coli
atggctgctagaccccgatctcacaaaatctctatacccaatttatattgcaaattagataagcgaaccggaaaggtatattggcaatacaaacatccactatccggtcgttttcatagcttaggaactgatgagaatgaagcaaaacaagttgctactgaagcaaataccattattgctgaacaacgtacccgacaaatattaagcgtcaatgagcgtctggaaagaatgaaaggcaggcgctcagacattacggtgacagaatggcttgataaatatatttctatccaggaggacaggctgcaacataatgaactaagacccaactcctatcggcaaaaaggcaaacccattcgtcttttccgtgagcattgtggaatgcaacacctcaaggatattaccgcacttgatattgccgaaataattgatgctgtaaaggctgaaggtcataacaggatggcgcaagtcgtgagaatggtgttaatcgacgtcttcaaagaagcacaacacgcaggacatgttccgccaggatttaacccagcgcaggcaacaaaacaaccgcgaaatcgagtaaaccgccaaagattatcactgcccgaatggcaggcaatatttgacagcgtaagcagacggcagccctatttaaaatgcgggatgctacttgctcttgtcactggacaacgtttaggcgatatctgcaatttgaaattctctgatatctag

SEQ ID NO: 21926 - DNA, 501 bp, Escherichia coli
atgaacctgacaacgaagggtgatttagttcttgcggcattacgtaagctcggtgtggcatcaaatgccacgttaaccgatgtcgaacctcagtccatggaagatggtgtcaacgaccttgaaatgatgatggcggaatggcttggcggtgatgcgtcaccaggtatcaatgttggctacattttcgctgatgcagatgtcgctccaaatccgggagatgagcacggtttatcaaataacgctatcaatgctgtcattttcaaccttgcctgccgcattgctccggattatgcgctggaagcgtcagcaaaacttataaccactgccagatacgggaaagagcgactcgtcaaactgtctgcaatggacagagcaaaagccgctaaatgtaagtccggttatccaaaccgtatgcctgttggtagcggtaaccagttggcgaagtggaatggttggaattacttccaccgaaaggaaccttgcgataacgggagcgaataa

SEQ ID NO: 21927 - DNA, 231 bp, Escherichia coli
atgacacacatgatctttcgtcatggcgacatgaagaagtggaaaggcgttggctacgactttgaaatcgtgaaagccgaagagcttcaggaatatctggatgctggttggtttgcacatccggatgaccttctgaaggatgttgcagagccagagccagaagaaaaacagcgtaaaaagcctggtcgaaaacctaaggcggcagcagatgaacctgacaacgaagggtga

SEQ ID NO: 21928 - DNA, 1296 bp, Escherichia coli
atggcattaaatgaaggtcaactggtcacgtatgctctggatgaaatcatcgaaaccgtccagaacctgacgccaatggcgtccaaagtgacaaaatacacccctccggcaaaatccatgcagcgttcaagcaataccgtgtggatgcctgttgagcaggaagcgccaacccagactggctgggatttaactggcaacgcaacagggattctggaactctccgtgaaatgcaacatgggcgatccggataacgatttcttcgagcttcgtgcagatgacctgcgtgatgagcgttcttaccgtcgccgcatccaggcatccgccaaaaaactggcgaataacattgagtcagcgattgccaaacaggcaactgaaatgggttcgcttgttgttcacgatacccgcgcaattggtccatctacaggcctgtctggctgggattttgtgtctgatgcagagcgcctgatgttctcccgcgaactcaaccgcgacatgggcatcagttacttcctgaaccctgacgattaccgcaaagcaggccgcaacttggtagatggcgacatcttcgggcgagttcctgaagaagcgtatcgcaacggtactattcagcgtcagattgctggctttgatgaaattcttcgctcaccgaaacttccggcagttaccaaatcaaccgctactggtgtaactgtttctggtgcgcagaagtttaagccgcaggcatacacccttgataccgatggtaacaaagagaacgtcgacaatcgtgttgcaacggtgaccgtatcctccaccgccggatttaagcgcggcgacaaaatcagcttcactggtgtgaaattcctgtctcagatggcgaagaacgtgctgactgatgatgcgactttctcaatcacccgtgtgatcgatagtactcacatcgaaatcacgccgaagccgattgcactggatgacgcgtcactgacaaaagaagagaaggcttacgctaatgtaaacacctctcttgctgataacactccggtgaacgttctgaacgtggcaacaaccaccgctaacgtgttctgggctgatgactcaatccgcctgctgtctcagccgatcccggtaacccatgaactgtttgctggtatgaaaacgtcttccttcagcattcctggtattggtgttaacggcatcttcgcaacgcagggtgatatcaacactctgtctggtaagtgccgtattgctgtgtggtattcagcatgtgctgtacgaccagaggcaattggtgttggtctgcctaaccagaccgcgtga

SEQ ID NO: 21929 - DNA, 912 bp, Escherichia coli
atggaccaaaccaccgacattcaggcttctgaagaattaaccctgcccggcaatcatgcagcggcatctgctgatggcttagttgtcgataatgccaacgacaacgcaggtcaggaagaaggcttcgagattgtcctgaaagacgatgagaaaccaaaacaagacccggcaactaatgctgaatttgcccgtcgccgcatcgaacgcaaacgccagcgtgagcttgagcagcagatggaagcggttaagcgtggagaattgccggaacacctgcgggtgaaccctgagttaccaaaacaaccagaccctaacgattatctttccgaagatgcactggctaagtacgactatgaccagagccgcgcactggctgccttccagcaggcaaacagtgaatggcagatcaaggctatggacgcacgaagccaggctgtcgccgagcaggggcgcaaaactcaggagttcacccagcaatcagcgcaatacgtcgaggcagcccgtaagcactacgacgcagcggaaaagctcaatatccctgactatcaggagaaagaggatgcattcatgcaactggtgccgccagcagtcggtgccgacatcatgcgcctcttcccggagaaatccgccgctctcatgtatcaccttggtgctaatcctgagaaaacacgccagttgctggcgatggacgggcaatccgcgctgattgaactcactcgactgtcagaacgtttaactctcaagcctcgagccaagcctgtttcagaagccccgttacctgatgaaccaattcagggacacgctgttgctgcaaatatctctgcgattgaaaagcagatggaagcggcagcaaacaaaggggatgtagagacgtaccgcaagcttaaggcgcaactgaataaaggaattcgataa

SEQ ID NO: 21930 - DNA, 2166 bp, Escherichia coli
atggccgacgaaaacagactcaattccattctgtgtaagtttgacgcagactggatggcgagcgatgaagccagaaccgaggcgacaaatgacctgtattttagccgagtgtcgcaatgggatgactggctatcaaactacacgactctgcaatatcgcggacaattcgatgttgttcgcccggtggtcaggaaactggtcgcagagatgcgccggaaccctatcgacgttctcttccgacccaaagacggcgctaatcctgatgctgccgatgtgttgatggggatgtatcgtactgatatgcgccataacacggcaaagattgccgttaacgttggcgttcgtgagcagatagagtccggcgttggtgcatggcgtctggtcacgcagtacgaagacaacgatccaacaagcaacaatcaggtaatccgacgccttccaatccatgaagcctgctcacacgtcatatgggacgccaatagcaagcagatggataagagcgacgctaagcactgcacggtgattaacgctttgtcacgcaatggctggaaagagttcgcagaggattacggtattgatccggataccttgccatctttccagaatccgaacgatacatggctgttcccttgggtatcgaatgatgtcgtctacgtcgctgagtattacgaggtcgaagagaagaaagagaaggtcttcatctaccgcgacccgctgacaggtgagccggtcagctattaccagcaggatatcaaagacgtcatcgacgacctggctaatcgtggattcattaaggtagcagagcgcaaggtgaagcgtcggcgtgtgtataagtcgatcatcacctgcacgcagatactgaaagaccgcgagaagatagccggagagcatattccaatcgttccagtgtatggcgaatggtcattcgctggtgacaaggagtgctacgaaggagtggtaaggctgacgaaagacggtcagcgccttcgtaacatgatcatgtcattcaacgccgatattgttgctcgttcaccgaagaagaaaccgaccttcttccctgagcaaatcgaaggctacgaatacatgtacggtggaaatgatgactatccgtactatctgcagaacaagaccgatgaaaacggtaacgacctgccgattggtccaatctcctacatggaaaaccctgaagtgccgcaagccaacgcttacatgcttgaggctgccaccaacgcagtgaaagaggtggctagtcttggtgtggatgcgcaggcggcaaatggtcaggtcgctttcgataccgtcaatcaactgaacatgcgggcagaccttgagacatacgtgttccaggataacctggctaccgcaatgcgacgtgatggcgagatttatgcctcaatggtcaacgatatttatgacgttcctcgtcatgtaacgctgacacttgaagatggaagcgagaaagacgttcaactctatgcgcaagttgtcgattaccagtccggcaatgtggtcacactcaacgacattcgtggtcgctatgagtgctatacggacgttgggccatccttccagagcatgaaggaacagaaccgcgcagagattcaggagttactaaccaaggttccgcaaggtactccagagttccagatgctgatgctgcaatacttcacgctgcttgacggtaaaggcgtcgagatgatgcgagagtacgcgaacaagcaactggtgatgatggggctgaagaaaccagaaacacctgaagagatggagatggtacagcaggcacaacaacagccgcagcagccatcagcagagcaaattcaggcgcagggtatccttctgcaaggtcaggctgaattgctcaaggcagagaaccaacaggcgcagattcaggttgaagccgccaaggttgaagcccaaaaccaactcaacgccgcgaagattgcagaaatcttcaacaatatggacctcgacaagcaggcagaactgcgtgagtacctcaagctcgtaggtcaattccagcaacagcgcagcaaagatgctcgtgctaacgctgagctgcttcttaaagatgcagaccagactcattcacaacgcatggatttcgctaatcttatgcgtcaagttcaaatcccctccggcggagtagccgagacacctcaataa

SEQ ID NO: 21931 - DNA, 1500 bp, Escherichia coli
gtggaactggacgcgattcttgataacctgagcgacgaagagcaaatcgaattgctcgagctactcgaagaagaagagaactaccgtaacacacacctgctatatgaatttacgccatacagcaaacagcgtgagttcatcgacgccgggcatgactatccagagcgatgttttatggctggtaaccagcttggtaagtcatttactggtgctgctgaagtcgcgtttcaccttaccgggcgttatccgggcacaaaaggctatcctgctgatggtaaatatggcggtgagtggaaaggtaagcgtttctatgagcctgttgtcttctggattggtggagagacaaacgagactgtaaccaaaacgactcaacgcatcctgtgcggtcgtatcgaagagaatggtgaacctggctacggttccataccgaaagaagacatcattagctggaagaagtctcctttctttccgaaccttgttgatcatcttctggttaagcatcacacggctgatggcgttgaagatggcatttcaatctgctacttcaaaccatactcgcaaggccgtgctcgctggcagggtgacacaatccacggcgtgtggtttgacgaagaaccaccatacagcatttatggcgaagggcttacccgtaccaacaaatacgggcaattctcaattctgacgtttaccccgctgatggggatgtctgacgttgttaccaagttcctgaagaaccccagcaagtcgcagaaagtggtcaacatgaccatctatgacgctgagcactataccgacgagcagaaagagcaaatcatcgcatcctatccagagcatgagagagaggcgcgtgctcgcggtattcctacgatgggtagcggtcgaatcttccagataccggaagagacgattaagtgtcagccgttcgagtgtcctgatcacttctacgtaattggtgggatggatttcggatgggatcaccctcaggcgcaggttcagctttggtgggataaggacgcagacacaatctacgtttcacgcgtgtggaaggcgaaagaaaagacagccgttcaggcgtggggagctgttaaatcatgggcgcataaagtgccaaccgcatggcctcatgacggaaaccagcatgagaagggcggcggtgagcagcttaaagggcagtacgcggacgctggttttatgatgttgcaggagcatgcgacatggcctgatggcggtaatgctgttgagcctggcatcactgaattgcgagacatgatgctcgacggtcgcttcaaagtattcaacacctgtgagccattctttgaggagttccgcctctatcaccgtgatgaaaacgggaaaatcgtcaagcttaacgacgacgtgctatccgccgttcgctatgcatacatgatgcgccgcttcgcaaaaatgatgcgcgacatcaaaaaaccaaaagagaaaaagataccagccccaatcaggcccatcgcacggagaacttaa

SEQ ID NO: 21932 - DNA, 489 bp, Escherichia coli
atggcagcaccaaagggcaaccgattttgggaggcccgcagtagtcatgggcgaaaccctaaattcgaatcgcctgaggcgctgtgggctgcttgttgtgaatacttcgagtgggtggaagctaacccgctatgggagatgaaggcgttctcgtatcagggtgaagtgatacaagagcctatcgccaagatgcgagcgatgaccattaccggactcactctgttcattgatgtgacgcttgaaacatggcgcacatatcgcctgcgagaagatttatctgaagtcgttacgcgagcagaacaggtcatctacgaccagaaattctctggcgctgctgctgaccttctcaacgctaacatcatcgcccgtgatttgggcctcaaagagcagtcgcaagttgaagacgtgacacctgataagggagatcgcgataagcgacgctctcgtatcaaggagctattcaaccgtggaactggacgcgattcttga

SEQ ID NO: 21933 - DNA, 399 bp, Escherichia coli
atgagcgaccagcaaatcgaaaaagaaatcgttgagaaaggcaaaacagccccgcgaatcactcctcagcacatcgaagacgtgattaaaagcgagcattactttactgcttatgatggacgtaatggtgccatttccagcaacgaatattgtggcagggaaaaaccagaagaaggcgatcgtgatttatcaccattgaagttgctcactttctgcgtactggtgctgaagaatggcttcaccgtcaccggagagagtgcctgtgcaagcccggaaaactttgatgcagaaattggtcggaagattgcccggcagaatgctgtaaacaaaatctggatgctcgaaggttacttgctgaagcagtcactgattgaaagcgcgaaagagtcatcagcctga

SEQ ID NO: 21934 - DNA, 603 bp, Escherichia coli
atgacggacacactaacgaaacaaaatcctctactgaaatcaattgcagcattttttgttgtttttggtgtattacctgttttagtaatagcggctggacttgttttctttaattcaaatttctccatgtatcattttaatttatattacttacttctttcaatagtatgctcaacaccaatatacttattatatagaaaaagaaaatcttataagattttcaatgatggggttttatttttattcgcgtctattacagcagtatcatatgttacggaagatgagtttatgcttttatctagactgccaagtatagagttacaaatgcaatatccatatcttttcccattagtattattcaaactgaatgtgataattgcctgtagctttgccaagacaatcataaccttccatgaatggaaagaagtctgcaaaagcgaaacaacaccatcctttaaagatagtgtaagcaatgcaatggataaaatgcctacattcattaagaaatcaaagtttttccaaacaatcgccaatatatataataaaaaagatgaaaagcaaaggaatgacaatcatatccatagaaaagacaaaagaagataa

SEQ ID NO: 21935 - DNA, 210 bp, Escherichia coli
atgagaaatctaaacgtcagaagtcaaaacctaataatgatattatttttaatgctcataaatataccggcgattatgagcattgattctactaataaggaatggattattctattatcttcttttgtcttttctatggatatgattgtcattcctttgcttttcatcttttttattatatatattggcgattgtttggaaaaactttga

SEQ ID NO: 21936 - DNA, 324 bp, Escherichia coli
atgaaacttagccaattaacatttttgggtttctatttaaacggtgctcagggttgtggtcgttatgattcaattacgattgaagatattaaatcagaacttcgaaaaggcactttattcccctatcttaaaaaagaattgggaacagatattgatattagcgttttaactgaaaaagaaaaaacacatttaaataatgaatggctaaatatgtcattagctgtcagtgaacgtagaaaattttgtgttgaacgtggcgggttatgcttactggttgcttatattttcgaaagcatccaaagattaaacagcaccaatcaataa

SEQ ID NO: 21937 - DNA, 744 bp, Escherichia coli
atgaaagttattcctgattggtttaaattgacagaaatcgctactgcagaaacaatgcaacgcatatcaaaagctgtagtatcaaataatatgaatttgcagataagaaattctccaatgttggcacattggtttatgcttgattcacttcttcttgctaatagagcaaataaagatggtatgcatgccaatgcacttgccttaacacgtcaatgtgttgaggctattagtattattgaattgggagtttgtagacatccagaggcagctacagttcttcttaaatgggaaagagatcaaatgactcccggaaaactgagaaaatggcttgaagataatgtttgggataaatacggctctgggctatggtgtgagtcttggagcatttttatgcgtgagtttgcaaaagctatccaaccatatgctcattatggaagagacttagcgcaatggcaggtgaggctctgtaatgtggatggcaacaacgctcttcttgaaatgaaaccacatgcttatgatccacaaaaggctaccagaatcactctttaccatgctcttctgacgtatgttctcgggcgaatttggatttcatctaattgcggagatactccattcgaaaatctgattaacaggttaggaatagcgctcggtaaatcccgttatcttgatggtcactctacggattggagtcagcagttttgggcaatgctatgggatgtaaacgatggtgtgatacttgaatag

SEQ ID NO: 21938 - DNA, 558 bp, Escherichia coli
atgtctcatgagaaaaaacagtatataaaatcatataagcatacactggttgagtatagtaaacccacagaagagctgagcaggcaagatatagaaaatagtgatgatgatctcaaaaatcggcaagcaaaagctattttgttagatttttcactaatctttattttagtgccttttattggcttcttgttttatgtgattattaaatttatgaactcaacacagccacgcatgatttcgccaccggacaactatgttgacgtagggatctttttgtttataggaactgttatatggctactttatgtaattagaggtagatcatttaaaaatttaaatgatacaatcttatttactggaacagctattggctttgtattattctttcacaaagatgttacaattatagatcataacaacgctacatggatttttggtcaaatagttttagcgagttgttctgttggcaaagctcttattgcatttacagaatttattgtagaacgagttggcgaaactaaaaaatcagtagaaaagaaaacttatccccaccactaa

SEQ ID NO: 21939 - DNA, 1242 bp, Escherichia coli
atggcaagacaaaccaaacctttatccgtaaaggaaatcgaatccgccaaacccaaggaagcggactacgttctctatgatggcgatggccttgagctactcattaaatccagcgggagtaaaatctggcagtttcgctacattcgccctgtcaccaagaaacgagcaaagaaaagcataggcccctacccgtcagttacccttgccgatgccagaaactaccgtgcagagtcccgctcactcctggctaaacagattgatccgcaggaacatcagcaagaacaattgcgcagttcgctggaagccaaaaccaatactttccagctcgtagctgaacgttggtggaatgtgaagaaagccagtgtgacagaggactatgcggaagatatctggcgctctcttgaaagagatgtctttcctgctattggcgacgttagcgttacagatattaaagctcacacactggttcaggccgtccaaccagttcaggccagaggagcactggaaaccgttcgtcgcctgtgccaacgcattaatgaggtcatgatctacgcccaaaacacagggcttattgatgctgttcccagcgttaatatcggtaaagccttcgagaagcctcagaaaaagaacatgcccagcattcgaccggatcagctacctcaactgatgcagacaatgcgaacagccagcattagcctttccacacgctgtctgttcatgtggcaacttcttaccatcacccgtcctaccgaagcggcggaggctcgctgggatgaagtagatctggatacgcgggaatggaaaatccccgcatcacggatgaaaatgaaccgtgaccatactgttccattgtcagatgaagcaatagctgtgctggagatgatgaaaccgctaagcggcaaccgagaattcatttttcccagccgtatcaaaccacagcaaccaatgaatagtcagacggttaacgcgtcactaaaacgtgcgggctttggcggagtgcttgtttcgcatggcctgcgatctatcgccagtacggcccttaacgagcaaggctttccaccagatgtgattgaagcagcacttgctcatgtggacaaaaatgaggtgcgtcgtgcgtataaccgcagcgactatcttgaacaacgccgcccaatgatgcagtggtgggctgattttgtgatggctgcggatcgtgggcgcatgattgaaggagggatgaaaggaatgcggcttgttggttaa

SEQ ID NO: 21940 - DNA, 2352 bp, Escherichia coli
atgaaagtgatagttaagcgtctagaagtacgtaattttaaagtttttgaaaagcttgagttaacccttgaaagcgatcatctcgtcgttcttgatggccccaacggtttcggtaaatcgtctttttttgacgctatggagctcctgctgacaggaaagattcgtcgctatattgagcttgaagaactgacagtggatcggcgtagcctaaaaacaggctgcccttggctattcaagcaagcaaaggtaaattcctggctttccattcgtgcagagattgtagttaatggtcagagccatttccttgagagagcggccagtaaagctgttctggacgagcataaaggtgtaactgatctaaggttacctctttatgaattagtagactttagtgcggagcgggttgaagccgtttcacaagaagaaacttatctttcaaccttactcggtgagcaatatcagcgtgattttgaattattccattatgttgagcaggaagaaaatactcgcttattaaaacaaaaggaaaaagacaggcagggtcagattgcacaccttttcgatattggtgatattcaggggaaaattaataacattacacaggcgtcgaccaaaataggaaatttgtgtaacccgcagaaaaaaaacgaactgaaacaacttaaagataaatgggatacagctaagcagcggctgttaccggcaggtagttctgtcacatacgaaagaattattgaagttacggatcagccatgggatcgtgaagtagtagagtttggtgtaaaacaatttgaacagtggctatccgcagatggggaattgtttcgcgttggacgttttatagataatttcaagcattataaaaatcaactgtataataatgaattggtgaataaacttcttcctaaaaaggaactgcaacaacgtctgttaatgttttatcgtccacttgaacacataaataaatgggaggaagaggtcgcttgctttgatgccgcactagcgataagtgacgccttcaaagacctaataaaggctattagcgaggatcgcctgtcaattacagctccattagtaccactccttccgcccaatataacagcagaggagtttcagcaacaggtcgccggactcaaacaacagttgactaccgcagacaaagttcaggaatgctacgcggaactaatacagacacgtgaactcttgttgaatgcgttcagggagcatcaggcacattgcgatcccacaaatatttgtccgacatgcggacatccttggctgacggcagcaacgcttctcgaaggaattgaaagtcagagcaaatcacttgaaactttagcagctcaacaaaataatcaattctcacaaacattagtaagcttcagacgcaactggcaggagcctatcgaactggctctgcagtcctgtttagagcaaaagaaagagatcgttgaacgtaaacgtcgactcttaagcttaacagaagagcaaacccagtggctggaaaattattatcaacatcttcagacggcaggtatcaatattcaggagcttctgtctgaaaatttcgagcctgtaacgcagcaagcaacagacgaactagaacgtcaggtccgggaaaggtttaaatcctttgacgatagctgcatttttgatgattacgagaagatttatcgagaaatttttaaaaacgatccactggccgttgaacaagttaccccccaacgtcttgaattaaaaaaagtatatctggagcaacagtatgccattgcgtcttctaaatttatcttggagtgtgaacaggagtataacaaagcagatctgctgatcaaaaaagccatcagatttaaagagtatctacgcaaactcaaaaaaatatatgaagatgagaaaagattatattttgaatctatcgtcaaagaaattgagatcctttttcatatctattctggccgccttatgcaaagttatcagcaagggttaggcatttttatagaaaatgacggtaattcaatagcttttaatgaaacacctggacatgggcatgatgctgtcttttccatgagttcgggtcagctttcagcactggtgttatcatttacgctcgcgctgaaccagcggtacgcgaaacatactttgttgctagtagacgatcctgtccagacactggatgaaatcaatgtggcaggatttgtagagttgcttcgtactgaatttcgggaccgccagataatcatgtcaacgcatgaagatcgtatgtcggcatatttccgttataaatacaaaaaatttggtatgtcggcaggaagaatcaacttcatggaagaagcacgtgcaggtattaatggttga

SEQ ID NO: 21941 - DNA, 333 bp, Escherichia coli
atggttttctgtgaatcaattactactcctagcacctttactgaatataaatcaaactatctagaaggaggctggcaaaacctattatacaggattgcgataaagcttccctttattgcagttaatagttcgggtaattccgatctagccagtctcgagagaaacattcgagaaaaaatccagcgaacagctaatccagatgtactgcttgcaacagattcggctattgattttctagcaaatcagatcacatcgccggatgtgctgccggaagatttattgacctacatggatgcgaaattgttggaggcaggctatgaaagtgatagttaa

SEQ ID NO: 21942 - DNA, 333 bp, Escherichia coli
atgcagaacctgattgaacaattgttggaatcagaaggattaacgcgtaagctctccactgacttagcgttatacgaatacagtagtactggaaagacaaattattggttggtaatccatggcgaaccaataatcactcctgaaattcaggctggatggttaagcaaatgtaaaaatgctactgccgatcctgctcttgagaaaaatattaatttattgattgtctggaatactaatagcagaaaagtgttagccagtaaacaagttcaccatatagaggaagacagctatttttttaaaagcatgtacttccttacaccaccgaggaattag

SEQ ID NO: 21943 - DNA, 1317 bp, Escherichia coli
atggcagtagctactcaagttttaccgcatacagctatttctacgtggagtggatttatctatcagggcaagttggcgttgtaccattgtttgaatctgatgtcgtcagattatgccggtaatcgggatttgaaactgcagttagaaagccaagatgacttcgcgatttttcgtcgccagcaatgcctatcaatgcatcaggtaaaagcgtacaaagacccccgcttttctgcatatagtgatggtatcagcactcaacgagataatgcgaggcaacggggagtaccactcgcttactttcatgtggcacgtgaagtaacgaacgttccggtaacgtttgtggctgactatggaccagtgagattttatacttaccctattccgcctgatgcacctggaaatgtcacacaatcgttttgtccgttgaatcaggtagatatgtttatccgggatgaactttccagtctgcttgtgaatgctgcaatgcaacccgcttggaagaattatattgttgcgaatattcagaatacgcttgaagcaatagtaaattcgaaggtcattatgacccacagcaagatacacgagtccactcgtcgtcagaccgtaattgcagccagcgaattcatcgagttttcagaactgtatggtgtaatcgaagcagatgattatgctccgtttgagaatgaggaattcttccttagccgtctgcagattgatattggcacatactaccaggagttttgtgaacgccaagacggcctctcgcaggcagcatgtcaaaagttagatgactacctggctgctattgctgagctgaatgttgggggaatgaaggcattcctgcgagcaactatgccgcataaaaagggacgttttaaaacacttagtgaatttaaggaccaatcactcgatcgtgatgcaatgcgacttgggatgtttacgattttctggaaactagttcaggctgcacgtaatgatggttctgatgtcgctttctcttggctaaatgacgggcttttctactatccaacaggtatccaccatgctgcagagcatcaagatagtatctgtcatgacatcatgcaacaggcaattagtgaagatgtggagtgtttatttgagtgtggtgcacttatcactagtgccatagacagaccttcaatttctgatgtaatcataggcattgacgctactgagggagtggataccgctgaatacgaattgctgagggaaaaccgcattgggaattataagaaggtggctatgatttctttaaacaatgtacctgagagtttgaaagatgcagaacctgattga

SEQ ID NO: 21944 - DNA, 3201 bp, Escherichia coli
atgaagcaatcagcttacaacatcattcaagaaaaacgtcttcagccatggaagggagaagaagaagtccggtttgcctggaacaaagccttagaagacgccacaggtttacatctttttgcagaacgtgatcgtaatgatgctagttacaatcacgtcatcattgaatacaaagcacctggatactttaaaggtaagaaagacagtcctgcatttttgaatgccactaaagaacggcttctgccttatatagaaaaaaaagcagcagagacccaaattcctgtgtcagactttatcggtattgcgattgatggtgagcatatttgttttgcccaagtcattgatggtgagatcaatacccaacacttgatgccattttctcctgaatcagtagaaatggtagttgatgctcttagatcagatacccgtaaagggcttaccactgaaaacttgctcgcagattttggtcatggttccgctaatgcgcgagctttcatgcagcaactctccgatgggctagctcaccaacttgctatcagcggaaataacaaagtaaaaatgctttttgaagaatggcgtactttgtatggccaggttgcagacctatccatagtgcaagctgaagccattacaaaagaactgaaatttacctggtcgggatcaccatcagattcaatttctgctcggctttttgttcttcatacctacaactcgatgctgatcaaactgctggcagctgagataatttcagcacatggtcttacctcaatagaacaaccagcacaaagtatggcagcgttgaaaaatgacgctcagatgcttgaattcctcggctcggcgatagaacgctccactcttttccaagaagcaggaataaatggtttcgttgaggaagctatattcagttggtatcttgatgtagccaacttgaatactgttcctaaattgcttccaaccctaagacgcttgctttctgtcttatcactttatcgccttgaccagctatctcaaacacgcgatgtattacgtgatttgtatcaagggttagtaccgggaaaattgcgtcagagtttgggggaattttatacaccggactggttagttgacttcaccttggataaagtcagcgatcctaaccttatgaccaaaagagttcttgatccaacttgtggatcaggggcttttttgctggccgttatacgcaagaagcgtcaattggcaaaagataaaaatctcagcgccagggaaacgttgaaactcatctgtgacactgtatggggttttgatctcaatccacttgccgtacagacagcaagagtaaactttctaattgaagtcgcggatttattatcacaatgcccaggccaagaactggaggtcccagtacttatggccgatgcgatatattctccagcatcctcacccaaaacatccgatgccatcattcagtatcgtattggcagccagtttgcaaaacttgatattcacttgccatctgagttggcacttgatcgcatcaaccttgatgtgatgtttaatcgtatgggtaaagatgtcgagcagggactcgattttgatgagtccatggataaaattaagaaggggcgttacttttccgatgatcagctcaaagaatgggatactcccctgcgttacacatacgatcaaatactgaatctacatcgccaaaattggaacggtatatggttcaggattgttagaaactttttctggtcggccactgctgggcaattcgacttggtgatcggtaatccaccatgggtaagatggtcgaaactaccggatttatatcgcgagcgggtaaaaccgacctgtgagcaatacgggattttctcgaatacccgaatgcacggtggtaatgaactcgatatttccgccatgatcacctatacggttgcagacaaatggcttaacgccggcggttgtctggcatttgtcatcacaggtacgttgtttaaaaatccatcatcagcaggtttcagaacattcaaaatagaacctttgtgcgaggattcgctatacattcaaccgatatcagttgatgatatgaaaggcctcaagcctttcgaagatgccagcaaccacactacgattgctgtgttcgaaaagtcaaaaaatatgccagaatatcccgtctcatatcgggtttggagcccttgtgtcggtaaaaaacgggctataaaatcctctcaaaccctagaagaggtcatgaacactatccagtatgaagaaaaagaagcctttcctgttaatgaacctggttcaccatgggcgatattagcaccagaccgatttgaagcgataaaatatttatctcgccaatgctcatggaccaaaggtaggaaaggaattacgaccgaccttaacggtgttttcttcgtacctatcctcaatgtaaatgaaactcatgttcaaattcgaagtcggccagaggctggtaaaaaagacataggtccggttaaacaggcttgggtagagcctacagacctctaccccctcataaagggggcaggcgattttgaagagtgctatctcaaaatcaatgctcctgatgttgacaataaggaccgtcttttcacatttgttcccaatactgggatatccactgccgactataccgaagcagaagaacgtctaaatagacatgagctgagaaaaactgcagcttggttcgattcatatgaaccattactacgagcacgttcaacatatcgtagacaaatgaaaggtgcaccttttcatgctgtttataatgtcggtgagtacacattcaagccttggaaagtaatctggcccgaaatgtcctcatcattctatgcagctgtagcaggaagcgcggatgttcccttactaggttctcgtccctacatacctgatcataaagtctatttttcagctttcgatgataaagaaacagctttctacttatgcggacttctaaattcacaaactgttcaggagtggattgatgcccataatgtttctatacaggttgctgatgtgttcaaacacttagatctacctaagtttaataaaaatgaccacagtcacatccatctggctcaaaaggtaatgtcagcacatctggaacataataaaaacacccgcaaagctattgtggatgaaattaaaaaattagctgaggagatcctcacaagctggagtaaaaatttcacttaa

SEQ ID NO: 21945 - DNA, 723 bp, Escherichia coli
atgaaaaataaaaattttgatgttgccttcgaagagcttctagatgaatttgagagatgtgtgaagaaagtgaaagatgttagtcactttaaacagaattctgccgagaggaagatccgtaagctcgaggaagatgcccttaccgtgattactgagtacagaaatggcaagattcaggctgacaaatatacttatcgggaactcactatcgaagaatatgttagtagtatggagtcttctgccagatggcagggggagcccagtaaatttctggaagctgcttttgtatcccataagtggggaatgtcacagtacaagttgggccataaagctgaagggcgtaaacatgctttgatagcactaaaactgatatatatgtggactggagccaactgggctctggaaattgtagcggctaaagagcagtcagataagataaaaagagaggctgcaagccttggtggcaaaaataaagcgcagaattatagacgagtcaaggatgaagttattcgattattgaaggaaaatatgcctgaacatggttggaagagtaaagtcgctgccatcaactctttggagaaggagatcactaaatttattgaattagatactagtaaaaaccctgattggacctcatgggaaaaattattaagaacaatcagcgactggtctagaaatgatattgagttaaaaaatgtatttaaaaaggtagtgcagaaatag

SEQ ID NO: 21946 - DNA, 198 bp, Escherichia coli
atgcctacacaaactataaagattttaagattacctgaagtagtcaagaaaatcgggatcaaaagatctaccatatacgactggcttaacccaaaatcaccacgctacgacgtaacgttcccaaaacaaaaacgcctgggaaggcaatccgttggctggctggagtcggacctggacgaatggttaagccctcgttag

SEQ ID NO: 21947 - DNA, 885 bp, Escherichia coli
atgtctaattcctttgaacggggcattaatgtcctgaagcaacctttatccattcttcctgaacatatctcagatttggtgctggagcatatacgccagagtattcattacgaacccgtgattggcatcatgggcaaaacaggtgccggaaaatcctcgctttgcaatgccctttttgaacatcctctcagcccagtcagccatgcagaaggctgcacacgtaaacctttgcattttaccctgaacgcaggaggacgcagcctgacgctggtcgatctgccgggcgcaggtgaatcactgaagcatgatgagatatatcgccagatgtaccaggaacagttaccgaagctggatctcattctctgggtgatgaaagccgatgaccgagcctgtaccacagacgaagagttccaccgttttctactggattgtggcgtatcgacagacagcattgtttttgttatcaaccaggctgacaaagccgagccatcactggaatgggatcgtgaaaaaggatctccttcagtggagcaactcatgacgctcacagcgagaagtgctgccgtttcccgccagttctttaccccttacccggtgcatgctgtttcagcaaaaaccggttacaacatgtctcgtatagttgaaacaatgatttttgccctgccaccagaggctaccagtggcgtctttcgccagatcaggaaagaacatcgcaccaaagaatcggagacgaaggcccgaaaggatttcgcggatttgttgggagaattattgagcataattctggaggccatacctctccccaacgtgatacgcaacgggttgggagtgctcagagaagggctggagaatgcagctaccgcaatatggcactggtttttctaa

SEQ ID NO: 21948 - DNA, 717 bp, Escherichia coli
atgaacactacatcgactcgttatgaccggtttgccatcaggctgacacagattatcagccggttactgtcaggagagtctcttgacctaaaaaccctggcagaagagtttggagtatctgaacgaacgctacagcgagatttccaccagcgattactccaccttaatatcgttagtgagaatgggcgctggcgacttgacgggaaacgctttacagacagttcgttagatgttctggcgtttatgcgcaacaccggaatcactcaattatttccgtcacctgatcgcaggttgatgcattacctcacgggtgaaacgtcatattctccctgccttatctggccttcatcgcattctgactcggttgtgtcatcagaatgttttcagcgactgatacaggcgatctgtcaacaaaactgtattcatttgctgactggcaatgattctcacgcggtctttgaaccttatcgtcttattcacacggaaggaaattggtatttagttgcctgtcaggccgaaataatcagggttattccagtagccagcatcaaccaggtgaagttaaccacagagagttttgtgcgcagagatgacatctgccatctcactgcgtgtgagcggttcatctcatccttacctcatgttccttatatccatgatgtaatgaactcggctaatcatcgttcatataaaaaatattattcatcaaataaatag

SEQ ID NO: 21949 - DNA, 471 bp, Escherichia coli
atgaatattgtaaaaataaaaacatctttatatttaataatgttgttaagcagttcttcgcaggctggtcaggaaaactgggagcttaaatgtacacttgatactggtggggttatgacactgagtcataaaaaagataccgtatatattacctataaatcacaggataaaagttctgataaaggcagcgtagtcatcaaaatggatactaattcaggtgaagcacagcagtccatcacagcaaatgatgttactgacaatagagtctttgtattgcgaggaactagagagaatatagaaggcgctatggctatcacttatgaagagtacaaaggtcagcctgatgctcatatcagtgtcatgaaccctatgggtaaagaaattgaaagtcacgcctgtctgaccaatacgatcaatgccaggagcaatttactttatacaggcatcgaacatatgcccttcattcattaa

SEQ ID NO: 21950 - DNA, 720 bp, Escherichia coli
atgtctaaaagaaaagtacttactggattgtttatcagctgctcaatatttattcttgctggctgtgataatgtatccgcttcagacaatcaggaaattataaaatcacaggtattatcaaatatagactcaaccagaaccctggggactgcattagagcatcgccagcgatgtgaatcgtttaaatgggaagatggagccgatgagcaaggacgccaaactgttacttatacgtgtgatatgtcggcatctgcaactaatagtatctggaaaagggaaatgactcggtttgctaatggctacgccagtttgatagaaagcgcaaagcgctctatagaccaatacaatgaggcctgtgtcgccaatggaagtgatccttattgctttaagaaagaagcagacaattcaaaattgaaagaaggtttaagtgctgctaaaaaactggctgaaaatgaaaccatcaaagttaagcaagttattatctggagcgttttaccagatacagagcaatcagtccaactgctctcagcaaaatattattttgattttaataatggatctcagagctgggctagccaacaaggagataaccttctaaaagatatttacaacaacaatgagaacaataaccccattataggtttaatcggctacgaagcagctaaaataaactgttcatatagagcagacactgctgcttgtaattatttaaaatggtag

SEQ ID NO: 21951 - DNA, 279 bp, Escherichia coli
atgattaggtgccacctgaacagactgatgggtgaacgcagattaaaggttgccgatgtggtacgcgataccggtctttcccgtagtactgtcacagcgctctggaaagataacgccacccggattgagctgccagtgctaagcattctctgtcattattttaattgtgatgtcagtgagttactggagtttacttctgatgaaaatcacgttgaattatctcatccaggaaagggtctaaataatttttcacatcgtgtctggtttatgcgtaaataa

SEQ ID NO: 21952 - DNA, 1413 bp, Escherichia coli
atgaatacgaatccgattagtacgaatttctcgaaactagttttcccacaacgtttcgaagaggtaacagaggccatacaaaccataacgcatgcaccgacagagttgatcacaggagttcagttgtcggtaatgtcactcgccgctcagggtgtggttgtgtttgaacacagtgatggaagaagaagccctgtgtctctttacagcattgtgctggctgaatcaggggagaggaaaacggcagtgtgcaatctcctgcagaaaccgatacaagactttcagaaaaagcatctgaagacttatgaggggaaaataaatatctatgaagctgatttgcagtcatgggctgtcattaacaaaactattacccgccagattaggaaaaatctcgagaaaggaggtgatagtgtttctgagcaggagaaattgagaaagcattacattaataaaccaacccccccaaagcgaccaaagcttttgtacagtgatgcgacacctgaggctattacccaggggttggttgaaagcataggtacgtcaggtttaatctccgatgaaggcggtgtgatttttaatgggcgggcgatgggtaatacgcctctttttaatcaactctgggatggtggtggtgttgatgtggagcgtaaagggcatcgactgaacattgatgacgcacggctaatgacgcttattgttacgcagaaaaatgagttgattttattcaggaaaaagcatggtactcgtgtccaggggaatggtttttttgcccgctgtctgtggtctggaactacatcaacgcagggtataagaactcatcaatctgatgtacaggtggataccagcgttctggataaatttaacaagcgagttgaggagttacttgaacaaacgctcgccggaacaacaccttatgttatacatttttctgctgacgcgaagattcgctttgcacagtatcaaaatgaaattgagcgaagaatattagcagagaaaggaaagcatgatgcattgccgggaattttatcaaaacttcctgagaatgcggtaaggctggctgcattgatgcactttttttatgaatttgagggtgatgagattaatgttgaaacactaaactatgtttttctgattatggaatattattaccaacaagcagtaaatatattgactgccagcctgagttccgatgaagaggatgccaaaaggctctgggagtggttgatgacaggtcctttcaggaataatacctctgtcgcgaagtcacacataagacgttatgctccttaccagcttcgtgatgtggtccgttttaaaagagcgttaagatatcttgaggatgctgctctggtatctataaataaatacaaaaatagcaacggtacggtcagccaaatggtggatatcaatcgttaa

SEQ ID NO: 21953 - DNA, 495 bp, Escherichia coli
atgtgttataatataacagaattagttccgaaaactattcagtataaatatattaaatcccatggccgactaaataaatatcagctaaaacggatagagcagacaattgataaagcgctggatgcgtaccccagggtgctagcgataagggtggagcttcacatgcctgtatgcagaccgctctgcgatatgcttcttgcagatgattatgccagaacagatgccgctgcaatctcacggttcaatgcttcacttaatgcgaagataaagcactatgagcttaaacagaaaaacgcaggtaagcgggtacgtgaaacttcatctcgtattgtctgggcaagagagttctgtcctgcaagctataaaaaacactatcatgttttacttctgctcaatcgggatgcttttaatagccttggttcgtttgagagtgacaatggaatactgcttcgccttatccgtgaagcatggatgagtgctattaatttaatttaa

SEQ ID NO: 21954 - DNA, 819 bp, Escherichia coli
atgcgattagcaagccgctttggtgcggtcaatatcattcgtcgtgaccgcccattaacccgcgatgaactagcgcactatgttccgagtgtgttcagcgaagaaaaacatgaatctcgtagtgagcgatacacctacatcccgaccattaccctgcttgataacctgcagcgtgaaggctttcagccattctttgcctgccagactcgtgtgcgcgaccaaagcaagcgagagcacacgaaacacatgctgcgcctacgccgtgaagggcaaataaccggtaagcaggtgccggaaatcattctactcaacagccatgatggctccagctcatatcagatgttgccgggactttttcgtgcagtctgccagaacgggctgatttgcggtgagagctttggtgaggtacgtgtgccgcataaaggcaacgtggtggagaaagtcattgaaggggcttacgaagtgctgggaatatttgaccgggtggaggagaagcgcgatgccatgcagtcgcttttgttaccgccaccagcacaggaggcgatggcgaaagcggcattaacctatcgctttggtgaagagcatcagccggtgacggaatcgcagatcctttccccgcgccgctggcaggatgagagtaatgacctgtggaccacttaccagcgtattcaggaaaacctggttaaaggtggtctgtcggggcgaacgaccaaaggcaagcgtgcccatacccgagcggttaaaggtatcgacggcgatgttaagctcaatcgtgccctgtgggtaatggcagaaagtctgctggatagcatgaagtaa

SEQ ID NO: 21955 - DNA, 1725 bp, Escherichia coli
atgactacccgcctagataaattaaaattatgtaattccaaacccgatttagcacggcttttaggaattgatcccgtatttatgacgcgcgtcatatacataagaaatacagataatctttattcacaattcactattaaaaaaaagaatggtagtgataggcacatatcagccccagaccctgaactcaaagaaatccaaactaaactttccgacttacttcaagattgcttaaataacattcgagaaaactcaaaagaagagaataatttctcccatggatttgaacgcaatcgtagtattattacaaatgcagaaaaacataagtcaaagaaatgggttttaaatattgacttgagcaacttctttgatgaatttaattttggaagagttcgaggttactttctaaaaaataaaaacttttctctcaacacagagctttccactttaatagctaaaatcgcctgtcatcaagataagttaccacagggaagtccctgctctcccgtcataaccaatttaattctagtttctttagataggcggctaagtaacttgtgcaatcgtgcaggttgtacatatacacgatatgccgacgatataacaatatctaccaataaaaaagagtttcctcgcaatattattcaatcccacaacgagaactccatagatttaaataaaaaattccttaaggaaataatttcttcaggttttcgaataaaccttaataaattaagactttttgacagaaaatgccgtcaagaggttacggggttgacagttaataggttcgtaaatgtcgataataaatatgcaaaaaaagttcgcgcaatggcacacagtctgtttactaaagggggatacacattaacagacaaaaaaacacgcgaacaaagagcaggtaatatcaatgagttaggtgggatgctcagctttattgattatgtcgacaaacacaataatagacttcctcataccactaaaacctcgcttaacaaacgagaaaatgtatattctgatttcctttactattctgctttttgggcaaacccaaagccaactatcttgactgagggaaagacggacattacgtacttgcgagtagctctggattctttatcagcaaattaccctaacctgattggcaataaaacaataggtaataaaatcgtacgagactatggagttaaattcttcaaaaacaccactaaaagtaagtattttttaaacttagatggtggagcatcacaccttaaagacttcattgttggctatgaaaaaaagacaaatgcgtttaaagcaatcgccgaacaaaaacctgtcattattgttttagataatgactcaggcagtggtggatccaatgggatcttccaaactttaatagggaaagcattccctaacattactttgtcgaaagatgaattaagaaatcaaaaatggatttgggttacaaagaatttatatttaatctttactcctctcaatggattaaatgatagttcgatggaggatcttttccacagttcggtgttacaaaccaagctggggggaaaagtatttaatcgaacgaatgcaaaatgcaaagataatgaatatggcaaagagttttttgctactggcgtggtgttaaagcaacgtaaagcaattaacttttcgaactttaactacatttttgaatcaatcaccgaaataattgatcacaatgcttcaaggaagccttaa

SEQ ID NO: 21956 - DNA, 783 bp, Escherichia coli
atgaacatcattgccattatgggaccgcatggcgtcttttataaagatgagcccatcaaagaactggagtcggcgctggtggcgcaaggctttcagattatctggccacaaaacagcgttgatttgctgaagtttatcgaacataacccacgaatttgcggcgtgatttttgactgggatgagtacggtctcgatttatgtagcgatatcaatcaacttaatgaatatctcccgctttatgccttcatcaacacccactcgacgatggatgtcagcgtgcaggatatgcggatggcgctctggttttttgaatatgcgctggggcaggcggaagatatcgccattcgtatgcgtcagtacaccaacgaatatcttgataacattacgccgccgttcacgaaagccttgtttacctacgtcaaagagcggaagtacaccttttgtacgccggggcatatgggcggcaccgcatatcaaaaaagcccggttggctgtctgttttatgattttttcggcgggaataccctcaaggcggacgtctctatttcggtcaccgagcttggttcgttgctcgaccacaccgggccacacctggaagcggaagagtacatcgcgcggacgtttggcgcggaacagagttatatcgttaccaacggaacatcgacgtcgaacaaaattgtgggtatgtacgccgcgccatccggcagtacgctgttgatcgaccgcaattgtcataaatcgctggcgcatctgttgatgatgaacgatgtagtgccagtctag

SEQ ID NO: 21957 - DNA, 531 bp, Escherichia coli
atgtccgggccacaaaggctgttctttgctatcgaattacctgcacaaatccgcaaacaaatcgttcactggcgggcagagcagtttccccaggaagcgggccgcccggttgccgccgggaatctccatctgacgttggcatttttgggtgacgtaagtagcgagaaacagcagatcctcagccagcttgccgggcgaattcgtcagccaggtttcaccctaagactcgacgatgccgggcaatggcctggggctcgtgtaatatggctgggaacacgtcagccgccgcgcgagctgctacaactggccaatttattgcgctcacaggccgcacgtagcggctgctatcaaagcccgaaaccttttcatccgcacattacgctattgcgcgacgtaagccatgcggtggcgattcccgcaccaggattttgctggtcatttccggtgagtgaatttgttctgtatgcctccacgtttacccgtggctctacccgctatacagcattgcaacgctggacattaacgccataa

SEQ ID NO: 21958 - DNA, 2892 bp, Escherichia coli
atgattggtacaacaccctatcatgcgaaatattttgcgcatgaactttccattctccattcaaacaatggggtggaccgtctgtctcaatcgctgtttgatgcaagcgtagatctaaatcctcatcaaattgaggcggctctttttgctattgaaaatccgctaagcaaaggtgttgtgcttgccgatgaagttggtttaggtaaaaccattgaagcgggattagtgctttgccagttgtgggctgaaagaaaacgtaaactgttgatcatttgtcctgcttcactgcgtcgccaatgggcgagcgagttacaggaaaagttcaatctaccttctcaggtgttggacgcgaaaatgtatagccagcttcaaaaagaagggatccataatcccttaaataataaatcgatcactatcatgtcataccactatgctgctcggttagaagaaaaattggtggctgaaatgtgggatctggttgttatcgacgaagcccataaactgcgtaatgctcatcgagaaagtaacaaaatggggcaagcgttaaagcgtgcgcttgatgggcggaagaaattactactgaccgcaacgcctttacagaactcgttgatggaactgtatggcatgtcgacgcttatagatgaacataccttcggcgaagttaaagcgttcagaaagcaatatatgcaggcagatagcgatattgcggagttgaaggggcgattgtcgcgttttatcaaacgaactctacgcaagaatgtgctggagtacatcaagtatacagaacgtaaagcgatcactattcctttctatccgagcgaacaggagcaggatctttatgaacgcgtacaaaaattgcttgaacgtgaggatagctatgccttaccaaaacgacaccggcatctgacgggacttattctcagaaagctactttcctcaagtacgaaagccgttttgaataacttgcagatccttaagagtcgtttagaaaggttaaagctggaaggtatcgttgaagatgatatggacatcatccaacagatcataatggatgatgatcttgaagatgacatcgttgaagatgccgaatcagtagcgccagatacagagtgcaaatctgtggattcagatgcgcttcaggcagaaatcaatgagctggaatcactcattgtcaaagcagaacagattggcactgataccaaatcaaaagagttgctttctggcctggagcaaggttttgcacagcttgccgaaatgggggctgcaaaaaaagtcatcatcttcacggagtcgatgcgaactcaacagtaccttgcacattttctggaaaacaatggctaccagggaaaagtagtaacctttagtggcacaaacaatacaccgcaggcaaacaagatctaccagcaatggcgagaggaatatcagggatcttctcgtattaccgggtcggcgcaaattgataaacgctcggctttgatcgaccacttcaaagatcatgctgaaatcatgatagctacagaagctgcagctgaaggggtgaacctgcaattttgttcgctactgatcaattacgatttaccctggaacccacaacgcattgaacagcgtattggacgttgtcaccgatacgggcaaaaatttgatgtggttgttattaacttcctcaatcagcgaaaccaggccgatcaacgcgttcttgaactcttaactgaaaagttcagtctgtttgatggcgtgtttggcgcatcggatagtgtgcttggcagcatagaaaatggtgtggattttgaaaaaaggatccagtcaatttatgagtcatgccgtacgcccgaggagatagagcaggcttttgaaaggttgcagaaagagctgaaagatgaaatcaatctcaagatgcagaagacgcaagaacagttgcttgagcattttgatgaagatattcacgatatccttaaaataaggcttgatgaagctcgggagcgtctggataaagtcggtcgttggttttgggccgtgacctgtcagcagctcaaacaatatgctgattttgatcatgagcatcatcgtttcactttacgtgaatcagtcaatgaactgcctgtcgggcagtaccagctgttgcgcaaagatggcaggcaaaatagtgcgttacaaatgcaggatcaccacagttttgcatatcggatcaatcatccgctgggtgagtacgtcattgagggggctaaggcccaggagacgaaaacagctgaagtcatcttcgattacagtaaccacacaacgaaagtctcggtggctgagcagctgaaagggcaatcagggtggttaacactaaatttgcttactgttgatgcgtttaaccggcagcaatttttagtctttaccgcaaaaactgacaacggacgtgtggtagatggtgaagcttgtaaacgtctgttcaacttgtctgcaataaccaacgaaaagctggataattcggcaagtttagatgcattacctgatgacttggtcttactcaagaacaggcaaattgacgccaggcttgcggaagttttggagcagaacaatatcctttttgaagcggaaagagataagctggaaaaatgggctgaagacatgatctttgcggcggaagaagcattacgcgataccaaaatgcaaatcaagtcgttgaagcgagaagccagactggcgcaatcgatcgaagaacaaaagcaaaaccaggaaaagctgaagctactggaacggcagcagaagcgccaacgtatggaaatttttgacattgaagatgagatcgctgacaagcgggatgaactcatcagtgcccttgaagagcggatgaagcaaaagacggatatcaccgagctgtttaccatccgctggaaagttatttaa

SEQ ID NO: 21959 - DNA, 258 bp, Escherichia coli
atgctgattcgttttcctgaagataccggtactctgccctggatcctgttaaaaacaccttacaaaaacggtacggtcattaccgccacggattattattttattcaggacatcatctctgtggttcatgcggttcctgcaatacaattccgtttgggaaacacggtcctgtcagccagcggaaaaaatgtcactccgctcccggacgacagcggcatacaaaaagaaagtcattcaaaaaatatccgttctccctga

SEQ ID NO: 21960 - DNA, 348 bp, Escherichia coli
atgttttccagattatttgtaaaaaaacatactccagctatggtggcaggtggcctggtatttctgttcattgttctgctgacatttttctggaaaaaagcagagctggtgaatgacagccagaccagagttaatttcgcacttggctatatagaaaacattctcaatcagaacaacagcatcagcccggaagcagaacatttgcttctgaataactgtaacgcagatactcagcgtgaattaagcaatctgctgctgaagcgcccccaacttcgtgcactgagcctggcaagacaagaggctgtattttgcagccccccccggtttgcctgtcggtccggttgctga

SEQ ID NO: 21961 - DNA, 477 bp, Escherichia coli
atgcagcagctttcctttctgcccggagagatgacgcccggcgagcgcagcctcattctgcgggccctgaaaaccctggaccgccatcttcatgaacccggcgtggccttcacctccacccgtgcggcacgggaatggctgattctgaacatggcgggactggagcgtgaagagttccgggtgctgtatctgaataaccagaatcagctgattgccggtgaaaccctcttcaccggcaccatcaaccgcacggaagtccatccccgggaagtgattaaacgcgccctgtatcacaatgccgcagccgtggtgctggcacataatcacccgtccggtgaagtcacacccagcaaggcagaccggcttatcacggaacgtctggtacaggcactgggcctggtggatatccgggtgccggaccatctgatagtcggtggcagccaggttttctcctttgccgaacatggtctgctttaa

SEQ ID NO: 21962 - DNA, 252 bp, Escherichia coli
ttgacgaacttcatcacctgcggacaaatgttttgtgtatttaacgaagttatgcagaatgactatagtcactggttatggcaacaatttttcggtgatgaccggggaatcatttgggcttccgttgattcttatgaactgatgatgttttatcaattgaaaccttacacgggattctttcagtgtgtacacggattaactttggtggaagccgagtctcaattagtaaacagctacgcattgcactgttga

SEQ ID NO: 21963 - DNA, 399 bp, Escherichia coli
atggcatcggtactggtgttgcttatggcaccagctgccatattaacaattttgcgttttgttgcgctgttgccaactgaaaccgtattgcttgcatctgtggtcgatcctgcgccgatagcgacagaattgtcggtcgctgctgcagcccctacaccgatggcgacagaatcattgccgtttgccctggactggctaccgaaagcaaggctgttgctgccaccagcggcactaccctctcccaatgcgatggcattctctcccgaggacaaactgttacttcccaacgcgattgagttcactttgcttgcaatgctaccttgccccagcgcaatcgcattttgttcgctggcctcactggtgctacctaatgcaatactggattcgccagatgcctga

SEQ ID NO: 21964 - DNA, 420 bp, Escherichia coli
gtgcgcggcgctgaatgcgccagctgctttgttccacagcagggagtcgtcaccgagaccgttaacagcgtcagtcaggttggtgatattggtggtgttagtggcgatgttggtggtgttggtcgtcacgttgtcgttggtggttttgagctgggagccgttaacggcgtcagtgctgccggcagtcaggttgccagcggtgacattagtgattttgctggtggcttcggtgccgtgtgcggcactgaatgctgtgccgttccacaacagagcatcctgctgcaggtcgtacaattgagagccgtttactacatcggtgctggttgcagaaaccgtacctttagcaacattagtgattttgttggtggcatttgcaccgtgattggcgctgaacgcccccgcggttttattccattgtag

SEQ ID NO: 21965 - DNA, 1263 bp, Escherichia coli
atggcattaaccgataccgctatccgcaagattaaacccaccgataaatcctacaagcttacagacagttcaggactgtacctgctgatcaaacccaatggctcaaagctctggtacatgaagtaccgcatcgacgggaaagagaaaaagctggcctttggcccctacccggatgtttctttgtttaaggcgcgccagctacgtgacgccgcacgcgctaaagttcgtgaagggaccgatccttctgctgataaaaagatcgcacagcagaaaaagaaaaacgggcaaacattccggcagatcgccatgaactggcacgccgatcacaaacgctggtctgcgcattatgcaacgaccatccagcgcaggctggaaatgtacgttttcccggatatcggggaaaaattcatcgatcagatcgtcacggaggatttgctgtttaccctgcgcaaagtcgagagtaaaggctttctggaaattaccgcccggctgaaaaactacgtcactgaaatcatgcgctatgcggtgaagaagcagttaatcaaatcaaacccggcgcttgatctggacggcgaatttaccccaccagaaaccagccattacccggccctgccgctggacaaactgcctgaacttctgtcccggacggatcgttactgcggcaggctgctgacgaaatacgcgctcaggctgtcgctgctgtttttcgtgcgctccagcgaactgcgctttgcccgctggagcgaaatcgactggcagcaaaaactctggataatcccggaagaacgggagcagatcgaaaacgtgcgcttctctcatcgcggcacaaaaatgaaaacgcagcacatcgttccgttgtccgatcaggctattgctgtcttaaagcaaattgaagcactctccggccatctgtcgtttatcttccccggtgaatacgatcaggataaatgcatgagcgacagcacgattaataaagcattgcgcgtgatgggctacgacaccaaaaaagacgtctgcggccacggtttccgggcaatggcgtgcagtgcgctgagtgagtcggggctgtggagcaaagatgccattgaaaagcagatgagccatcaggaaagaaacagcgtgcgtgcagcctatattcataaggctgaatatctggaggaacggatcgcgatgatgcagtggtgggcgaattatctggaggcgaatctcggcgggtatatttccccctatcagtacgctgcccccctgaaaaacgtgtcgtaa

SEQ ID NO: 21966 - DNA, 354 bp, Escherichia coli
atgaagagaggctgtgcccataagagcgataattcgtgtatcggagaaaaggggcgggtatccatcgtgattgggaaaaggctaaaaattgccagagtcaatgctggtctgactcaaacggagttaggtgttcgcgcaggccttgatgaagaatcggcaagctctcgaatcagttcttatgaaaacgaggttcactcacctgattttgggttagcacgtaaatttgcagcggtgctcgatataccagaggcttacttttacgcaatggacgacgatcttgcgacagtgatccttcaatatcatcaatacagaaagaatcattctggttcaattgtatttgtgaaaccacagtaa

SEQ ID NO: 21967 - DNA, 234 bp, Escherichia coli
atgcaactgaaagaaaaggatctggactggcatccggcagacatcatcgccggattacggaagaaaggaacgtctctggctgcggtatcgcgtaaggcaggattggcctcttccacgctgaccaatgcccttaaccgccactggcctaaaggtgaaaggctgatcgccgaagcgttaggcgtcgcacctgaacaaatctggccgtcccgctatcgtaagccggaataccgttga

SEQ ID NO: 21968 - DNA, 873 bp, Escherichia coli
atgggcaagttaggcggtgaaatgaaggcgctggcaaaacactgtggcggtagtcataaaacggtgaacgatcgtatccacattgtgcagcgtttcgatcaccacttacgggcgttgaacgtccagatccagcgggtggcgcagcttaaggttcgccacattgaaagctacattcatgaaaggctggcgcaggggatcggcaaacgtacattgcaaaatgaaatggcttcgttacgcgctgtgttgcaacaggccgggcgtaaacaggtggccgagcatgagcgattgactaataaatcgttggggctgtctggtgcatcgcgcaacggtacgcggcaggttattacgccggatcattatcgtcatgcgctggaaactgcccgtatgcaagatccggggctggcggcagggctggaactggcgcggctgatgggattacgttcacaggaagcggtacaaagcgtgcagtcgctgaaaacgtggaaacaggccattgagcgcggcgacactcgcctaaccgtggttttcggcaccaaaggtggacggccccgtgaaacggtgattctggatgctggcgcaatcaaaaaagcgctggataatgcgttagctattgcagaaagtcgtaatcacagattgatcgacaaaccggatcttaaaagtgcaatggattactggcacaaccaggcgacgcgtattggcctcactggcgcatattccccgcattctctgcgatatgcgtgggctcaggatgctattcgtcactatctggcgcaggggtttagcagaaaagaggcgctggcaatggtggcgatggatcttgggcatggtgatgggcgtgggcggtatgtagcgcaggtgtatggacagaattga

SEQ ID NO: 21969 - DNA, 1701 bp, Escherichia coli
atgtacatcaaaaaggtaacaataaaaaactaccggagtttccgttcatttgaggctcagcttcaaaaactcactgtagtgattggagaaaatgatacaggtaaaacaaacttttttgctgcgttatctttgcctctaagtggaaaccagatcgatttcaataaaaaacgtctaaatattacagactttaacaaagatagtgttattgaattctttaaatcaataattaatatagaagaagaatcaatacagctccgaaaaatacctaaagtttttgtgactatcgaattctctgatcctaaagatagttatgaaacagctattcttgctaaatggcttgttgcagatgatgataaggatgcgtttaaaatccgctatgagtttaagcctaagaatgacgcagacctgcttgaggcgatgaaaaaatcgctagagggtaaaactattgaggaagcaaactggtacaccctacctgtcgagctttatgattatcaaattgtatctgtaaacaacgagaaacagataagttataacgatttaaagcacgtgtgtgctcacagcatcaatgcagaacgtgatgatttctcagaaagtagtacaatgaaatcaaacggtattttcacaaaattgctaatgaatacactgagcgaagtcaccaaaggtgagatcaatactgcctattctgatttttttagtgctattgaaagaacaaaaacattcgataaggttattggtcgtaatcctgattttgataattacgatgatattattgaaaaacttgattgcattcctaatatccctaacttaaaaaacatcttgtctaatataacattgagatatggtaacgaatttctttaccaaaaaggcttagggcaaagaaatcttatttatatatttattctctttgcatactacaaatcttgcagcgacacattcaacctttgttgtattgaagaaccggaagctcatttaagcgtcaataacctacgattagtaagagactttatagaaaaaagttcaagcaacagcagttcattagtacaaaccctcatatcaactcataatccatcaattatcaacaagctaaaaatttccaatgtattagccttctctggcaacaaagctattagcttatcagaaacaccggtaaaccttgttgattacctgagaaaaagaccaaatttcgacatactaaaattactttttgcaaaaaaagtaattttagttgaaggcactaccgaagaaatgctcattaatacatttttggccaagaacgaaacgactcttaacgatgttgatgttatccctattggccagcgaggctacactacattcctagacatatggctcgcactcaacaaagataaccctaataagaaaattggagttatccgtgactatgataactcagatctcgctaaagcaaagcatgaagcttatgatacggcttatgcaaacatcatagtcagaacaactactaattacactcttgaaattgacttagtaaatacagagaataatctcgatctactgagaaatttattcaaaataacgggagattctaacgcagtgtctgatcatatgatcaaaggcaaagcagctagaatgttggatgtttgtgatgcaatgttagataaagaaaatcctttagatataaaactaccttttcacatagctgaggttatagaggctatatcatga

SEQ ID NO: 21970 - DNA, 1011 bp, Escherichia coli
atgattgaagtccagattgctggagcaggtgcgggtaaaacttttggcttagctgaatcgctgatagcacatatgaaatcctgctcttctcacaaaaaaatatttgctctcacgtacactaatacagcaacatcaaaaattgaagaggaagtaattaagcaacatggattcatacctcacaacctctgtatacagacagtacatagttttttgctgaatgaaatagtttatccattctcatcatatactctcggtgatgtatataacaataccactatcatgccagtcggcaaccctaaatataaagcgatccttttcaaacgattaagagaaaaaaatgtaatacatgctgaaaatgtttataatatttctaagcaaattgttgatgagaaaataagcaaacataatactatagccaaaaagaaaaaggttaaacgccttttaagtattcttggcaactgttttgaaaaaatatttatagatgaagttcaggatctagatagcgatgctttgcgatttttcgaagtgttaggatgcaatgatattgacatatatatgattggcgatccaaatcaagctataaaatacccaaatgcattagatactttcgtctgtaagcttgcttccgtagaatacgcaaaaattcttaatattaacaatatctccagacgagtaccaaatgagatattagccatttctaatgaattctgttttcagggacaaagtcaaatttcatcatcaacgactgttggtgagctattttatcttgaatctacagatatgaaatataatcaacacattagaaattatatagaatcgaaacaaattgtttgtatcgacaagaaaaatggaaagtattcaacatcatcgaaacagaggtattcattcccctatgaaatagaagagatgattcgagaatcaaatcataagaaagatgaaaaattagttatgaaagccgctttctctgattttatagaaactttttttgagtcaactatacgaactctgtga

SEQ ID NO: 21971 - DNA, 318 bp, Escherichia coli
ttgagtcaactatacgaactctgtgataaatgtgctgaaaatgacgttcaatttaaagtatccagcatcgaatcagtcaagggattggattctgatatatgtgtaatgatattaaccaataatacacttaaatattttctcaggatgaacttaaaaaaagatgaatatttcaacaaagagtggaaaaaggtgtacgttgctcttaccagggctaagcaacgtttaatcttagcattagaccatgaattactttctggtattgatattgaaaaattaaaaatacaacttgagaaattagggtttgaaaagcataaataa

SEQ ID NO: 21972 - DNA, 1029 bp, Escherichia coli
gtgacggatgatgaattgatggagcgatattatcttcaaagagagaaaatgaagcatttttatctcgaaaaattctctgataatgctcaaaaaatatccaacaccttaggaaagattggattgtcactcaaagatgataattttgagtattcagatccagttggtcttactgtcaaattcgacaatatagtgtcaattttagctcctgaactgatacgagataaagatgacttaatcaaatgtaaacaattagcagagttttatcaaaagaaaagcagggagggttattactacgcaaacaattatatgctcatgttgactccttttttgcgtaggggaatgcatcctgctaacaactgggctcctcaatttgtgagaaagttttgggaatcagattttaatgatatagaagcatcagtaacattagattacgacagagttaaaattgatgtagatgaatatggctatgttgaacttgatacatggtttggagctccttttgaggaggatgtttcgaatatcaaagaagggatatcaaagctaagaccgccaatgagtattgatacaaatatagtaaatatatttttcaacaatatttatagtcttgatatcaaatggaatactaaaggaaatattaaaacctttcaatcacttgaatttagcagtgagaatgttgttgttgaatttcaaggtgaattatttcatcctgctaagtatatacatgctgaatttgatatcgaatctggattgttccgccactttgatggtgctattcacttttatacccaaaacgattacatgatgagaagggattctgatttcaatcatacatttaaaaatagaagtctggtgaaagctaaagcaaaaaaaatcttcaagttggatggtaaaattcctaaggatctttgggttgaatttacatgccacttttttactggaaatcccctcatcgtagaatattttactggtagctatccacaatatgttatcgatggtcttaatcgggtgtatgtgtcacaaacagattag

SEQ ID NO: 21973 - DNA, 1104 bp, Escherichia coli
atgaaaattttatatataatcacaaaagctgatgaaatcggtggggcacaaattcatgtgagagaccttgctcgtcgtttacacaatgatggtaataaagttacagtaatcgtaggagaggatggcgctttagttagacaacttaaagagcttcacatttcggtgcgaatagtagaaaatttagttaggcaaatttcaccactaaatgatataaaagccatttttaacatcagaaagataattaaagataattcaccggatattattggtcttcactcctctaaggctggaattgttggtcgactagcagcttgtcgattaaatattccagtagtatttaccgctcacggttgggcatttgcagagggtatcagtgacaaaaaaaggaaattatttattttcattgagaaaatactatctccttttttggataagataattactgtttcggagcaagataaaaagttggcgctagatttaggcgttgcatcctctgaaaaacaagtcgttattcataacggaatgcctgatattactattaagcgtaaggattattcggattcaactaaagttcgattaatcagtgtagctcgtttttcagagcaaaaagatcatgaaactttatttcacgcactcaagttaatttctacagataactggacactaactctggttgggaaaggtcctaagttagaaaatattaaaaaacttgcatctgatttgaatattgcaaataatattctctttcttggggaaagagatgatgtcgataatttattaagtgaaagtgatgttttctgtttaataacaaactgggagggattgccattaagtattatcgaggctatgcgtgcgtccttgccagtggtagctacagatgttggaggtgtctctgagttagtagagcataaaaaaaccggcttgcttcattctcctaaaaacatacaagaacttgctaatatcctggatactattatcaatgatagtgacttgagatataaattgggaaatgctggaagagttaaataccaaaataatttcacatttgaacatatgtattatgcaacaatagatgaatataataaattgatacatactaaatag

SEQ ID NO: 21974 - DNA, 249 bp, Escherichia coli
atgatcgtattcgtcgtaagacgaaaaggggccacagatgaaatattccgcagagtgtgtatcactggccgaataactttctgtggatcttttgatagatacgccaatttaaaaatatgtatgcctgtgctgtcagaatggcttgcagatccattttgtgttgttgatgtatttatgagcctggttgttctcccccttcaggtggcgcaaccaggatttggtttttacataaaaaataactatttctga

SEQ ID NO: 21975 - DNA, 1248 bp, Escherichia coli
atggatgtcgtgtcaggaagaaaacttcttcgtcctcttggggctcttgaaaagtatacatggcttatcgatgttttcggccccaaacattttactgtatcagcagagatagaaggtcaaacgacactaaatgagtgggtacaggcgataaataaattacagatgcgacaccctctgatttgttctggagtcgatactaatcataatggagaattatgttttttttatgatgataacgcaataatcagagtaagaactgtaaatctgagaaaagtttcatcattagaaaatgaaatagaaagagaatacgcatcgccttttagtgaaggtgattactccttaatgaaggtggcatttttacatgatgaagaacgttgtattgtaattgttaccacccatcatgttatcgctgacggactttctgtggcttcctttataaaggatttagttagtattgttgcaggaaaagagttacccgcattaccattactgccttctcttgagtacgcatataaaaatattcaagaaaacaaattgccgggtgagatgaatattcagagtttaaaaaaaccgagagattatgcagaacgcaatcagaaaaagctgaatgtaacacgactgaaattgtcaacggggctaacagaaaaaataattcaaaaagcaaaggagaggcagataaccattcattgtttagtttctgcagcactggctttagccagggataatctatccgggaaggcagaagatagcgtcaggatttgcactccggttaatgccagaaaacatacagatttaaattatggactttgtttttttgcactgataccaactcatgaatataagatcaacagtgcatccacaatctggtctgttgcagatgaaatctcagcctctcttaatgaggtaaaaacaaaagaaggcattgcatcactaataaagtgtgcgaaaccatttatggaaagtaaaaatattaatgatatgatagactatgacaaagaacagattgcaccagatataacaatttctaaccttggcatcatcgaagaaccaggtggtgttggtcatctgacgctgaaagctgtctgggggccctgtgttttgatcgggacggaaggggagcatatggttggtgttgcaacaattaatggttcaatacatcttatccatataacatatgagggaagttgtaatttactgaaaatggccgagcagatccttgcagataatattcttgtcactagtgtgtga

SEQ ID NO: 21976 - DNA, 744 bp, Escherichia coli
atgagtgaactgaaaatcgataatccggcgcaacgtttgctggatattctggaggcaggaaagacactcccggatactcggaattgccgtaaggcctggattgagcttcttaatgttgaggaaaatagtgaacaacatcttttgtcccgtctggccaaagttatggagttgcctgaccgaatattacaggtcaggagagatcatttttcaacactccgggggaactctacccactggaaaacctgtgttgataacgcttttgtttcacaaagcctgaacagtagctggcagtcattcaaccagcatatcgattccagaacaatatctgaactaagcatgctgtccgatctgtttgaaacacgtggagcacatgcagctattgaggccgatgagacagaagccctgctgatcaaaattattgaattacgtggtgacattcgcagctcagaactttccagcgccatgaaaaccatgctcttaaggcagctttcacaactgcaggaggcgcttgagtcatacagcatttcaggaatcgaacccgtcatggatgccgttcagtccactctggggcttgccgtcattgaccctgagtataaagaagaaatcaaatcaggttcaggaagccagtttggtgacagaatttcctctctgcttggtgatattgcaaatgttgtgacagtagccggtgcattgccctcacttcctgcagcaattcaaactgcactcaccctactcagtaaataa

SEQ ID NO: 21977 - DNA, 234 bp, Escherichia coli
atgatctctgagacggatctggacttctatcgttttacttcttccactacgatctttggccttaataagtcggttatttgtatcttcatcgagatacaccgagaccgttctgcttataccgcctctcgcgttacgcctcctcactcaattcacctctgtttcccgactaataaaattatgattgcacagaaaccgacgaaaaaaaacacgccaaaattggcgtgtcttatttaa

SEQ ID NO: 21978 - DNA, 588 bp, Escherichia coli
atggcaaataatatgtcactccgtcagatatgccatgccacccggtatgttgttgcccagggcctgtgttggttgttctggtgtctgaaatacgccgtcattctgccgctggccacaatggctctgctggcgttactggttttatggaaggacaacaccacaccggggaaattgctggttcaggagatcgagtttgtaaggggcagaacgccagccgggctgtatccggtccgatactgctcgaacagttttggttccgatttagcgatgcctccgtctgtaacgtgcggttttcgccggggggatgctgcagaatatgccagggagactgaccagtctctgatgcaactgttcaccgcattatgggcaacgctggcactgatgtatgtctcgctggcggtgatctccggaaaatatccgatgcgacccggaaaaatgaaatgtgtccggatcgcaactgcagatgaacatctgaaggaagttcttacggaagatgcttccctgccggaaaaaatcaggaaatgccatgtttatttccctgatgaccgaacaaacagaagcaacggagataaaaatgaacatgcgtaa

SEQ ID NO: 21979 - DNA, 558 bp, Escherichia coli
atgacagagcagaagcgaccggtactgacactgaaacggaaaacggaaggggagacgccggtccgcagccggaaaaccatcatcaatgttaccacgccaccaaaatggaaggtgaaaaagcagaaactggcggagaaagcggcccgggaagcagagctggcggcaaaaaaaacgcaggccaaacaggcgctgtccatttatctgaccctgcccacgctggatgaggccgtgaacacgctgaaaccctggtggccgggattatttgacggtgacaccccccggcttctggcctgtggtatccgggaagtgttactggaagacgtatcaaagcggaatatcccgctctcgcataaaaaactgcgccgggcactgaaagccattacccgttcagaacgctatcttggcgcaatgaaagccggtgcctgccggtatgacacgcaagggtatgtgacggagcatatttctcaggaggaggaagcgtatgcggcagagcgtctggcaaaaatccgccgtcagaaccggagaaaagctgaacttcgggctgtgcttgatgagtaa

SEQ ID NO: 21980 - DNA, 147 bp, Escherichia coli
atggtgaccggaaaatcagagaaacaacaggtgattgcgtttattgattacgagaactgcagtaatctgacagaaattgccttaaatatatatacagagttaattatattcgcgggcgcgaacagaataatgtggcactgccagtaa

SEQ ID NO: 21981 - DNA, 468 bp, Escherichia coli
gtggcactgccagtaaacgctttccctgaagcagtaaaagtcacactccggcatgtcagtgaagtctcccggaacaatgttgattttcatctggtgctggagctgggacagtgtgtatgccattacgggccggagaaggaataccatattgtttccgctgacaagggatatgacggtattgtccggacactgcaggcgcgcgggatttgctgccgtcgcgtctccccggataaggcgtcatcagtaaagatggctgcacccgacatggatatcgttatccggtgggcaaacaaaattcaacaggcagcgcgggaggttcgtaatatgccggtaacagaagagacatttaataattatttaaaatcacagatgcgcggtgaatggcgtgatgtcctgaccagaggtatccgggatgaactggtccgtcgcggggtaatgaaaattcaggggaataaaatcatctggtaa

SEQ ID NO: 21982 - DNA, 1677 bp, Escherichia coli
gtgagtaataaacaaatacaccagtggtcacatggtgctgatatggtcgtcggacagctggaagcacagggtgtcaggcaagtttttggtattcccggtgctaaaatcgacaaagtttttgactctttactggattcatctattgacattatacctgtacgccatgaagcaaatgccgcatttatggcggcagcggtaggacggctgacaggtaaagccggagtcgcactggttacgtccgggccaggctgttcaaatctgataaccggtatcgctaccgccaacagtgaaggagatcctgtggtggcactgggaggaaatgtaagacgcgcagacaaggcgaaacttgtacatcagagtatggatacagtcgcaatgttcagtccggtaactaaatatgccgtggaggtaaattctcctgatacgattaccgaagtgatatcaaatgcgtttcgcacagccgaacagggcagacccggcagtgcatttgtcagcctgccacaagatataatcgaccagccagctaccggggccattttccccggcagcactgccacgtccatggggccggctccggtatcagctataaacgaagcggcaaaacttatcgaacacgccaaaaaacctgtcattttattgggactgatggccagtcagcccacaaacagcacagcattgcataaattactgggaaaaagccgaattccggtcacaagtacctatcaggccgctggcgcggtcagtcaggaacacttctcccgatttgccggacgtgttggtctgtttaacaatcaggctggagataaattactgcaccaggcagatctgataatttgtattgggtataatccggtggaatacgaaccgtccatgtggaacagtggcgatgcaatactggtacatattgatgtattgcctgcttatgaagaacaaaattatagtccagcacttgagctcgttggagatatcgctgcaacgctggacctgctggctgcccgtataacacacaaacaggaactatgctcacaattctatgaaatcctttccgatcgtaaacatcagcgggaactgctcaaccaacgtggtgcatcactcaatcagtttgccctgcatcctctgcgcatcgtgcgtgccatgcaggacatcgtaaacaatgatgtaacactcactgtagacatgggcagctttcacatatggattgcccgctatctttacagcttccgggcacgccagatcctgatgtcgaacggtcagcagaccatgggggtggctctgccgtgggcgattggcgcctggctggtcaatccggatcataaaattgtctcggtatccggtgatggtggttttctacaatcaggcatggagctggaaacagccgtgcggcttaacgcaaacgtgctgcatatcatatgggtggacaatgcctacaacatggtggcaattcaggaagaaaaaaaatacaaacgactttccggggtggaatttggagccgttgattttaaagtttatgccgacgcatttggtgccaggggattcgctgtggaaagtgccgacactcttgagccaacacttcgcgcagcaatggatgtttgtggtccgtccgtagtagcaattcctgttgactatagtgataacccattactgatgagtcagctacatctaagccagattttataa

SEQ ID NO: 21983 - DNA, 804 bp, Escherichia coli
atgagaccccatttatcaacagatgactgtgaagaatgtttgtgtgaaacactgcgcagcttctctgcccggaaccccggcagtgttatctaccagacatctctcatgagcgcattattaagtggtgtttatgagggagataaaacaattgccagcctgcttacacacggtgattttggtctgggtacctttaatgaacttgacggtgagatgattgctttcaacagtcaggtatatcagttacgttccgacggtagtgcacggattgcgaaagcagatcaaaaaacaccttttgccgtaatgacctggttccggccacagtatcgcaaggctttcgacacaccagtcagccgacaacaaatccacgacgtaatagaccagcaactatcttctgataatctcttttgcgccttacgtattgatggatattttcgttatgcacatacccgcactgttccgcgacaagttccaccttatcgggcgatgatggatatccttgactctcaaccagagtttcatttcagacaacgagaaggaatattagtcggttttcgtacaccacaacatatgcaggggattaatgttgcaggatatcacgaacatttcattacagaagacctcctgggtggcgggcatcttctcgactatcagctcgaaaaaggaattcttacttttggtgaaattcacaggctggtgattgaccttcctgatgacagtgcttttttacgtgcaaacctcaatttcaacgaccttgatgcaacgatccgctccgtcgagaatgaacaggataataaccgtgagtaa

SEQ ID NO: 21984 - DNA, 876 bp, Escherichia coli
atggaacttcgtggattacgatattttgtggcggtcgcgcgtgaacggcactttaccagagcagccaaagtactgggcatttctcaacctccgctgagtcagcagatcaaacggcttgaagaggaagtggggacgcagttgttcagacgactgacacgaggtgtggagcttacagatactggagaggctttctatgaggatgcctgtaagatcctgatgatgagtgatgcagctatggagaaagctcgtggaattgcgcgtggaataaacggtagcttatcaataggaatcaccagttctgatgcttttcacccgcagattttcgcgcttatccgcaagtaccagctacaaaacgcggcgatcaccgtgcatcagacagaagctaacatggtatccctgatgacgatgctggcagaaggtgaactggatatcgcttttgtgcgtttgccatgtgagagtagtaaagcatttgagttgagaatccttgatcaggagtcgatgctggtagctctgcatcgtgatcattatctctccgggagcgaagctctggagctggaacaacttcatgatactccagttatcttgtttccacaggaaattgcaccgggactgtatgaatgtgtttaccgcagttgtgagacggccggaatagatatgcagcatgcgctccagtcatcacagctctcctcttccctgagcatggtggacgctgggtgtggtttcgctctggttccacagtcgatgtctgccatttctccacctaatatcacctaccattcgctgatttctccggctctctttactgatattgccctgtgctggcggcattttgaacgatctcaaacagtgcgacgttttcttaccatgcttaactga

SEQ ID NO: 21985 - DNA, 255 bp, Escherichia coli
atgataatatcccgagaacaggatatcctgctgggcgttctgaagtttttcggtgccagacagttgaagcagctttacatgtcagggaagttgttgtaccggggaataaaacacgccagctcgccggatgaggggcgtttcgcagaaaatgttgtcaaaacaatgcaacgtgactgtatctgtacaatgctcaactctgacaagttagtagcaaaaaagaaccttgagggtatgttcgagtactataacaaatag

SEQ ID NO: 21986 - DNA, 1242 bp, Escherichia coli
atggatacagtatcaaaaaaatatcagttacgacctctcggggctcttgaacagtatacatggaagatagataccttcggtcccaagcatttcactgtttcagctgaagttaccgggcaaaccacgctggatgagtggctccgggcaataaataagctacaaaaaagacatcctcttatttgtgccggtgttgatgttaatgatgacaatgaactgtgttttttttatgatgaccaggtaacaatcagagtcagaacggtaaatctcagaaagatatcatcacttgaaagcgagatagaaagtgaatatgcctcaccatttagaaatggtgatttctccctgatgaagatagcattgttacatgatgaacaaaagtgtattgttattgtaacaactcatcatgttattgctgacggactttccgtatcgtcttttatcagggatttaattactattgttgcaggaagagacctgcctgcattgcctttacttccctcacttgaacagacatatatgcagtcgccccagtcaagacctccggataaaatgagtcttcaggatgttattgaccccagggggtatgctgagcgcaatcaggaaaaattaaaggttattcgactgaaactttcttcagaactgacagatagtatcataaaaaatgcaaaaaaaagacatgttacgacacactgtttgctttcagcagcactggctatggcccggaataatttatctgaacagtctgaacataagatcagaatttgtacccctgttaatgcaagaaagcatacagaactggattatgggctttgtttttatgctctgataccaacacatgaatataaactggatgacacgtccacgatttggtctgttgcagacaatatatctgaaactcttgacagggttaaaacaaagaaaggaattgaatcactgattctgtgcgcagaaccgtttatgacgagcaatgacattaatcatgtaataagttacgacaaaaaacaattagctccagatttaaccatctctaaccttggtgtcattgaggcccctgagtgtattggtagtctggaactgaatgctgtatggggcccctgtgtacttataggaacaaaaggtgaacatatggttggtgttgcaacaataaatggctcaatacatcttgttcatatcacttatgaaggcagtacaaaactccttaaaatggcggaaaaaatcctgaaggacagtatccagtatagttaa

SEQ ID NO: 21987 - DNA, 402 bp, Escherichia coli
atgctggactggttccgtgatcctggcctgcgacgacgcgtgcaggctgggctgaataagggtgaggcccgtaatgctcttgcgcgagcggtattcatgcaccggctgggtgaaatcagggatcgtgggctggagaatcagagttatcgcgccagtgggctgacgttactgactgcggcgatcacgctgtggaatacggtatatatagaaagagccattgagtcactgaaacgaaaaggcatcccgattaatgagcaactgatctctcatctttttcccctgggctgggaacatatcaatctgagcggagattacgtctggcgtaataatcttaaactgggggccggaaaataccggtcattacgcactgttgatactgaattgtacaaaaagcagtcttag

SEQ ID NO: 21988 - DNA, 165 bp, Escherichia coli
atgtgcgtaaacgtaaaacacctcagggaaaaccttctggcattttgtcaaaagcataaatttaaagtcctagctgatttttatcctgacacctatatagttaattcagaagaaattatggcgttggagatacttccactgaaacagtacgaagattatctttag

SEQ ID NO: 21989 - DNA, 654 bp, Escherichia coli
atgttacctattagctcatccacatccaatagtatttcatggcctcagaatgaggtctgctccacctcagcacaacaagggggggggcaaaaaacaaacagagcgataaaaataacacaaacattaccaagaccaaaactgactttaaattttgatataaccccccgcccctgtatcggtagggggctagcaggtgaagtatttaaggatcaagataatcttggatatgttatcaaaaggtataataacgctaattcgagtgatgcacaaaaagaatgtcttttatttaacagatattatggtgaaggcagtgccgaattattttctgaaaacggacgtacctgtttacgtatgctggaggttcccggtgtaccattaacgaaaatgagtcagtttcctgaagatgccgacaaaatgtttctggatatgattattgacatgggggagagtaaaattattcatggggatttacatatgggaaatattttatttgacgaaaatagtcatcgtttttggccaattgatttttcaaatagttacgacaattattattcacttaacaaagatagcaaattatttgcaaatgagatggcagaaagagagttttgctcaatattaaaaagtttgcgggaaaattccataagcaatatatag

SEQ ID NO: 21990 - DNA, 759 bp, Escherichia coli
atgaggaacacaatagctggctttttaatatttttgtcttctgctgcttatgctgatatcaatctgtatggacctggtggcccgcatacagccttgctcgatgcggccaggctttacgccgaaaaaaccggtgtaacagtgaacgttcattacggcccacaaaataaatggaatgaagatgccaagaagaatgcggatatcttgtttggtgcatcagaacaatctgctctggctatcattagggaccataaagacagattcagtgaaaaagatattcagcctctttatctgcgtaaaagcattttactggtaaagaaaggtaatcctaaaaatatccggagtattgacgacctgaccagagccggaattggtattatcgttaatgatggtggtggtaccagtaatacatcaggtactggcgtctgggaagatattgcaggacgcaaggggaacatagaaacggtcgcagcaatccggaaaaatattattttgtatgcgcccaatagtgggagtgcacgtaaggcacttgagaatcagcctgaagcagatgtctggataacctgggctgactgggcggccagtaatcctgatattggtgatgtcgtggaaatagctccagactacgttatatggcgtgatatgaacattaccgtacgtcaggatgcaaatgatgaaacccgtcgatttgcagcatggctacaaactgatgaagcaacgcctgcattcaaaaaatatggctggaccaggaaaggagtttga

SEQ ID NO: 21991 - DNA, 1092 bp, Escherichia coli
atggaccgcatcattcaatcaccaggtaaatacatccagggcgcagatgtcattaatcgcctgggcgaatacctgaaaccactggcagaacgatggttagtggtgggggacaaatttgtgttaggttttgctcagactactattgcgaaaagttttaaagatgccggaatagaggcagaaattgcaccgttcggtggtgaatgttcgcaaaatgaaatcaatcgtctgcggcgtattgcagagaatgctcagtgttgcgcagttctcggaatcggcggagggaaaactctcgatacagccaaagcgttagcatactttatggatgttcctgttgcagttgccccaaccattgcctcaaccgacgcaccttgcagcgccctttctgttatctacactgatgaaggtaagtttgaacgttatctgatgctgccgaacaatccagatatggtaattgtcgataccaaaattgttgctggcgcacctgcacgtctgttagcggcgggtattggcgatgcgctggcaacctggtttgaagcgcgtgcctgttcccgtagcggtgctaccaccatggcgggcggtaaatgtactcaggcagcattggctctggctgaactgtgctacaacaccctgcaggaagaaggcgaaaaagcgatgcttgccgccgaacagcatgtagtcactccggctctggagcgcgtgattgaagcgaacacctatctgagcggcgttggctttgaaagcggcgggctggcggcggcacacgcggtgcacaacggcctgaccgctatccctgacgcgcatcactattatcacggtgaaaaagtggcgttcggtacgctgacgcagctggttcttgaaaacgcaccggttgaggaaatcgaaaccgtggctgcgctgtgtcataccgttggtctgccaattaccctggcgcaactgaatattaaagaagatatcccagcgaaaatgcgaattgtggcagaagcggcatgtacagaaggtgaaaccattcacaacatgccaggcggcgcaacgccagatcaggtttacgccgcactgctggtagccgaccagtacggtcagcgtttcttgtaa

SEQ ID NO: 21992 - DNA, 237 bp, Escherichia coli
ttgaaccagaagtcaaacgtcagactgtcatggagctctgtgcacgacgagtatcagccagtgaagtcgtcagacgtattgggggacattcgtgcggtattgtataaatggaaatatgaaattatcggcaacagtgcttaccagactatgcataaacataacaaaccttccctggaggcagagcttgatgtgttgcgggaggaagtcgcccaactgaatccaacagagaaaagataa

SEQ ID NO: 21993 - DNA, 318 bp, Escherichia coli
atggtgcagtacacccgtaacagtttttacatcccactaatgactcgcctgcgcccgatggggatcactgtcgatgttgaaacagccaaccgccacggtctgcgctggctgcacgatgtcgctaaccaacgaaagcatgaaacaatccaggcccgtccctgcgatcgctggctcgaagagcagcagtccatgctggcactgcctccggagaaaaaagagtatgacgtgcatcctggtgaaaatctggtgaacttcgacaaacaccccctgcatcatccactctccatctacgactcattctgcagaggagtggcgtga

SEQ ID NO: 21994 - DNA, 219 bp, Escherichia coli
gtgatctatacgacgaatgccatcgagtcgctaaacagcgtgatccgccatgcgatcaaaaagcgtaaagtgttcccgacagacgactcggtgaaaaaagtggtgtggctggcaatccagtctgcgtcccagaaatggacgatgccgttgaaggactggcgaatggcaatgagccgctttattatcgagttcagtgaccgcctggacggtcacttctga

SEQ ID NO: 21995 - DNA, 753 bp, Escherichia coli
atggacgaaaaacagttacaggctctggctaacgaactggccaaaaacctcaaaacccctgaagacctcagtcagtttgatcggctgctgaaaaagctcagcgttgaagccgctctcaatgcagagatgacacaccatcctgggtatgagaaaaatcagtccagaccaggagctaactcccgcaacggttattccacaaagaccgttatcacaggcgacggtccactggaactgcgtactccgcgcgatcgtgacggtaccttcgaaccacaactggtaaagaaaaatcagacccgtattaccgggatggataaccagatcctctcgttgtatgccaaagggatgaccacccgtgagatagctactgcgttcaaagaactgtatgacgcagatgtttcaccggcactgatatcaaaggtcaccgatgccgtgatggagcaggttgtagaatggcaaaacagaccactggatgctgtttaccccattgtttatcttgactgtatcgtcctgaaagttcggcaggacagtcgcgtcatcaacaaatcggtgttcctggcactgggcatcaatatcgaaggtcagaaagaactgctgggtatgtggctggccgaaaatgaaggggcgaagttctggctcaatgtgctgactgaattgaaaaaccgcggtctgaacgatatcctcatcgcctgtgtggatggcctgaaaggcttcccggatgccatcaacacagtatatccgaaggcccgcatctag

SEQ ID NO: 21996 - DNA, 516 bp, Escherichia coli
atgaggcgttgtttaaatgcattatggcttttgctttttgtttctgtcggagctatcggtggtgatgaagcgtctcagtctgtcgatatgactttcacggttaatatcgagccaccaatgtgtaaactggataatgcaacgctggacgttgacttcggcgagtttcagagatttgacctggctcagggaaatgtaaaaaaaacggtgggattccattttactgactgtacaaatgttaataatgttaaaatatcattttctggtgataacattgacacgagtaacaatgttataaggaacaaatcaggtgcaggttatgcatcaggtgttgcaataggattttatgatgataaagaaaacagaattcaacttaaagagttacaaaatatattagttaacaattcagactcgtttgattttcgtgtcacggctgcagtgattaaaaacagcagcaatgcagttgtgactcctggaaatatagatacatcagttaatatgaatatcacatataactga

SEQ ID NO: 21997 - DNA, 603 bp, Escherichia coli
atgagcttaaaaaaaacggttatgtctctggctgtagtatctgcacttctcagtggtagtgctatggctgctggtgtggatggtgatgggcaggcagataactcgggaagcactgctacgctgaattttaccggtaaggttacttccagtttgtgccaagtaaaaacggaaaacatatctcaaaccatttctcttggtgagttgtctaaagcagctttagatgcaggggcgcattcaccgtatcagactttcaatgttggtctgaccaactgtgatccaagcacctctaatattacctatgtgattcgtgatggtaatggtctgcctgggcaagggaatgcaacatcggaatatttgatccctgaatctactgatacatctgcatctggtgtgggggtatacattgctgatcctgaacataatgctattcagattggtagcaaccagaatgccagcgtaacaaaacttggtaacgatgctcagtcagaacaaactatttctctgactgcttatatgaaggctactggtcaaggtactgcaaaagcgggggatgttaatgctaagggtgttatgactatcaaggctacggtcgctgaaatgtaa

SEQ ID NO: 21998 - DNA, 777 bp, Escherichia coli
atgagcacaataagaatcagaacaaataaatttactatgttttataccggagagcatgatgttgtcgtaactaatttatctgacgatacgcaaacttattgtggaaaggagtctattgttattgttggcaggaacgttagaatttcatttctgacaaaagagtttcatggagatatattaaaaaaaactgtatcttttgatttttcacaaatcattacattaaaaaaaatatttggtctgacatattgctttaatgaaactaaagaatcaaactttgcaaccgccttatctggaacaaaaaaaataatatgtattgaagcagacaaacgcataaaagagtcgttcgaggaaattattaaagcagacgacactcataacagagttatatcgtttatgtttttttgcaaaactgccggcatagagcaaaaaatttttaatttaatattgcattctgctgtaaccacattttacaacaaagtaacagacctgatagaatcaaacatatcaaagaaatggacgttaagaaacttagccgaagaatttaacttatctgaagttgcaataagaaaaaaacttgagtcagaaggtgtttgtttcaggaatttaatactggaaataagaatgaaaaaagcattgtcacttttgattacaggagaattatcaatatcacaaatatctactgatattggttatcataacacatcatatttcatatcatatttcaaaaacttttttggcgtaacaccaaaacaattacaggcactgttaaaaacataa

SEQ ID NO: 21999 - DNA, 618 bp, Escherichia coli
atgggatacctggcaaagactgaccgcattgatgccagagtgcttgctgcaatggtggtacgcagacgccagttgattaccatgttggtggctgagcgtaaccgtctgcatcctgcacatccgcaaagcagaaaaagcattaatatcatcatccaggctctgaagaatgaacttgcccggatcgatgaagatatgaacaggcacattcagagtcattttaaagaacttactgaacgtctgagcagcatcaaaggaggtgttggcaccatgacggctgctgcattgctggcagaagtgccagaattgggcaacctctcgaggcgtgaaatcagtgcacttataagtgttgctccggtaaaccgggactcgggaaccatgcgcggtcgacgaaccatttttggcggtcgagcgggggcaagagcagccctgtacatggcagctcttgtggcaacccggtttaatccggtgataaaggcgttttacatgcgtctgcttgcagtcggaaaagccaaaaaagtggtgctggttgcctgtatgcgcaagttgctgactatcctgaacgcaatgctcagaaagaacgaagaatggaatgaatcgtaccatcatgttgctccatga

SEQ ID NO: 22000 - DNA, 291 bp, Escherichia coli
atgagtctgccaaatccactctgtgtgggaattgatgtttccaaagcgacactggacattgctactaccagtgagttcgcccagttcactacaggtaacgacgctgatggctttgatgccattgttgctgaactcagaaagcattcggtggcgttgattctgatggaggccaccggagggcttgaggttgctgtggcctgctcgcgtcaggccgaaggttttgatgttgcggttgtcaatccaaggcaggccagagactttgcccgtaatgggatacctggcaaagactga

SEQ ID NO: 22001 - DNA, 129 bp, Escherichia coli
atgaatcagtgggttaaccagttaaaggaactgcgcggatttaataaaatgaccgtggcggtcgataacaaaaacgtgagaataatctggtcgatgctgagaaatgagactgagtatcaggtagtgtga

SEQ ID NO: 22002 - DNA, 366 bp, Escherichia coli
atgcgcaggacgattgccgaactctatgatctctttaacgatctcaagcgtcggatccatttttttgataaggaaattgaaacagtattcaggcaatcagaagcctgtcagcgtatcgccaaagttaaaggcattggccctaaaacagccacggtcgttgttgctgctattggcaaaggaactgaatttaagaatgaccgccactttgctgcatggctgggtctggttccacgccagcattcgagtggcgacaggcaggtgctgatgaatatgacgaaaaaggcgacaagcatctgcgaacactttttattcatggtgcccgctctgtcgtcagagttgccacgaataactatgataggcatatga

SEQ ID NO: 22003 - DNA, 822 bp, Escherichia coli
atgaaaaacagagattatgaactcattcaggccttaaaaaagaaaattttattatccttaaattcacacacaagactctctcttacagatatatcgttaatgtccggctttagtataaagcatacacagtcgttatttttcatacaatgtggttttacaattggaaaatatataaaacaatgtatattttctaaagcagcaattttgcttgttttaacaagaaagagtatacttgatatatctctggatgcaggatattcttcacaacaatcatttagtcgtgcattcaaaaaagagtttttattatcccctatgaaatacagaaaaagaggatttattgatacaaaaaagataataagtgaatttaaggcaggcgataaatttatttatgatggtgaattatacttaccatccataaaaataaagtcaacgtttctgagatttacggaaagcgttttaacccccggaagcatgacaacaaagaacaaaagattacacaaaataaattcaatattatcaagaactgatcgtgtcattattatttcaagcattaaaccgataaaagatgagagttcaaaaataaatatagattcttttttctgctcatcaatagaaacaggaggtgaaatttcaactatcggcggaacatattataaaataatatttaatggttctctcaatgattatataaatataggaagagatattattttttatataaacaccccatttccattagaagttatggaggaaataaaaaagaacgatgatgagtttgatataagcatacttatacccaaagagaatagaggaaacagataa

SEQ ID NO: 22004 - DNA, 588 bp, Escherichia coli
atgagctatgactatgaaaaattagaaaacaaaaaaaatgagataattggtattgttcatgaactatttactgagaatgataaaaccgctatttccttagtcgattcattctgtagattaactccgcctgaaaaagaaaaatttgtaatggagtatattacagtcaactcattaggtcgacgtggtggaaaatcaagaaagttaggtaattttgttcttaattggagagaattattcaatgatctacccgatttagtgttaacagcagcaggtgttgcagccgaaccaaaattaatattttttgcggcgttaagtatttggaataagatttggtgtcattcgtctatagaacttacaccagaacatgctactgttttgtacgtcttatggcaaggaagagatgagtctaataaaataaggagagatgatgcgtttgcaaagagtggcatacaattcaatttttacggaatgcaggaattagtggatgtatcattcgatgatattattaatgatctagttaaaatgcgatgtatagaagttaatgataatataatatggttgcgtgaatgggtcaggggaacatattaa

SEQ ID NO: 22005 - DNA, 870 bp, Escherichia coli
atggctaattcaggaagagaatatgaagaacttgtcagagatatacaatattctttgtttaaagccgaaaatattcctagccttaaaaacattaatatcgagaaaaataagaagataaaagatcgttcgggaattgaacgagaatttgatatatattgggagttcgaaattggaggtcatacctatcgttcggttatcgagtgtaaggactattcctccccggtatcgattgagaagatagatgccttcattggtaaaactaacgatattccgggacttaaactaatctatgcgacgcgaacgggatatcaaagcggtgcaaagataaaagcagagcagcataacattcaactgcttgttatcagagatcagcaagaacaagactgggttgatgaagatggcactccacttctaaaatctattcattttagaatgacagccatattaccgccaagaatcgttaaatttaatgtgcatgttgataaagaatggttttattcacaaaatgaatatactgaaagcacattgccaaatctattcaaaacagaatattccaatgctatttttattcataaccttagcaaagacgaaagatatagcattcatgatttatccagtttacttatgaaaaaagttgaaaacatggcatatggagaaaatatatacgctgaaaaaattgacaatggatatatagagaatgcggattcaagcataaaaatgaagataaaaggttttgattgcaaatatattcatcacaaaccgatagaagatatatctataattgatttctcagaacaaattaaagccattgtagaagatttcataacaggaaagaaaaaatgggtattaaaaaatggcattgtaaaatga

SEQ ID NO: 22006 - DNA, 732 bp, Escherichia coli
atgctaacaattgaagtagaaacagcaaagttgactgttggaaacagtgaatttttaatcgaaatacctaaatcattatatgaagtgatttcaagtcaaaataaaaaggaccaattaacaacgataaaaaataatgatgcagaaaaaatagagtatttcttaagagataagttgtattatgacacaaggccgtcaagtaaaagacaaatggattacgtaatagcaatagctgaaaaactaaagataaaaatcaataaaaaaacgctcgaaaatacatccagtgcgagtgcctttattgataagcataaatacgaatttgataaaaaagtggaagaggaacatcaagcatggattgagtataaaaagagtgatgaatataaaattcttcaaaaagttgaaagtgcaataaaaagacattttataagatatggcacaacaagaaaaaaattacttgcacatcagatgattgaatctggcttatcaataaatgatattgcagataaaataggcgttaccacaaccactatcaataaatatttagctgaagtggtagatataactaaccgatccatagcaaatgaaagttcatggatgatatttcattatgttctatcaaagatggttttctcaaataaggaaaatctaacaccaagtgaatggagagatactattatagccttgaccatgaaaaacagatggtatgaagaaacttggttttttacagaagaataa

SEQ ID NO: 22007 - DNA, 483 bp, Escherichia coli
atggatgctggatttattttacctcaagaaaaacaacaggttcttgatgaaataaacagatggcttaacacagtctatccctacaaaaaaccacctgcacatctttgtgatccgattgatagggccagtaaatttttccgtattgatgttcacaggaaaaaattcagtatttatcttagacttggaaaaacatgggcatcatctcagaataaatctattgtcattgctaaaatctgttttgaaaaagaacgttctggttatggctcagcgttgctgaaatgccttgcgaaaatagcagaaaaatataattatgaaaatattgctatcgagtcagtcaatgaaaaaagtagatcatttgcgttgaaatttggtttttcagaatatcaaaacaaaaatgattatatcattacaactgaaaaacttactactatccttaataaactgcctccccccttatctttgagtcgaattcatgtgtcatag

SEQ ID NO: 22008 - DNA, 1038 bp, Escherichia coli
atggtttttagttttaatttgttaaaaatcaattggttgtcttttgttctgtttaaagaatacacttatcaaacatataataatgcaaaacatataacaatgttctatactgttctctattgttctttctatttaagcatgcttacacaaataatttttttgataatgaaaaacagaaattatgaactcattcaggccttaaaaaagaaaattttgttatccttaaattcacacacaaaactatcccttacagatatatcgttaatgtccggctttagcgtaaagcatacacagtcgttatttttcatacaatgtggtcttactataggaaaatatatgaaacaatgtatattttctaaagcagtaattttgcttgttttaacaagaaggagtatacttgatatatctctggatgcagggtattcttcacaacaatcatttagtcgcgcattcaaaaaagagtttttattatcccctatgaaatacaggaaaaggggaattattgacacaaaaaagataataagtgaatttaaggcgggcgataaatttatttatgatggtgaattatacttgccatccataaaaataaagtcaacgtttctgaggtttacagaaaacgttttaacccccggaagcatgataacaaagaacaaaagactacacaaaataaatgcaacattatcaagaactgattgtattattattatctcatgcattaaaccgataaaaaacgagagctcaaaaataaatatagattcttttttttgctcgtcaatagaaacagaagatgaaatttcaactatcagcggaatatattataaaataaaatttaatggttctcttaatgattatataaacatagggagggatattgttttttatataaacattccattttcattagaagttatggaggaaataaaaaagaacgatgataagtttgatataagcatacttatacccaaaagagaacagaggaaacagataaaaagatatgaaaactcaacacggctaactaaacaaatgataagcgactga

SEQ ID NO: 22009 - DNA, 480 bp, Escherichia coli
atgcaggttatcgcccttaacaccattaacctgccagtttacggacaccccgttgtccacaataataccggcaccggtccaggtacttccgttagaggttgttactgtgtaattatcacggaacgtcagggaacccgccccctgagaaaccgaatccttaaggttaatctgaccattcgccccctgaaatatcaggttcttaccggcattcaggtcattcccctgctgcccgtgcatggcatatgtggtggcgccctgtgtcagggtgcccgtgccgacgctactgtcaaatgtccactccagcgcccctccttccggtgtactgaatgtaaccggggcatcattgtcctcattaaatttttgcccgataaaatccagtggaataacagcccagttatttcccctgccccccgctccgttccccgcagtgagaacaccaaccagcacccatttattctgaacagtatcaaaagcaaataa

SEQ ID NO: 22010 - DNA, 2070 bp, Escherichia coli
gtgctgacaaaagccccgtcagtgaaggtggattttgatgtttccacccagagtctggcgctgtccattccccagaaggggctggtgaagatgccggagaacgtggactgggattacgggaccagtgcatttcgcatgaactataacgcgaacgccaacactggtcgcaataacacctcggcctttggttcagcggacctgaaggccaatatcgggcactgggtggtgagttcttcggccacggccagcacgggtgacggcggagagaattccgccacgataaatatgtttacagcaagccgtgccattcgtctgttaagtgcagaccttctggtcgggaagacgtccaccggtgacagcatgctgggcagcacggggacgtacggggtgtcactgagccggaacaacagcatgaagccgggcaacctggggtacaccccggtgttcagcggcattgcgaacgggccgtcgagggtgactctgacacagaacggacgcttgctgtattcagaaatggtgcctgccgggccgttctccatcacggatgtaccgttgtacaccagtggggatgtgaccatgaaggttaccggtgaggacgggcgtgagcagacccaggtctttccgctggcggtgatgaatggtcagctgagtccgggagagcatgagtttaacctggctgcaggtctgcctgacgatgacagtgatatggatggtgcggtgtttgcagcgtcatacggttatggtctggagaatctgacactgcgtacggggctggtgtttaaccaggactggaaaggtgccagtgccggtatggtggtggggcttggctggctgggggctgtgtcagttgatggggcatatgcgtcagcgaaatatcgcgatggcagccacagcggtaacaaggtgcaactggcctggagcaaacaactggaaaccaccaacacgggtctgcgcctgagctggtcacgacgaagtgaagaatacgaagacatgtcttcctttaatccgtcggaagtgtacagccaggtgaaccaggggcgccgggtgaaggatgaatggagtgccggtatcagtcagcctgtgggtggtctgttcagtctgtccctgtccggctggcaacggagttattacccggcctctgcaatcagtgctcaccgccagcaaaaggacagcggtaaggagagaggggtgaccggcacgctgagcacgcagattgaaggtgttggcgtgaatctcagctggaccggttcgcggaatgcggaaggtgaaaataactggtcagcatccgcttctgtttcggtgccgttcatgttgcttgaccgtcgctacagcagcagtacttcggtgagcacgagtaaagacggtggcacaggcttcagtacggggctttccggctcgctgaatgaccgtttcagttatggtctgggcggtggtcgtgacagtgatggtggtgccagcagttatctgaatgcgtcgtacagcggtgaccgggcttacctgagtggggctctgaaccagtcctcatccggaggcaccagtggctctgtgtcagcgagtggctctgtactggcagtgccggcggcgaaagacatcatgttcagccgcacgaccggggacaccgtggccgtggtgaacgtgaaggatacacccggagtgaaggtgacgtccggtgacggacagacaaacagtgacggcaacctggtggtaccgctgaacagctatgactggaacacggtgacgattgatgcgggcacgctgccgctgagcacagaactgacgaacaccagtcagaaggtggtgccgacggacaaggcggtggtctggatgccgtttgatgccctgaaagttaagcgttacctgctgcaggtgaagcagcgtgacggtgagtttgtgccggggggaacctgggcgcgtgacagtaagaacacaccgctgggctttgtagctaacaatggtgtgctgatgattaacacggtggatgcgccgggtgatatcaccctgggccagtgccggatacctgcggcgaaactgcaggatactgagaaactacaggagattacgtgtgagtaa

SEQ ID NO: 22011 - DNA, 282 bp, Escherichia coli
gtggtcagtgaaaccgccatcagcagagccggaaccgttcagcagacgcacccacgtaccggcttcgccgttaatatccctcaaatcgcccatgcgtttgttcaggttgttaacttcagtgatgaagttgttatagctgatgtgcatgaatgtggcggcagccttaccctggccgtcgttacgtgcaacctggtaaccatcgaggacccactcttttttcccgtcctcttttctgacactaagggtgggggtgacatcactgaatcccacaacccgtgttga

SEQ ID NO: 22012 - DNA, 300 bp, Escherichia coli
atgaacagcagtgacctgtatctgagcaagaagcacgggcgtactttgtcgcccggaaaaatgtcagagagccagttctggttattagctgaaatatctccggttcacagtgaaaaggttcttaatgcgctgagggattttctggttctgggttatacccgaagggaggcctgtgaacgacatggggtttctcagggatatttctctggtgctctcgggcgtattcagcgtacccatcaggcggtaaacaggctggttcctttttatatatcagaagccggtattccatatacgggataa

SEQ ID NO: 22013 - DNA, 501 bp, Escherichia coli
gtgattgattttaaaaatgcaattgacttaggcggctttgacggtgggatcaccaccctgactctggacgttaatgatggtaccagcaacaataaaatcggaacgcttaccgcgccttttaatactggagccgttggttctatgactggtatttctgttaatgagcagtatacctttatggcggctgaggtcacatctgagcttgttcgtggatttagtggtggccttgctgctgacaagagcaaagtaaacaaagcaccacaaaacgttcttaatgcactttccaccgagattatggctaattttgatacgcaggggctctcatttactgatggtggtttttcaacaagttttactggaaatgcagtgaaatatagtgcagcttacggtgcaggtattcttgccaacgacaccattaagatcactcttgaccaggtagcttccggcgatgaaccaatccagtggaaagcttctctgccagttactgtttcttaccagtaa

SEQ ID NO: 22014 - DNA, 291 bp, Escherichia coli
gtgtttaatggtgggctgtcaacaaattatgacggagcgttggatatagagcaggttaagagcatcgctcctgtaattttcccgggctctatggataactttaccgatcaggggactgcagcccaaggcaaatacttctcgagaatcggcactgatgcgaaatattcagctttctatgcatccggcatcgaacaaggcaacacgatcaaaatcactcttgatcaggctgcttccggcgatgaccctgtccagtggaaagcctctctgccggttactgttacctacgcgtaa

SEQ ID NO: 22015 - DNA, 300 bp, Escherichia coli
atgaacagcagtgacctgtatctgagcaagaagcacgggcgtactttgtcgcccggaaaaatgtcagagagccagttctggttattagctgaaatatctccggttcacagtgaaaaggttcttaatgcgctgagggattttctggttctgggttatacccgaagggaggcctgtgaacgacatgaggtttctcagggatatttctctggtgctctcgggcgtattcagcgtacccatcaggcggtaaacaggctggttcctttttatatatcagaagccggtattccatatacgggataa

SEQ ID NO: 22016 - DNA, 198 bp, Escherichia coli
atgttttttacaatgtttctggttattgattacgtcattaacccgcagatgattatgcgtatatttccttctgttattttaatttctcactttaatatttcccgtgattttaaattcattttttatgtgaaaaacatgatctgttttttgatgaaaatccaaattaacataaaaagttcgttcagaattcaatattga

SEQ ID NO: 22017 - DNA, 300 bp, Escherichia coli; identical to SEQ ID NO: 22012

SEQ ID NO: 22018 - DNA, 378 bp, Escherichia coli
gtgtcggggcagctttctttcaccctgaatcaggggatggcagtcagtgccggcagacaggaagacggggcatccgtaccggtcgggatgtcgctggtcagtgggcagagcgtgacggatgtacagtcaggaacgctgccacaggggctgaaagcccgactctcttctctgttactgatgaatcagaattttggcaatggcatgaatgcggtggataacggacaggttatcagtcagggggtactggctgacggtcgggtgatgaatctggctgcggcatatgcctctgttgtgtcggattttgaactgcggttgccggcggagggtacacctgcagcatggcaggcagggctgaatgtgacggtcacggtacagtga

SEQ ID NO: 22019 - DNA, 1935 bp, Escherichia coli
atgaatatattcgatcactatcgccagcgatatgaagctgccaaggacgaagagttcacactgcaggagtttcttaccacttgtcggcaagatcgcagtgcttatgccaacgcggctgagcggctattgatggctattggtgagcctgtcatggtcgatacagcccaggaacccagactttctcgactcttttctaaccgggtcattgcacgttatccggcgtttgaagagttttacggcatggaagacgcgattgaacagattgtctcttatctgaaacacgcggctcaggggctggaagagaagaaacaaatcctgtatctgctggggcctgtgggtgggggtaaatcatcgcttgctgagcgactgaaatcattaatgcagctcgtaccgatttatgtattgagcgccaacggtgagcgtagcccggtcaacgatcatcctttctgtcttttcaatccgcaggaagatgcgcagattctggaaaaagagtatggcattcctcgccgttatctcggcaccatcatgtcgccgtgggcggcaaaacgcctgcatgaatttggtggcgatatcactaagttccgggtagtgaaggtctggccgtcaattctgcaacaaattgctatcgccaaaacagaacccggcgatgagaacaaccaggacatctccgccctggtagggaaagtcgatattcgtaaactcgaacactacgcgcagaatgacccggacgcctacggctattccggtgcgctgtgccgcgccaatcaggggatcatggaatttgtcgagatgtttaaagcaccgataaaagtgctgcatcccttgttaaccgccacccaggaaggtaactacaacgggacggaaggtatctccgccctgccgttcaacgggattattctcgcccactcgaacgaatccgaatgggtcactttccgtaataacaaaaacaacgaagccttcctcgaccgtgtttacatcgtgaaggtgccgtattgcttgcgcatttccgaagagatcaaaatctacgagaaattgcttaatcacagtgaattgactcacgccccctgcgcccctggcacgctggaaacgctgtcacgtttttctattctttcgcgtctgaaagagccagaaaactccagcatttattcaaagatgcgggtttatgatggtgaaagtttgaaagacactgatcccaaagccaagtcgtatcaggaatatcgtgactacgccggtgtcgatgaagggatgaacggtctgtcgacgcgttttgcgtttaagatcctctcccgcgtgttcaacttcgatcatgtagaagtggcggcaaacccggtccatctgttctacgtcctggaacagcagatcgagcgcgagcagttcccgcaagagcaggcagaacactatctggagttcctgaaaggttatctgatcccgaaatatgccgagtttatcggcaaagagatccagacggcctaccttgaatcctattcagaatatgggcagaacatttttgaccgttatgttacctacgcggatttctggattcaggatcaggagtatcgcgatccggataccgggcagttgtttgaccgcgagtctcttaacgccgagctggagaaaatcgagaaaccggcggggatcagtaatccaaaagatttccgcaacgagattgttaacttcgtactgcgagccagagcgaataacagcggacgtaatccgaactggaccagctatgaaaaactgcgcacggttatcgagaagaaaatgttctccaataccgaagagctgttgccggttatttcgtttaacgccaaaacgtcaaccgacgagcagaagaaacacgacgactttgtcgaccgtatgatggaaaaaggctacacccgtaaacaggtgcgtttactgtgcgaatggtatttgcgcgtacgtaaatcgtcttaa

SEQ ID NO: 22020 - DNA, 399 bp, Escherichia coli
atggctcttaacacaccacaaattacgccgacaaagaagataacagtgagggctatcggcgaggaactgccgcgtggtgattaccaacgttgcccgcaatgtgacatgctgtttagcctgcccgagataaattctcatcaaagtgcctattgtccgcgctgtcaggcaaaaattcgtgacgggcgcgactggtcgctaacgcgcctggcggcaatggccttcaccatgctgttgcttatgccgtttgcctggggcgaaccgctgttgcatatctggctgttaggcattcgtattgacgccaacattatgcaaggcatctggcaaatgaccaaacagggcgatgcgataacggggtcgatggtctttttctgcgttatcggtgccccctcattctggtga

SEQ ID NO: 22021 - DNA, 1446 bp, Escherichia coli
atgctcgtggcccaacacaccgtttatttcccggacgcctttctgacacaaatgcgcgaagcgatgccttcgacgctctcttttgatgattttcttgccgcctgtcagcgcccgttgcgccgcagcattcgcgttaatacgctgaaaacctccgttgctgatttcctgcaattaactgcaccttatggctggacgcttacgccaattccgtggtgtgaagaaggtttctggattgaacgcgacaatgaagatgcattgccgttgggtagtaccgccgagcatttaagcggcctgttttatattcaggaagccagttcaatgttgcctgttgccgccttgtttgctgacggtaatgcaccacagcgggtgatggatgtcgctgctgcaccaggttccaaaacgacgcaaattgctgcgcggatgaataacgaaggggcaatccttgccaatgagttttccgccagtcgggtaaaagtgttacatgccaatatcagccgctgtggcatcagtaatgttgcgctcacgcattttgatggccgcgtatttggtgcggcagtgccagaaatgttcgatgccattttgctggacgctccctgctccggcgaaggcgtggtgcgtaaagatcccgatgcgctaaaaaactggtcaccagaaagcaatcaggaaatcgcagcgacccaacgggagctgatcgacagcgcctttcatgcattacgtcctggcggtacgctggtttactcgacctgtaccttaaaccgggaagaaaacgaagccgtttgcctgtggctgaaagagacttaccacgacgcagtagagtttttaccgcttggcgatctcttccctggtgcaaataaggcgctgaccgaagacggctttttgcatgttttcccacaaatttacgactgcgaaggcttcttcgttgctcgtctgcgtaaaactcaggcgatccccgtcttacccgccccaaaatacaaagtgggcaatttcccgtttagcccggtgaaagatcgcgaagccggtcaaattcgtcaggcggctgcaagtgttggcttaaactgggatgaaaacctgcgactctggcagcgtgacaaagaactgtggttgttcccggtaggcattgaagccctgatcggtaaagtccgattttctcgcttggggattaaacttgccgaaacgcacaacaaaggttatcgctggcagcatgaagccgttattgcccttgcctcccccgacaatgtgaacgcttttgaactgacaccgcaggaagcggaagagtggtatcgcgggcgcgatgtttacccgcaagccgcgccagtggcggatgatgtattggttactttccagcatcagccgattggtttagccaaacggattggttcacgactgaaaaacagctacccgcgtgaactggtgcgcgacgggaaactttttaccggtaacgcctga

SEQ ID NO: 22022 - DNA, 996 bp, Escherichia coli
atgagtaacctgacaggcaccgataaaagcgtcatcctgctgatgaccattggcgaagaccgggcggcagaggtgttcaagcacctctcccagcgcgaagtgcaaaccctgagcgctgcaatggcgaacgtcacgcagatctccaacaagcagctaaccgatgtgctggcggagtttgagcaagaagctgaacagtttgccgcactgaatatcaacgccaacgattatctgcgttcggtattggtcaaagctctgggtgaagaacgtgccgccagcctgctggaagatattctcgaaacccgcgataccgccagcggtattgaaacgctcaactttatggagccgcagagcgccgccgatctgattcgcgatgagcatccgcaaattatcgccaccattctggtgcatctgaagcgcgcccaggccgccgatattctggcgttgttcgatgaacgcctgcgccacgacgtgatgttgcgtatcgccacctttggcggcgtgcagccagccgcgctggcggaactgaccgaagtactgaatggcttgctcgacggtcagaatctcaagcgcagcaaaatgggcggcgtgagaacggcagccgaaattatcaacctgatgaaaacgcagcaggaagaagccgttattaccgccgtgcgtgaattcgacggcgagctggcgcagaaaatcatcgacgagatgttcctgttcgagaatctggtggatgtcgatgatcgcagcattcagcgtctgttgcaggaagtggattccgaatcgctgttgatcgcgctgaaaggggccgagcagccactgcgcgagaaattcctgcgcaatatgtcgcagcgtgccgccgatattctgcgcgacgatctcgccaaccgtggtccggtgcgtctgtcgcaggtcgaaaacgaacagaaagcgattctgctgattgtgcgccgtcttgccgaaactggcgagatggtgattggcagcggcgaggatacctatgtctga

SEQ ID NO: 22023 - DNA, 1005 bp, Escherichia coli
atgggcgatagtattctttctcaagctgaaattgatgcgctgttgaatggcgacagcgaagtcaaagacgaaccgacagccagtgttagcggcgaaagtgacattcgtccgtacgatccgaatacccaacgacgggttgtgcgcgaacgtttgcaggcgctggaaatcattaatgagcgctttgcccgccattttcgtatggggctgttcaacctgctgcgccgtagcccggacattaccgtcggggccatccgcattcagccgtaccatgaatttgcccacaacctgccggtgccgaccaatctgaaccttatccacctgaaaccgctgcgcggcacagggctggtggtgttctcgccgagcctggtgtttatcgccgtggataacctgtttggcggcgatggacgcttcccgaccaaagtggaaggtcgcgagtttacccataccgaacagcgcgtcatcaaccgcatgttgaaactggcgcttgaaggctatagcgacgcatggaaggcgattaatccgctggaagttgagtacgtgcgttcggaaatgcaggtgaaatttaccaatatcaccacctcgccgaacgacattgtggttaacacgccgttccatgtggagattggcaacctgaccggcgaatttaatatctgcctgccattcagcatgatcgagccgctacgggaattgttggttaacccgccgctggaaaactcgcgtaatgaagatcagaactggcgcgataacctggtgcgccaggtgcagcattcacagctggaactggtggccaactttgccgatatctcgctacgcctgtcgcagattttaaaactgaaacccggcgacgtcctgccgatagaaaaacccgatcgcatcatcgcccatgttgacggcgtcccggttctgaccagtcagtacggcactctcaacggtcagtatgcgttacggatagaacatttgattaacccgattttaaattctctgaacgaggaacagcccaaatga

SEQ ID NO: 22024 - DNA, 243 bp, Escherichia coli
atgagctttatggttagtgaggaagttacggttaaagagggcggcccgcggatgattgtcactggatactccagcggtatggttgagtgtcgttggtatgacggttacgggtcaagcgggaagcttttcatgaaaccgatcttgttccgggggaggggagtcgttctgcggaagaagtttgaaagggtatcattaacaccaggccggatcacatccggcctggtgtcccaatgcctgcaatga

SEQ ID NO: 22025 - DNA, 333 bp, Escherichia coli
atgcatatctggatcgtcaggatcgagatagcgctgaagcagcaggcaggcttctccctccggccagaagagtctcagacagtgaaaatcgctaaagctgccaaccacgtcgcactccacggcggcggcatcaacgcccagagccagcaacaacaaatccagagtggagtagagcaactgtcggctggtggtggcgtggaccacctgcggcgtcttagccagacagcgacgcagctgctgcgcatcgcgaagccatgtgcgtcccgcgcgcgtatgcggataaaacgtgtttacccaatagcagcagccctgttcctgcgccagcgtttgtaa

SEQ ID NO: 22026 - DNA, 687 bp, Escherichia coli
atgatgtcgggcaatccgttgtcgtggccacaggaacagtgccacatcattgatcaactgtatccttacagtgccgtaaacatcattggtggtgtggtcaccattgagggaattgtcgatctgccccgactacacgcggccatccagtccgccattcggcaatttgatgcgttgcgtatgtggtttgtgatgggagaggagagtgaagtggtcagccaagtgcagccttatcactggcgcgatatccgccatttgactttttccccagattatgacaaggagaacctacgcccagcggcgatcgaaacatttgttgatgagtggttccggcagccctttaccctgctggcgcacgatttgttcgagtttgtcacctttacgtgcggtgaacaatacagcggttatttatttaaagcccatcacggcattgctgatggttggtcaatggcgttgttgtcaaaccatgtcaagcgagcatacgaacagcaggacgtaccagatgatgcgtcaccagcctatagcgcatttctggcgcagcagcaatcttatcaggcgtcaacgcgctttgccgttgatcgtggctggtggcgtgactatatcgacgaataccgcgactgctttccagacagttccccatcgttactactgagggcatcagttgttccacttggcttgagccagccatga

SEQ ID NO: 22027 - DNA, 723 bp, Escherichia coli
atgccggtagcaccagaagtcgagctgaacagtggttttcatgccggacctaatcagtctattgccgatcgggcggcattcacgctgtttatggtggctgatatggcggtgatctcgccattctatgggcaagaggcagcttggcacttctcggtgatggaagcaggtactctctgccatttactggaagaagatgcgccgcgctacggattggggctgtgccaacttgggatggcagacttttccgctgtggcatcgcattttcaattgtcgccacatcatcgctatgtccattgcaccgtggggggcgcgatagggcaagaggcggcaagtgctgcagcattgctgcgcgatttctccgcctatgagaaaccgaaggaaaccactgcgccgctggacatgcagagctacaaagatgccatgctgcgcggcctgcgtcagcaactgcctgactatatggtgccgagtgatctgatgttagcgaccgattttccgttaaccgctaacggcaagctagatcggcaaaaattacagctgcagggcgaacaaattgcccaccagcgtgacggcgtgggtccaatccaggtggacagtgcgttacaacagcggctggtggcgctctggcaggaggtactcggcgtgagccacgtgtcggccgaagacgatttcttctcgctgggggggcagttctatagaattggtgcgtattcagcaggcacttga

SEQ ID NO: 22028 - DNA, 5934 bp, Escherichia coli
gtgttttgcgcgcaccatatcatcatcgacggtatctcgttacggctattgttcgatgagttacagcagcagtatgctcgattgcatgctggtaatgaaacgtcgctgcctccgccgccgctgcaatatgccgattatgccttctggcagcgcgaatggttccaggataccttgctggcgaacgaacttgcctactggcgtgcgcgtttgcaagacgcgcctctgctgtcgacatttccatcgctgcacccgcgcccggcacaaccctctacacatggttcccggttcagcatcaccctggatgaaacattaagcctcgcgttgaaacacgtagcccgcacgcaggaaacaacgccgttcgtgctgatgctgactgccttccaactggtgctgatgcgttacgctcagcaacagcgattggtgataggcatgccagtatcggggcgcattcgcccggaattgcagagtagcattggttattatgccagcactgcggttatctacaccgattttaatggggttgaggtagggcgcgaggcgctccagcgtgtgaaggccagcgtgaaagagacgcaggggcgccagcaactgccgtttgaaaacttggtgaatatgctggatctccctcgcagcctttcccattcaccgttgttccagatcctctatatctaccataaccacgtgaccccacgcgcttttaccttggctggtgcgtattgggagcaggtgacgtatcacaatcagaccgtcaaatacgacatgacagtcgaggtgttccaaaacgacgccacgttcgacgtctcctttgagtacgatttggggttatacgatgctgatgtggtgaagcagattgccgaggcgctgcgtcagcactgcttatcgttgacatcatcactggagaccccgataggggcgatccctctgcatgcaccggagaccgcaacgccgcggcgtgatccgctcaacgccactaacgtcccgtggctcgggccgcaggatgtgctgcgtatcattgaacagcgctgtgtgcagcacccaaagcaactggcaatacagcagcatgacggcacactgacctacgctgagctctgggcgcgtgtgcagttcatcgcgatgcgttttcgagcgcatggcatacaaccgggcgatcgtattggcgtgctgttgccacgtcacagggatgtgattgcaaccatgttggcgacgtggtttgtgggggcgtgctacgtgccgttcgatattcatcagcctgccgcgcgtttgcaacgccttatgcaacgcgcgcgtttggtctgtctggtggtccgtcagccgggagagtggggtgaaattgtacaactgtcgttgccggaattgatgcaggacatgtcgaatgcgatccggtattctacaccttgcgcgctgttgccggatatgcaggcctacctgttgtttacctccggcagtaccggtgaacctaaaggcgtgtgcgttgttcaccgcgggttgctgaacttgttgttggatatgcagcgtacctttgcggttggctcgcaagaccggctgctctcggtgacgacgccaacatttgatatctcattcttggagtatctgttgccgctgatctccggtgcgagtctctatctgacagaggcggaacgcgccgcagacagcttccgtatgattccgctgattgccgactatcgaccaacgctgatgcaggcgacgccctcgttctggcacgggctgttgatggcgggttggcgtggcgacccggaactatgtgtgctggcaggcggtgaagcgctgccaacgaaagtggcggaagaactgttgcgctgttgtggttcattgtggaacctctacggtcccaccgaaacaaccatttggtcgctgaaatcgcagataacccaagcggaaaacatcaccctcggcgctcccattgccaatacccgtatatacattctggacaatgagggccatccagtgccgcaaggcgttgacggcgagctttacatcgccggggatggtgtggcgcaggggtatgatgggcagcctgagttgaacgcacagttcttcttgtcagaaccaggggtccccggtggcaggatgttccgcactggcgatctggtcaggagtgatgcgcaggggcagttgttttttgttgggcgcaaagatagccagatcaaactgcgcggttatcgtattgagttaggcgaaattgaacggacgttggcacggcatccgcatgtggacgccgcggtggtggcctgtattgaaagagcaccgttacacaaagcactggcagcattcatcatcaccagtgagcctccctcgctattcgagcaactgaaaaacgagcttcggcagcaactgccagactatatggtgccaacgctgtggcagagggtggccgacttcccgaacactgacaacggtaaaatcgatcgtaagcggttagcggaaaatttcgttgccgatagctcccttgtgtcgccgcagacgcaagcgctgagcgacacggaacagatgttgctggcgctgtggatgcgctatttgccgataaaaaacgtcgatcctgagtgcgatttctttcgcttggggggacattcgctgttggcggtaacgttggtagcagagatcaaccgcacttttcactgcgccttgaccctgaaggacattttccactactccacactacgggcactgagtgcgcgtattgcacagcaatctatcacggacgctgccgcgtctcaggatgactgggtgatagtgcacgaccctgagcatcgtcatcaaccgttcccattgacggatgttcagcgcgcctactggcttggacgacagacgggtgctacctcgatcgcgacccacatctaccatgaatttgacgtagaacactttaatgttacgcgttttacccatgcggtgaatgcgctgatcgctcgccatgaaatgctacgtgcgcgggtactccccgacggtactcagcagattctggcgcaagtgccggcgtatcagttagagcagcgcgatctgagtgctttgtcccctaacgcacgaaacgatgccttgatggcgatccgcgatcggctgtcgcatcatgtgcatcccgcagatcgttggccgctgtttgatttcagttattcggcttgcacggcgcaacatggccgcttgcatttcagtctcgatctgctgattgccgatgctctgagtatgcgcacgctacagcaggagttgatgatgctgtaccgtgagccccatgtgtcactgccgttgctaccgttctcttttcgtgactacgtgcaggcgctgttggtagagcaggcgagtgaagcctatgcacgcgatcaggcctattggcaacgggcgctgccgcagctgtatggcccaccaacgctgcccgtacagggcgatttggcgcaactgtctgcgatcaggttcgtacgtcgccgtcatcggctgtcagcccacaactggggagtgctgagcgcgctggcccaacgcacacgtatcaccaagacggcattgttgttgacagtctttagccaagtgctggcacgttggagccttagcccgacgtttacgctcaatctgacgttgttcaaccgcccgcagggttaccccaacgcagaggcagttattggtgattttaccgctgtcagcttgctgaatgtttgttacgacagccagcactcttatgcccacaacgctcagcgtattcaggtgcaactgtgggaagatctcgaacatcgtcgtttcagtgggatccgcgccagcgaggcgctgatccatagcggtcgtttccatgcgccgatgccggtggtattcactagtatgttggatatcgacggggagacgactgcgcaagaccctcgggacacaacccgttttactctgtgtccggacgccaatattacccaaacaccgcaggtgtggctcgatcaccaggtgatcgagttggctggggagttgcatttcaactgggacgcggtcgagcaactgtttgataccacgctgctggatcagatgtttggtgcttattgtcatgcgctgcaggcgctggttgccatgccgcaaagttggtggggggtaaatagttctctggcgctgcccaccgttagtgcaccggtcacgcaggctcctgcacctacggccttgttgcaccatggattactgcgtcaggcagcactgacgccacaggaaactgcgctgatcagtcctatccgtgaattgacctatcgccaactgtcgacggcggcggatcatgtggcccgcgccctgttagcgctgggcgtgcagcatggcgaccgcgtggcggtggtgatggaaaaaggctggcagcagattgccgccgtacacggcattttacgactgggtgcggtctatctgccagtggatccggtgctaccgccacagcgtcgccagcttttgctgacggtgggcgaggtgcgggtacaagtaacgcagccgggtctcacgcaattggagccgtcgctgcccgtgctgatcatcgacgacggaatgctggacacgcctgctgcgccgttgcctgaagtggctggggatgtcacggatctggcctatatcattttcacttccggctccaccggtaccccgaaaggagtgatgatcgaccaccgtgcggccatgaacacgctggaagacatcaacgaacgctttggcctcaatgcgcaggatagggtgttcgggctgtcatcattgagctttgacctgtcggtttacgatgcctttgcgccttttatggtgggtgcagcgctggtactgccggaagcgggacgggaaaaagatccgcgtcattggcagacagttatggcacacggtcatgtaagcgtctggaatgcagtgcccgcactgatgcagatgctgtgcgaataccacagcggcgatcggatgagttatccgacgttgcgtctggcactgttgagcggcgactggatcccgctaacgttaccggagcagatgcgcgagcggctcaatgaaacgatggacatcatcagtctgggtggagcgaccgagtgcgccatctggtcggtctactacccgataggtgaggtggaatcgacgtggaccagtattccctacggtcggggcctgcgcaaccagtcagtatacgtgctaaatgcgcaactggaggaatgtccggtcggggtggaaggagagatttgcattggcgggatggggctggcacaaggctacctgaacgacgcagagaaaacggcggcgagctttgtctggcgcgaagcgagtggtgagcgaatttaccgcactggggatcgcgggcgctactttgctgacgggcaagtcgcctttttggggcgcaacgatacccaagtgaaggtgaatggttaccgtatcgaactgggggaaatcgagcgctgcattgcgcgacatcccgatgtggagcagtcagtggtggtggcagtgggtaattctcaacatcgtcggctggtcgcttttgccaaactgcacgatcgccaccaggcgcaggcattgcaagctaaggaagcggaggcggcggcactggcgcagggtattattgtgaatccggcacagcgtctagcgttcaaactcaaggagccacatattcgcgcgctggatggtctgggcattgcactgacggcaccggcggatagcacacgttacatcaaacgccgcagctatcgtcatttcagcgcgcaaaaaaccacgctggcacagttggggcaattgctgtcgggcttggggcagatgcgtctacccggtctaccttttgccaagtatgcctatgcgtccgccgggggggctatacccggtgcaaacctacgtgtacctgcatccagacaagatcgaagagggagtatccggtatttactacttcgacccgcgacagagctgtcttatgccggtagcaccagaagtcgagctgaacagtggttttcatgccggacctaa

SEQ ID NO: 22029 - DNA, 1161 bp, Escherichia coli
ttggctgcgctacatattgccaaacgctgcggagcacagattttcgccacagcaggtagcgagcagaaacgcgattacttgctttcgctaggcgtacatgccgtagctgattcacacgacgaacagttcgctgccactctgctgaccgcatcggacggacaggggatggatgtgatccttaactccctcacaggccgtctgcttgacgctagcctcgcgctgctggcaccgctgggccgttttcttgagctgggcagcaaggacattgtggaagacaaagcgctaccgatgcgtttcttcgcccaaggcggcacctttattccgattaattttcacgcggcgcatggtgcgtttagtcgctacctgcaacagattgtcgcttggatagacgataacacgctaccgctccttccatgcaaatccgtaccattgcccgaggttgcacgcgccttcgccaccctgaccacgccgcagcatattggcaaggtggtggtaacgcatcgcactgcggcaggcatggaccggctgaacgccatgatagcagaaaggcgcctcggcggctatgcgctcagcatgagcaatgccgaggtgatgcgccaattgtggccgatactgaacactcgcagtccgtgggcgcaactgctgctctcacctcgggcgatcgatagattagcgcggggcaaccgggtggatcgcggtgtaccgtctgccgctaacgatacgattactcagcagacagtgaaaaagcggccccgtccggaaattggcgtgccttacagccccgcgacacgtgaagtggaacgcgtgctctgccaaatcctggaagagtatctgggtctggatagagtaggcattgacgacaactatgccgaattagggggcaacctcactcgatatggtgcaactgagtgggcaaatggcgcgtcactatccgcaagtgagcgtggtgtcgctgtacaaccacgccaccgtgcgccagctggcgacgttttgccagcccccggagggcgagtcaagtgcgccatcaccacagcctgcagtacagacgaatacgcgcgcgaatcagatagcaaaacgtgctttgcaaattgcgaaaaatactgcgcgcagtcacacgtctttgcattaatccgggcgcctcctcgccctgaagaaaggtaa

SEQ ID NO: 22030 - DNA, 549 bp, Escherichia coli
gtgaaaacgggggccgaagcagtccgggcgctgaccacacagcttccggcgtttcgtcagaaactgagcgacggctggtatcaggtacgcattgccgggcgtgatgcaggtgaaactgaattatcagcccgtcttaatgaaccgctggcaaatggtgccgtgatccacattgtgccgcgtctggcgggagccaaaagtggcggtctttttcaggctgtgctgggggcggcgctgattgcggtggcatggtggaaccctgcaggttggttgggggctgccgcaattacaggaatgtatggtgcgggggccagtatggtgctcggtggtgtggcgcagatgctggcaccgaaagcccggacgcccacggcagccagtacagataacggcaaacagaacacgtatttctcgtcactggataacatggttgcccagggcaatgttctgccggttctgtacggtgaaatgcgcgtggggtcacgggtgatttcgcaggagatcagcacggcagatgaaggagatggtggtcaggttgtggtgattggtcgttga

SEQ ID NO: 22031 - DNA, 960 bp, Escherichia coli
atgagcgatgtgcgtttttattcccgcagcagcattcgcttcgcacgctgtgattgcattgaaggcacactttgcgaacatgtcgtactggctgtgcaggccttcgtcgaggccaaaactcagcaagcggaatttactcatttaatctggcagatgcgcagtgaacacgtcacatcatctgatgatccgtttgccagcgaagagggcaaaacgtgtcgtcaatatgttcagcaattaagccaggcattatggctgggcgggataagtcaaccgccaatccattacgaggccgctttcagtcgcgcgcaacaagcggcggaacgctgcaactggcgatgggtgagtgaatcgctacggcaattgcgcgccagtgttgatgccttccacgcccgtgccagccactaccatgccggagaatgcttacgtcagcttgcggcattaaacagtcgattaaattgcgtacaagagatggcgcgacgcgacagtatcggtgaagttcctcccatgccgtggcgcacggtcgttggcgctggtattgccggagaagcaaaacttgatcatctgcggctggtgtctttaggtatgcgttgctggcaggatattgagcagtatggtttacgcatctggtttaccgatcccgacacaggaagtattttgcatctttcgcgtagttggcagagaagcgaacaggaaaactcaccggcagcgacgcgtcggctgtttagttttcaggctggcgcactggccggtgggcaaattatttcacaagcagcaaaacgcagtgccgatggcgagctgctgttagctacccgcaaccgcttaagcagcgttgtgccgctgtcgcctgatgcctggcaaatgttgagcgcaccgttgcgccagccgggcattgtggctttgcgggaatatttacgccagcgtcccccccgcctgcatacgaccaatcaaccaggtcgataa

SEQ ID NO: 22032 - DNA, 162 bp, Escherichia coli
atgatgatcaacgcttttggtgataaccgcaattttcgcgtgcaattatatctttttactccggtatcgctgttttttaccggttcgatatttagcccggaatatgcatttttaatcgtctgtccgtttattttgcgaaaagcgttaaatattacgaggtaa

SEQ ID NO: 22033 - DNA, 1251 bp, Escherichia coli
atgaataaacaatcctggctgcttaacctcagcctgttgaaaacgcacccggcgtttcgcgcagtattcctcgctcgttttatctcaattgtttctctgggtttgctcggcgtcgcggtgccggtgcagatccagatgatgacgcattccacctggcaggtggggctttcggtgacgctgaccggcggcgcgatgtttgttggcctgatggtcggcggtgtgctggcggatcgctatgagcgtaaaaaagtgattttgctggcgcgcggcacctgtggcattggcttcattggactgtgcctgaacacgctgctgccggagcagtcattgctggcaatctatttacttggtttatgggatggttttttcgcatcacttggcgttacggcgctactggcggcgacacctgcactggtagggcgtgaaaacttaatgcaggccggggcgatcaccatgttgaccgtgcgcctggggtcggtgagttcgcccatgattggcggtttactgctggcgactggcggtgtggcctggaactacgggctggcggcggcgggcacgtttattaccttgctaccgttgttaagccttccggcgttaccaccaccaccgcagccgcgtgagcatccgttgaaatcattactggcaggatttcgttttctactcgccagcccgctggtgggagggattgcgttgctggggggtttattgacgatggcgagcgcggtgcgggtactgtatccggcgctggctgacaactggcagatgtcggcggcgcaaattggctttctctatgcggcaatcccgctcggtgcggctattggcgcgttaaccagtggaaaactggcgcatagcgtacggccaggtctgttgatgttgctctccacattgggggcgttcctcgccattggtctgtttggcctgatgccgatgtggattttaggcgtggtttgtctggcactgttcggctggctgagtgcggttagttcgttgctgcaatatacaatgctgcaaacgcaaaccccggaagcgatgttagggcggattaacggtttgtggacggcgcaaaacgtgacgggcgatgccataggcgcggcgctgctgggcggtttgggagcgatgatgacaccggttgcttccgcaagcgcgagcggttttggtttgttgattatcggcgtgttgttgttgctggtgctggtggagttgcgacgttttcgccagacgccgccgcaggtgacagcgtccgacagttaa

SEQ ID NO: 22034 - DNA, 510 bp, Escherichia coli
gtgctcgatcgcgaagcgggtaatcgtctgctggcgtcagaaaaagatcgccatgaacatgaactggtgactcaggcgatgaaagaggtactgcgcaaacgcagtagtgagttacacgttacctcctctccacaattgattaccacgccgacgctgtggcatctcgcaactccctttgaaggtaaagcgaattcgcaagaaaacgcactgactttggcttgtctgctgcatccgacccccgcgctgagcggtttcccgcatcaggccgcgactcaggttattgctgaactggagccgttcgaccgcgaactgtttggcggcattgtgggttggtgtgacagcgaaggtaacggtgaatgggtggtgaccatccgctgcgcgaagctgcgggaaaatcaggtgcgtctgtttgccggagcggggattgtgcctgcgtcctcaccgttgggtgagtggcgcgaaacaggcgtcaaactttctaccatgttgaacgtttttggattgcattaa

SEQ ID NO: 22035 - DNA, 1611 bp, Escherichia coli
atgagcattccattcacccgctggccggaagagtttgcccgtcgctatcgggaaaaaggctactggcaggatttgccgctgaccgacattctgacccgtcatgccgcaagcgacagcatcgcggtcatcgacggcgagcggcagttgagttaccgggagctgaatcaggcggcggataacctcgcctgtagtttgcgccgtcagggcattaaacctggtgaaaccgcgctggtacaactgggtaacgtcgctgaactttacattacctttttcgcgctgctgaaactgggcgttgcgccggtgctggcgctgttcagccatcagcgtagtgaactgaacgcctatgccagccagattgaaccggcgttactgattgccgatcgccaacatgcgctatttagcggggatgatttcctcaacacatttgttgcagagcattcttcgattcgcgtggtgcagctgctcaacgacagcggtgagcataacttgcaggatgcgattaaccatccggctgaggattttactgccacgccatctcctgctgatgaagtggcctatttccagctttccggcggcaccaccggcactccgaaactgatcccgcgcactcataacgactactactacagcgtgcgtcgtagcgtcgagatttgtcagttcacacaacagacgcgctacctgtgcgcgatcccggcggctcataactacgccatgagttcatcgggatcgttgggggtatttctcgctggcggcactgtcgttctggctgccgaccccagcgccacgttttgcttcccattgattgaaaaacatcaggtgaacgtcaccgcgctggtgccgccagcagtcagcctgtggttgcaggcactggctggaggcgaaagccgggcgcagcttgcctcgctgaaactgttacaggtcggcggcgcccgtctttctgccacccttgcggcgcgtattcccgctgagattggctgtcagttgcagcaggtgtttggcatggcggaagggctggtgaactacacccgtcttgatgatagtgcggagaaaattatccatacccagggttacccaatgtgcccggacgatgaagtatgggttgccgatgccgaaggaaatccactgccgcaaggggaagttggacgcctgatgacgcgcgggccgtacaccttccgtggctattacaaaagcccgcagcacaatgccagcgcctttgatgctaacggtttttactgttccggcgatctgatctctattgatccagagggttacatcactgtgcaggggcgcgagaaagatcagatcaaccgtggcggcgagaagatcgctgccgaagagatcgaaaacctgctgctgcgccatccggcggtgatctacgccgcactggtgagcatggaagatgagctgatgggcgaaaaaagctgtgcttatctggtggtaaaagagccgctgcgcgcggtgcaggtgcgtcgtttcctgcgtgaacagggtattgccgaatttaaattaccggatcgcgtggagtgtgtagattcacttccgctgacggcggtcgggaaagtcgataaaaaacaattacgtcagtggctggcgtcacgcacatcagcctga

SEQ ID NO: 22036 - DNA, 543 bp, Escherichia coli
atgcgtgcgtttagtggcaaacgtagtacgctggcgctggctatcgccggtgttacagcaatgtcgggctttatggcaatgccggaggctcgcgccgaaggattcatcgacgattcaaccttaaccggcggtatctattactggcagcgtgaacgcgaccgtaaagatgttaccgacggcgacaaatacaaaaccaacctttctcactccacctggaatgccaacctcgattttcagtccggttatgctgctgatatgttcggccttgatattgctgcgtttacggcgattgaaatggcggaaaacggcgacagctctcacccgaacgaaatcgcgttttcaaaaagtaataaagcctatgacgaagactggtccggcgataaaagcggtataagcctgtataaagcagcggccaaatttaaatacggtccggtttgggcgagggcaggttacattcagccaactggtcaaacgctgttagcgccgcactggagctttatgccgggtacttatcaggggggcggaagccggggcgaattttga

SEQ ID NO: 22037 - DNA, 519 bp, Escherichia coli
atgagtcaggcgaaatcgaacaaaatgggtgtcgttcagttaaccatactgacgatggtcaacatgatgggctccggtatcatcatgctgccgacaaagcttgccgaagtcgggacaatctcaattatctcctggctggtgacagccgtaggctcaatggcactggcatgggcattcgcaaaatgcggtatgttcagccgtaaatcaggaggtatgggcggttatgccgagtatgctttcggtaaatccggtaactttatggcgaactatacctacggcgtctcgctgctgattgctaacgtcgcgattgctatttcggcggttggttacggcaccgaactgctcggcgcgagtttgtcgccagtgcagattggtcttgcgaccatcggggtgctgtggatttgtaccgtggctaactttggtggtgcgcgcattaccgggcaaatcagtagcattaccgtgtgggggggtcattattccggtggtaggcctgtgcattatcggctggttctggtttag

SEQ ID NO: 22038 - DNA, 2199 bp, Escherichia coli
atgtcagaattaaaaattgccgttagccgttcttgcccggattgcttttccactcatcgtgaatgcgtgaatattgacaaaagtaattatattgacgttgccgctattattttatcagtcaatgatgttgaacgtggaaaactcgatgaaatagacgctactggctatggcattcctgtttttattgcaacggaaaatgaagaacgtgtaccagcagaatatctgccacgtatttctggtgtcttcgagcattgcgaatcacggaaagagttttatggacgtcagttagaaaccgctgccagccattatgaaacgcaactgcgcccgcccttcttccgcgcactggtcgattatatcaatcagggcaatagcgcttttgactgcccgggtcatcagggaggtgagtttttccgtcgccatccggcaggcaatcagttcgtggaatattttggcgaaatgctcttccgctccgacttgtgtaatgccgacgttgcaatgggtgatcttctgattcatgaaggtgcgccatgcattgcacagcaacatgcggctaaagtgtttaatgccgataaaacgtactttgttttaaacggcacctcctcctccaacaaagtggttttaaacgccctgctgacaccgggtgatctggtgctgtttgaccgcaataaccataagtctaaccatcacggggccttgctacaggctggtgcaacaccggtttatctggaaacagcacgtaacccgtatggttttatcggtggcattgatgcgcactgcttcgaagaaagttatctgcgtgaactgattacagaagttgcaccgcaacgggcaaaagaagcgcgtccgttccgcctcgctgtgattcagttaggcacctacgacggtactatttataacgcccgccaggtggtggataaaatcggtcatctgtgtgactacatcctgtttgactcagcatgggtcggctatgaacagtttattccgatgatggcggactgttcgccgctgctgctggagcttaatgagaacgatccgggtattctggttacgcaatctgtgcataaacaacaggctggtttttctcagacttcacaaattcataaaaaagacagccatatcaaagggcaacagcgttatgtaccgcacaaacgcatgaacaacgcctttatgatgcacgcctccaccagcccgttctatccgctgtttgccgcactggatatcaacgccaaaatgcatgaaggtgtcagcggtcgtaatatgtggatggattgtgtggttaacggtattaatgcccgcaaattgatcctcgataactgccagcacattcgcccgttcgttcctgaactggtggatggtaaaccctggcagtcgtatgaaacagcgcaaattgcggttgatctgcgcttctttaaatttgtacccggtgagcactggcattcttttgaaggctacgcagagaaccaatactttgtcgatccgtgcaaactgttgctgacaactccaggtattgatgcacgtaacggcgaatatgaagcgttcggtgtacctgcaacgattcttgctaacttcctgcgcgaaaatggcgtagtgccggaaaaatgcgatcttaactccatcctcttcctgctgactccggcagaagatatggccaaactgcagcaacttgttgccctgctggtacgcttcgaaaaactactggaagctgatgcgcctctggcggaagtactgccttccatctacaaacagcatgaagagcgctacgccggttataccctgcgtcagttgtgccaggaaatgcatgatttgtatgcccgtcacaacgtgaaacaactgcaaaaagagatgttccgtaaggaacacttccctcgcgtcagcatgaatccgcaagaagccaactacgcctacttacgcggtgaagtggagctggttcgtctgccggatgcagaaggccgtatcgctgccgaaggtgcgcttccttatcctccgggtgtgctgtgtgttgttcctggtgaaatctggggtggtgctgttttgcgttacttcagcgccctggaagaaggcatcaacctgctgccaggttttgcaccggagctgcagggtgtctatatcgaagaacatgatggtcgtaagcaagtttggtgctatgtcatcaagcctcgtgatgcgcaaagcaccctgttgaaaggggaaaaattatga

SEQ ID NO: 22039 - DNA, 1419 bp, Escherichia coli
atgactacccatctggtctggtttcgccaggatttacgtcagcacgataatctcgcgctggctgccgcctgccgcaattcgtctgcgcgcgtgctggcgttgtatatcgctacaccacgccagtgggcggcgcataatgtgtcgccgcgtcaggctgaacttatcaatacacaacttaatgcgctacaaatcgcgctggcggaaaaaggcattcctttattgttccgtgaagtggatgactttgccgccagcgtcgaaatagttaaacaggtgtgcgcggaataccgcgttactcatcttttttataactatcagtatgaggtgaatgagcgggcgcgggatgtgcaggctgagaggacgctgcgtaacgtggtgtgtgaaggatttgatgacagcgcgatcctgccgccgggggcggtgatgactggcaatcatgagatgtacaaagtctttacgccttttaaaaacgcatggttgaaacggctgcgggaagggatgccggagtgcgtcgctgcaccaaaagttcgtagtagcggatcgatagagcccgcgccatccattacgctgaattatcctcgtcagtctttcgatactgcgcatttcccggtggaagaaaaagcggcgattgcgcaattacgccagttttgcctgaacggtgccggagagtatgagcaacaacgagattttccggcagtggaaggcaccagtcgtttgtccgccagcctggcaacgggcgggttatcgcctcgccagtgtttacatcgcctgttggcggaacaaccgcaggtgctggaaggcggaccggggagcgtctggcttaatgagctgatatggcgcgagttctaccgccatttgatgacgtattatccttcgctgtgtaaacatcgtccgtttattgcctggacggatcgtgtacagtggcaaagcaatcccgcccatttaaaggcctggcaggagggcaaaacgggatacccgattgtcgatgctgccatgcgtcagcttaacagcactggctggatgcataaccggctacggatgattacagccagttttctggtgaaagatttgttgatcgactggcgcgaaggcgagcgatatttcatgtcgcagttgattgatggtgatttggcagctaataacggtggctggcagtgggctgcttctacgggtactgatgcagcgccgtattttcgtattttcaacccgacaactcagggcgagaaatttgaccgcgaaggcgaatttatccgccagtggctaccggagctgcgcgatgtaccggggaaagcggtgcatgagccgtggaagtgggcagagaaaacaggtgtgacgttggattatccgcaaccgatagtcgatcacaaagaggcaaggctgcgaacgctggcagcgtacgaagaagcgaggaaaggagcctga

SEQ ID NO: 22040 - DNA, 651 bp, Escherichia coli
atgttgttctgggcattcgcacaacaggggggtagctcgattagcctttatatcgaccgcttcgttaaccgcgatatgtttggttataccgttccgactgctatgttccagtcgattaatgccttcgcagttatgctgtgcggtgtgttcctggcgtgggtggttaaagaaagcgtcgcaggtaatcgtaccgtgcgcatctggggaaaatttgctcttggccttggcctgatgagcgccggattctgcattctgaccttaagcgcccgctggtccgcaatgtatggtcactcttctctgccactgatggtgttaggcctggcggtgatgggctttgcggaactgtttatcgatccggttgctatgtcgcagattacgcgcattgaaatccccggcgtgaccggcgtattaaccggcatttatatgctgctttccggcgcgattgcgaactatctggcgggcgtgattgccgatcagacgtcgcaggcttcgtttgatgcttccggggcgatcaactactccatcaatgcatatattgaagtatttgatcaaattacctggggcgcactggcgtgtgtaggactggtactgatgatttggctgtatcaggcgcttaagttcagaaaccgcgcgctggcgctggagtcttaa

SEQ ID NO: 22041 - DNA, 126 bp, Escherichia coli
atgcgctatagcaaattgaccatgcttatcccttgcgcactgctactcagtgcctgtaccaccgtcacgccagcttataaagataacggcccccgcaccggttcctgtgtccaggggggggcctga

SEQ ID NO: 22042 - DNA, 234 bp, Escherichia coli
atggaactgacgactcgcactttaccttcgcggaaacatattgcgctggtggcacacgatcactgcaaacaaatgctgatgagctgggtggaacggcatcaaccgttactggaacaacacgtactgtatgcaacaggcactaccggtaacttaatttcccgcgcgaccggcatgaacgtcaacgcgatgttgagtggcccaatggggggggtgaccagcaggttggcgcattga

SEQ ID NO: 22043 - DNA, 2067 bp, Escherichia coli
atgctgctggaacaagctcgcctgccgcagccagtagctgaacaggcgcacaaactggcgtatcaactggccgataaactgcgtaatcaaaaaaacgccagtggtcgcgcaggtatggttcaggggttattgcaggagttttcgttgtcatcgcaggaaggcgtggcgctgatgtgtctggcggaagcgttgttgcgtattcccgacaaagccacccgtgacgcgttaattcgcgacaaaatcagtaacggtaactggcagtcacacattggtcgtagcccgtccctgtttgttaatgccgctacctgggggctgctgtttaccggcaaactggtttccacccataacgaagccagcctctcccgctcgctgaaccgcattatcggtaagagcggtgaaccgctgatccgcaaaggtgtggatatggcgatgcgcctgatgggcgagcagttcgtcacgggcgaaaccatcgcggaagcgttagccaatgcccgcaaactggaagagaaaggtttccgttactcttacgatatgctgggcgaagccgcactgactgccgcagatgcgcaagcgtatatggtttcctatcagcaggcgattcacgccattggtaaagcgtctaacggtcgtggcatctatgaaggtccgggcatttcaatcaagctgtcggcgctacatccgcgttatagccgcgcccagtatgaccgggtaatggaagagctttacccgcgtctgaaatcactcaccctgctggcgcgtcagtacgatattggtattaacatcgatgccgaagaggccgatcgtctggagatctccctcgatctgctggaaaaactctgtttcgagcctgaactggcaggctggaacggcatcggttttgttattcaggcttatcaaaaacgctgcccgttggtgatcgattacctgattgatctcgccacccgcagccgtcgccgtctgatgattcgcctggtgaaaggcgcgtactgggatagtgaaatcaagcgtgcacagatggacggccttgaaggttatccggtttatacccgcaaggtgtataccgacgtttcttatcttgcctgtgcgaaaaaactgctggcggtgccaaatctaatctacccgcagttcgcgacgcacaacgcccatacgctggcggcaatttatcaactggcgggtcaaaactactacccgggtcagtacgagttccagtgcctgcatggtatgggcaagccactgtatgagcaggtcaccgggaaagttgccgacggcaaacttaaccgtccgtgtcgtatttatgctccggtcggtacacatgaaacgctgctggcatatctggtgcgccgcctgctggaaaacggtgctaacacctcgtttgttaaccgtattgccgacacctctttgccactggatgaactggtcgccgatccagtcactgctgtagaaaaactggcgcaacaggaagggcaaactggattaccgcatccgaaaattcccctgccgcgcgatctttacggtcacgggcgcgacaactcggcagggctggatctcgctaacgaacaccgtctggcctcgctctcttcagccctgctcaatagtgcactgcaaaaatggcagtccttgccaatgctggaacaaccggtcgcggctggtgagatgtcgcccgttattaaccctgcggaaccgaaagatattgtgggctatgtgcgtgaagccacgccgcgcgaagtagaacaggcgctggaaagtgcggttaataacgcgccaatctggtttgccactcctccggctgaacgcgcggcgattttgcatcgcgctgccgtgctaatggaaagccagatgcagcaactgattggtattctggtgcgtgaagccggaaaaaccttcagtaacgccattgccgaagtgcgcgaagcggtcgattttctccactactatgccggacaggtgcgggatgatttcgctaacgaaacccaccgtccattaggggcctgtggtatgtatcagtccgtggaacttcccgctggctattttcaccggacagatcgctgccgcactggcggcaggtaa

SEQ ID NO: 22044 - DNA, 1419 bp, Escherichia coli
atgacagagctcttttatcacaaggagaccattgccccggatttatccgatgaagaacttgcggatctcttttacagccacctggagagtgaaaattatcccggcgcgctaactgtcacccaacataccattaatacttcgccgcctttccttcggttaatgggcacgcctacgagcatcccgaatgatacctggttacaggggcattcgtttctctcaaccgtagcaaaatatagtaatgatcttcctcaggctgaaatgatagccagagagcttgcttataacgcaccaggaaatcagggactgcgcattgattacgcgagtgtgttacaagcccgcggttggcatcgtgcagcagaaaatgaattaaaaaaagcagaagtgatcgagccacgtaatattaatctggaggttgaacaagcatggacagcattaacgttacaagaatggcagcaggcagctgtcttaacgcacgatgttgtcgaacgtgaaccgcaagatcccggcgttgtacgtttaaaacgtgcggttgatgtacataatcttgcagagcttcgtatagctggttcaacaggaattgatgccgaaggcccggatagtggtaaacatgatgtcgacttaaccaccatcgtttattcaccaccgctgaaggataactggcgcggttttgctggattcggttatgccgatggacaatttagcgaaggaaaagggattgttcgcgactggctggcgggtgttgagtggcggtcacgtaatatctggctcgaggcggagtacgctgaacgcgttttcaatcatgagcataaacccggcgcgcgcctgtctggctggtatgattttaatgataactggcgtattggttcgcaactggaacgcctctctcaccgcgttccattacgggcaatgaaaaatggtgttacaggcaacagtgctcaggcttatgttcgctggtatcaaaatgagcggcgtaagtacggtgtctcctgggctttcactgatttttccgacagtaaccagcgtcaggaagtctcacttgagggtcaggaacgcatctggtcttcaccatatttgattgtcgatttcctacccaatctgtattacgaacaaaatacagaacacgacactccatactacaaccctataaaaacgttcgatattgttccggcatttgaggcaagtcatttgttatggcgaagctatgaaaatagctgggagcaaatcttcagcgcaggtgttggtgcctcctggcaaaaacattatggcacggatgtcgtcacccaactcggctacgggcaacgtattagctggaatgacgtgattgatgctggcgcaacgctacgctgggaaaaacgaccttatgacggtgacagagaacacaacttatacgttgaattcgatatgacattcagattttaa

SEQ ID NO: 22045 - DNA, 1059 bp, Escherichia coli
atgtattcaagtagcagaaaaaggtgcccgaaaaccaaatgggctttgaaacttcttactgccgcatttttagcagcgagtcccgcggcgaagagtgctgttaataacgcctatgatgcattaattatcgaagctcgcaagggaaatactcagccagctttgttatggtttgcacaaaaatcagcactcagtaataaccaaattgctgactggttacagattgccttatgggccgggcaagataaacaggttattaccgtttacaaccgctaccgtcatcagcaattaccagcgcgtggttatgcagctgtcgccgtcgcttatcgtaacctgcaacaatggcaaaactcgcttacactgtggcaaaaggcactctctctggagtcgcaaaataaggattatcaacggggacaaattttaaccctggcagatgcgggtcactatgattctgcgctggttaaacttaagcagcttaactctggagcaccggacaaagctaatttactcgcagaagcctatatctataaactggcggggcggcatgaggatgaattacgggcgatgacagggtcattacctgaaaatgccttaacgcaacaatatcccacagaatacgtgcaggcattacggaataatcaacttgctgccgcgattgacgatgccaatttaacgccagatattcgcgctgatattcatgccgaactggtcagactgtcgtttatgcctacgcgcagtgaaagtgaacgttatgccattgccgatcgcgccctcgcccaatacgctgcattagaaattctgtggcatgataactcagaccgcactgcccagtaccagcgtattcaggttgatcatcttggcgcgttattaactcgcgatcgttataaagacgttatttctcactatcagcgtttaaaaaatacgaggcaaattattccgccctgggcgcaatattgggttgcgtcggcttatctcaaagaacagcagccaaaaaaaagcacagtcaataatgacagagctcttttatcacaaggagaccattgccccggatttatccgatga

SEQ ID NO: 22046 - DNA, 693 bp, Escherichia coli
gtgattgctttttgtgccgtactgtacaatgtctctcttttatttatgagcaggtatagcgtgtccatttggtatattagtcgcactattgaagtagtcagtaagttaaccgttatggtaatatttatgtgccatatattcagtgcgctacgagtaacaaaggacattgcacatcgcaattccttaaccaatatatttaacagaaattatttttttaatgaactgacagttcaatcagcatcggccaaaaaaacgccttattgcgtcatgattatggatatcgaccacttcaaaaaagtcaacgacacctgggggcatccggttggcgatcaggtgataaaaacagtggtgagtatcattgggaaaagcatacggccagatgacctttttgcgcgcgtcggcggcgaagagtttggcgtcttgctgacggacatcgatactgaacgtgcgaaagctttagcggaaaggattcgggaaaatgttgagcgtttaactggtgataatcctgaatacgccataccacaaaaagtgacgattagtattggcgctgttgtaacgcagaaaaatgagttaaaccctaaggagatctatcaactggctgataacgcactttacgaggcgaaagagaccgggcgtaataaggtggtagtaaaagaggcagaaattcttatcaaccgcaaggatgatgaatga

SEQ ID NO: 22047 - DNA, 270 bp, Escherichia coli
gtgaaacatctgacagaaatggtgaggcagcacaaagcgggcaaaacaaatgggatttatgccgtttgttccgcacatccgctggtgctggaagctgcaatccgctacgccagtgcaaaccaaacgccgttactgattgaagcaacctccaatcaggtggaccagttcagcggttataccggaatgacgcccgccgattttcgcggctttgtttgtcagctcgccgactcgttgaatttccccccaggatgcgctgattctgggtggtga

SEQ ID NO: 22048 - DNA, 249 bp, Escherichia coli
atgcaagcggcaactgttttgattaaccgccgcgctctgcgacacaacctgcaacgtctgcgtgaactggcccccgccagtaaactggttgcggtggtgaaagcgaacgcctacggtcacggtctgattgagaccgcgcgaacgctccccgatgctgacgcctttggcgttgcccgtctcgaagaagccctacggctgcgggcgggggggcatcacgcgacctattttgttactggaaggtttttttga

SEQ ID NO: 22049 - DNA, 1572 bp, Escherichia coli
atgtgctctgtacgcacgatcactgcaccggaagctgcagatttgattgttgatggcgcagttgtcaccgtctcctcctccagtggaatggggtgtccggatgcggtgctggcagcaataggtgaacgctttcaacgtgccggacatccgcaaaacatcacctccatccaccctatcgccgctggtgatatgtatggcgtaaaaggcatcgatcatctggcgcaaccgggcttactggcaaaagtgatcgctggctcctacccctccggtccatcatcaatggcacctccgttaatctggcaaatgatcaatgacaacgcgatccccgcctggaatctgccttccgggatcttatttgatatgcaccgggaagcggcggctcatcgtcctggcgtgctgacacaaacaggcatggatacctatgtggatcccctgttgcagggcggtgcaatgaatgaaaaagcggcgcaacaatctctggttgaacgtgttcgatttgctaacgacgactggctgtttttccccagtatcgtgccgcaggtggcgatcattcgcgctaccactgccgatgaacgcggcaacctgacttatgaacatgaaggggcttatctggggccactggaacaggctactgccgttcgcaataatggtggcatcataattgcgcaagtaaaacgacaggttgccgccggaagtctgaaaccaaaagaggtgcgtattccgggtgtactggtggattacatcgtgattgcgccggaacaaacacaaacgacacaaacgcaatatgaacctgccatttccggcgaaatcagtcgtccgctatcagcctttcgttatatggaacatggcccggcgcgagttattgcccagcgagtcgcgcaagaactacaaagtggagatgcggtaaatattggctttggtatttctgccaacgtaccacgcattctactggaacaaggtcgccacggtgacgtcacctggctgctggaacagggcgcgattggcggagttccactgctggaatttcagttcggttgtgcctctaatgcagaagcatttttgccctctccccagcagttcacctatttccagggcggtggctttgatctcactctgatgtcgtttttacaaatcggcgcagatggctcagtgaacgtctcacatctccccgctcgtccacatgtcactgccggatgcggtggatttattgatatcacctcacatgcgaagcgcattattttctctggctttttcaatgccggtgcccaactgcaactggaagaaggtcagctgcgtatcattaaagaaggcaaagccaaaaaactggcacaggacgtcgcccacgtgacgttctccggcaaacgcgcaataagactcgggcaacaagtgcagtacatcactgaacgctgcgtgctggaattaaccccagacggactactggtcacggaaattgccccaggtattgatcctgaacgcgacattctcgcccaaagcgatgccccactccgtctggcagacgatctcaaactaatgaatccccactattttcaacaaggacgtcaccatgaataa

SEQ ID NO: 22050 - DNA, 477 bp, Escherichia coli
atgaatgttttcagtcgctatttaatccgtcacctctttctcggttttgccgccgccgcagggctattgctgccgctttttaccaccttcaacctgattaacgaactggatgatgtcagtccgggcggttatcgctggactcaggcagtgctggtggtgctgatgaccttaccgcgcacactggtcgaactttcgccgtttatcgccttattgggaggtattgtcggtctcgggcagctatcgaaaaacagtgagcttaccgccattcgcagcacggggttttctatcttccgtattgcactggtggcgctggttgccgggatactgtggactgtttcgttaggcgcgatagatgagtgggggcgtcgccattgcagcaacaggcgctgcaaatcaaatcgaccgccaccgcgttgggggaggacgatgacattaccggcaatatgctttgggccaggcgcggtaatgaatttgtga

SEQ ID NO: 22051 - DNA, 351 bp, Escherichia coli
gtggtgacagcgcaggatgagttaacactgatttgtggcgggggctatatcaaaattaaaagtggcaatgtggagattggcggtccgggaaaactattggttaaaaatgccggtattaagaaagcaggctccggtagtatgcagggcgtgatgaagtcgtttgagcctgaaagtttcgatgaaaatttcattatttcgaatccagcatcaggtaagccgatagcaaatcaaaaatatgaaatacacatgccagatgggagtgttattgccgggataaccgatgcaatggggtattcctctcttgttgcgtcaaaagcatctgatgacctaaaaattattctgaaaaaatga

SEQ ID NO: 22052 - DNA, 672 bp, Escherichia coli
ttgggtgatggcaaacccttctgggacagcacaacaacgctgttacagagggcaacgtggccggatccggacagcgggcagacattaactattaacgcgccgcaggtgccggaaccgctgacagctgaagaactaaagaattttgatcaagactatgcccgtgacgaaaagcaaagcggcggagcaggatatgcttacgggcagattaacccagagacgaaaaaacctgtcgataccgactatcgttattacatttcactgtatggctattttgaccggaagatggtgccgaaaaaagactcgggatactaccagtcagggccggggtcgaaagaggacagggtaaagtatgaaaagcagtcacaagaagagatgctggaggaggtaagaacctatgttcagcgtccaacagatcacagtaccctgccatcggatgagcgatttatgagccgggtagtggcctatgatttacccatcggttactgctggcattcgtgggacaaagcgggtctggaagagcttcgtcgtcaggctgactggctggaaagcgatgactattactttagtggcaagctgactgttccgccaataccgcctgcgataaaacaggatgtcgccgaagatgctgaacagagaaaggcagaagaaaaggcccggttacgtaatgtgtga

SEQ ID NO: 22053 - DNA, 606 bp, Escherichia coli
atgttgggtgagccagtggcagatgttcaactagcaacgccgggcgtcgttcgcggcaagaaaggcgaagttagtttcggagagatagcccataaaggcgaaaccggcaccggctttggttcactggtgggaactggcagttatatcacgcctgatttcgccttcccgtatggcgcaaacttcgctgaagttgccgtcaacacgcgtacgggtgaaatccgcctggataaattctacgccttgctggactgcggtacaccggtcaatccagagttagcgctgggacaaatctacggtgccaccctgcgtgctatcggccacagtatgagcgaagagatcatttatgacaccgaaggtcacccgttaacgcgtgatttacgcagttacggcgcaccgaaaattggtgacattccgcgtgatttccgcgctgtgctggtgccgagcgacgataaagtcggcccattcggggcgaaatcgatctcggaaatcggtgtaaatggcgccgctccggcgattgctaccgcaattcacgatgcctgcggcatctggttacgcgaatggcatttcacaccggagaaaatactcaccgcgctggaaaaaatataa

SEQ ID NO: 22054 - DNA, 528 bp, Escherichia coli
atgaaccgtttcatcattgctgacgcgagtaaatgtattggttgccgtacctgtgaagtagcgtgcgtggtttctcatcaggaaaatcaggactgtgcatcgctgaccccggaaacatttttaccgcgtatccatgtcattaaaggtgtgaacatttccacggcgacagtttgccgtcagtgtgaagatgcaccgtgcgctaacgtctgcccgaatggtgctatcagccgtgataaagggtttgttcatgtcatgcaggaacgttgtattggttgcaaaacctgcgttgtggcttgcccgtatggtgcgatggaagtggtggtgcgtccggtgattcgcaacagcgtcgcagggctgaatgtacgggctgacaaagccgaagccaataaatgcgacctgtgcaaccatcgtgaagacggcccggcgtgtatggcggcttgcccgacccatgcgctgatttgtgtcgatcgtaataaacttgaacaactgagcgcagaaaaacgccgccgcacggcgctgatgttctaa

SEQ ID NO: 22055 - DNA, 1218 bp, Escherichia coli
atgttgttcaacacctggggcaaccagattcaaaccttgtgcctgttaccgctgatgtctggcgacactatgctgggcgtgctaaaactggcgcaatgcgaagagaaagtctttaccactaccaatctgaatttactgcgccagattgccgaacgtgtggcaatcgctgtcgataacgccctcgcctatcaggaaattcatcgtctgaaagaacggctggttgatgaaaacctcgccctgaccgagcagctcaacaatgttgatagtgaatttggcgagattattggccgcagcgaagccatgtacagcgtacttaaacaagtggaaatggtggcgcaaagtgacagtaccgttctgatcctcggtgaaactggtacaggtaaagagctgattgcccgcgcgatccataatctcagtgggcgtaataatcgccgtatggtcaaaatgaactgcgcggcgatgcctgccggattgctggaaagcgatctatttggtcatgagcgtggggcttttaccggtgccagcgctcagcgcattggtcgttttgaactggcggataaaagctcactattcctcgatgaagtgggcgatatgccgctggagttacagccgaagttgctgcgtgtattacaggaacaggagtttgaacgtctcggcagcaacaaaatcattcagacggacgtacgtttaattgccgcgactaaccgcgatctgaaaaaaatggtcgccgaccgagagttccgtagcgatctctattaccgcctgaacgtattcccgatccacctgccgccactacgcgagcgtccggaagatattccgctgctggcgaaagcctttaccttcaaaattgcccgtcgtctggggcgcaatatcgacagcattcctgccgagacgctgcgcatcctgagcaacatggaatggccgggcaacgtgcgtgagctggaaaacgtcattgagcgcgcggtattgctaacacgcggcaacgtgctgcagctgtcattgccagatattgctttaccagaacctgaaacgccgcctgccgcaacggttgtcgcccaggagggcgaagatgaatatcagttgattgttcgcgtgctgaaagaaacaaacggcgtggttgccgggcctaaaggcgctgcgcaacgtctggggctgaaacgcacgactctgctgtcacggatgaagcgactgggaattgataaatcggcattgatttaa

SEQ ID NO: 22056 - DNA, 321 bp, Escherichia coli
atggttgaagccggactggtggtgctgaccgcatttatctcgccacaccgcgccgaacgccagatggttcgcgaacgcgtaggagaagggcgctttatcgaagtgtttgtcgatacgccgctggcgatttgcgaagcccgcgatccaaaaggtttatataagaaagcgcgtgccggtgaactgcgcaactttacgggaatagattccgtttacgaagcgcctgaatcggcagaaattcatctcaatggtgaacaattagtaacaaatttggtacagcaattattagatctgttgagacagaacgatattatcagatcctga

SEQ ID NO: 22057 - DNA, 285 bp, Escherichia coli
atggctctgcatgacgaaaacgtcgtctggcatagccacccagtaactccgcaacaacgcgaacagcaccacggtcatcgtggtgttgtgctgtggtttaccggcctctctggttccggtaaatcaaccgtcgcggggcgctggaggaggcgttacataaacttggcgtcagtacgtatctgctggatggcgacaacgttcgccacggattatgcagcgatctcggttttagcgatgccgaccgtaaagagaatatccgtcgcgtcggtgaagtggcgaatttga

SEQ ID NO: 22058 - DNA, 1062 bp, Escherichia coli
atgaaaacgatgctggcagcttatttaccaggaaattcgaccgtcgatctgcgggaagttgcggtgctgacgccggggattaaccaggtactgatcaaaatgaaatcctccgggatttgcggaagcgatgtccactatatctaccaccagcaccgcgctacggcggcggcacccgataaaccgttataccagggatttatcaacggtcatgaaccgtgcgggcagattgtggcgatggggcaaggctgtcgccattttaaagagggcgaccgcgtgctggtgtatcacatttctggctgtggtttttgcccgaactgccgtcgcggttttcctatttcttgtactggcgaaggaaaagcggcttacggctggcagcgtgacggcggtcatgccgaatacctactggcggaagaaaaagatctgatcctcctgccagacgcgctgagttacgaagatggcgcgtttatcagttgcggtgttggtacggcgtatgaagggattttgcgcggcgaggtttccggtagcgataacgtggtggtggttggtctggggccggtcggcatgatggcgatgatgctggcgaaaggtcgcggtgcaaaacggatcatcggcgttgatatgttgccggaacgtctggcgatggcgaaacagttaggagtgatggatcacggctatttagcgaccaccgaaggtatgccgcagataatcgccgaactcactcacggcggcgcggatgttgcgcttgattgttccggtaatgccgcaggtcgcttactggcactgcaatccaccgctgactggggacgcgtggtttacattggtgaaaccggaaaagtcgagttcgaggttagcgccgacctgatgcaccatcaacggcggattatcggctcctgggtgaccagtctgttccatatggaaaaatgcgcccacgatttaacggactggaaactgtggccgcgtaacgccattacccaccgcttctcgctggaacaggcgggagatgcttatgcactgatggcaagcggcaaatgcgggaaagttgtgattaatttcccggattaa

SEQ ID NO: 22059 - DNA, 1215 bp, Escherichia coli
atgttcaggcagttgaaaaaaaacctggttgcaaccctcattgctgctatgaccattggtcaggtagccccggcgtttgccgacagcgcagacaccttgccggatatgggaacctccgcaggaagcacactttccattggtcaggaaatgcagatgggcgactattatgtccgccagttacgcggcagcgcgccgttaattaatgatccgctgttaacgcaatacattaattcgctaggaatgcgtctggtttcgcatgccaattcggttaagacaccgtttcatttctttctgatcaacaacgacgaaattaacgcctttgctttctttggcggcaacgtggtgctgcactctgccctgttccgttattccgataacgaaagtcaactggcttcagttatggcgcacgaaatctcccacgtcacccaacgtcacctggcgcgagcgatggaagatcagcagcgcagcgcgccgctgacctgggtcggcgcgttaggttctattttactggcgatggccagtccgcaggcggggatggcggcgctgaccggtacactggcgggaacgcgccaggggatgatcagtttcacccagcaaaatgaacaggaagcggaccgcattggtattcaggtgctgcaacgctcgggattcgatccgcaggcgatgccgaccttcctcgaaaaattactcgatcaggcgcgttactcttcgcgcccgccagaaattctgctcactcacccactaccggaaagccgtctggctgatgcccgtaaccgtgccaatcagatgcgcccgatagtggtgcaatcgtcagaagatttctatctggcaaaagtgcgcacactggggatgtacaattcagggcgtaaccaactcaccagtgatttgctggatgaatgggcgaaaggaaacgttcgtcagcaacgagcggcgcaatatggtcgtgctttacaggcgatggaagccaataaatacgacgaggcgcgtaaaacgctgcaaccgttactggcggcagaacctggcaacgcatggtatctcgatctggctaccgatatcgatcttgggcaaaacaaagccaatgacgctatcaatcgcctgaaaaatgcccgcgatttgcgcaccaatccggtgttgcagctcaacctggcgaacgcttatctgcaagggggggcaaccacaggaagcggccaatattctgaatcgctacacttttaa

SEQ ID NO: 22060 - DNA, 1602 bp, Escherichia coli
atgaatcgttttattatggccaacagtcagcaatgtctgggttgtcatgcttgtgaaatcgcctgtgtcatggctcacaatgacgagcaacatgtcctgagccaacaccattttcatccccgaattacggttatcaaacatcagcagcaacgtagtgcagtgacctgtcaccattgtgaagatgcgccctgcgcccgtagctgccctaatggcgcaatcagccacgttgatgacagcattcaggtcaatcagcaaaagtgtattggctgtaaatcctgcgtggtggcctgtccatttggtacgatgcaaatcgttctgacacccgttgcggtaggaaaagtaaaagccacggcgcataaatgcgacctttgtgcagggcgcgaaaacggtcctgcctgtgtcgaaaattgcccggcggacgcgctgcaactggtcactgacgccgcactctccggcatggcgaaatcccgccgcttgcgcaccgcacgtcaggaacatcaaccgtggcatgccagtaccgcggcgcaagaaatgccggtaatgagtaaagtcgagcaaatgcaggcaacgcccgcgcgtggcgagccagataaactggcgattgaagcgcgcaaaaccggttttgatgaaatttatctgccattccgtgccgatcaggcacaacgggaagcctcgcgctgccttaagtgcggcgagcacagcgtttgtgaatggacctgcccgctgcataaccatataccgcagtggattgaactggtgaaagccggaaacatcgacgccgccgtcgagctttctcaccagaccaacaccctgccggaaattaccggacgcgtttgcccgcaagaccgtttgtgtgaaggtgcctgtactattcgcgatgagcacggcgcagtaactatcggtaacattgaacgctacatttcagatcaggcgttggcgaaaggttggtgtcctgacttaagccatgtcaccaaagtggacaagcgggtggcgattatcggtgcgggtccggcagggctggcctgtgcagatgttctcacccgcaatggcgtggcggtgacggtgtacgatcgccatccagaaatcggtggcttgctcactttcggcattccttctttcaaactggataaatccctgctggcacgccgtcgggaaatcttcagcgcgatggggattcacttcgaactcaattgtgaagtgggtaaagatgtctctttgaattcgcttttggaacaatacgacgcggtcttcgttggcgtaggcacttaccgttccatgaaagcgggtttacccaatgaagatgcgccgggcgtttatgacgcgctgccgttcctcatcgccaatactaaacaggtgatgggactcgaagagctaccggaagagccgtttatcaatactgccggacttaacgtcgtggtactgggcggcggcgacaccgcgatggactgtgtgcgtactgcgctgcgccacggcgcgagtaacgtcacctgcgcttatcgtcgtgatgaagctaacatgccaggctcgaagaaagaggtgaagaacgcccgtgaagaggggccaacttcgaatttaacgtccagccggtggcgcttgaactga

SEQ ID NO: 22061 - DNA, 951 bp, Escherichia coli
atgaacgagttagacggcatcaaacagttcaccactgtcgtggcagacagcggcgatattgagtccattcgccattatcatccccaggatgccaccaccaatccttcgctgttactcaaggctgccggattatcacaatatgagcatttaatagacgatgctatcgcctggggtaaaaaaaatggcaagacccaggaacaacaggtggtcgcagcgtgtgacaaactggcggtcaatttcggtgctgaaattctcaaaatcgtacccggtcgcgtgtcaacagaagttgatgcacgcctctcttttgataaagaaaagagtattgagaaggcgcgccatctggtggacttgtatcagcaacaaggcgttgagaaatcgcgcattctgatcaagctggcttcgacctgggaaggaattcgcgcggcagaagagctggaaaaagaaggtatcaactgcaacctgacgctgctgttttcttttgcacaggcgcgggcctgtgcagaagcaggcgtttttctgatttcgccgtttgtcgggcgtatttatgactggtatcaggcacgcaagccgatggacccgtatgtggtggaagaagatccaggcgttaaatcagtacgcaatatctacgactactataagcaacaccactatgaaaccattgtgatgggcgcgagcttccgtcgcaccgaacaaatcctcgccttaaccggctgcgaccgactgactatcgcaccgaatttgctgaaggagctacaggaaaaagtttcgccagtggtacgtaaattaatcccaccttctcagacgttcccacgcccagctcccatgagcgaagcggagttccgttgggagcacaatcaggatgcgatggcggtagaaaaactgtctgaaggcatttgtctgttcgccgttgatcaacgcaaactggaagatcttcttgccgccaaactataa

SEQ ID NO: 22062 - DNA, 273 bp, Escherichia coli
atgaattattctttaaagcaattaaaggttttcgtcacagtagcgcaggagaaaagttttagtcgtgcaggagagcgtatcggcctgagccagtcggcagtgagtcacagtgtgaaggagctggaaaatcatactggtgttcgcctgctggacagaaccacgcgtgaagtggtgcttacagatgcagggcagcagttggctttgcgtcttgagcgactgctggatgaacttaacagcacgtgcgcgataccgggcgtatggggcaacaactga

SEQ ID NO: 22063 - DNA, 687 bp, Escherichia coli
gtgcgcgataccgggcgtatggggcaacaactgagcggaaaagttcgggtcgctgccagccagaccatttccgcgcatcttattccgcaatgcattgctgaaagccatcgccgctatccagatattcagtttgtcctgcacgatcgtccgcagcagtgggtgatggaaagtattcgccagggagatgtcgattttggcatcgtcatcgatccaggcccagtgggcgatctgcaatgtgaagcgattctttccgagcctttctttctgctttgccatcgcgatagcgctttggccgtggaagattatgtcccctggcaggcattacagggagcgaaattggtgttgcaggattacgcgtcaggcagccgaccgctgattgacgcagcgctggcgcgcaacggtattcaggcgaatattgtgcaggagattggtcatccggcgacgctgttcccgatggtagccgcaggcatcggcatcagtattcttcccgcactggcgctaccattgcctgaaggtagcccactggtggtaaagcgcattacgccagtggttgaacgccagttgatgctggtgcgcaggaagaaccgttcactttccaccgccgcacaagcgttatgggacgtagtacgagaccagggcaatgcgctaatggctgggcgggaaggggatccgttgtatcagatatag

SEQ ID NO: 22064 - DNA, 171 bp, Escherichia coli
atgcgcaatttgcagcccaacatgtcacgttgggcttttttgcgaaatcagtgggaacctggaataaaagcagttgccgcagttaattttctgcgcttagatgttaatgaatttaacccataccagtacaatggctatggtttttacattttacgcaaggggcaattgtga

SEQ ID NO: 22065 - DNA, 945 bp, Escherichia coli
atgccagaggtacaaacagatcatccagagacggcggagttaagcaagccacagctacgcatggtcgatctcaacttattaaccgttttcgatgccgtgatgcaggagcaaaacatcacccgtgccgctcatgctctgggaatgtcgcaacctgcggtcagtaacgctgttgcacgcctgaaggtgatgtttaatgacgagctttttgttcgttatggccgtggtattcaaccgactgctcgcgcatttcaactttttggctcagttcgtcaggcattgcaactagtacaaaatgaattgcctggttcaggttttgaacccgcgagcagtgaacgtgtatttcatctttgtgtttgcagcccgttagacagcattctgacctcgcagatttataatcacattgagcagattgcgccaaatatacatgttatgttcaagtcttcattaaatcagaacactgaacatcagctgcgttatcaggaaacggagtttgtgattagttatgaagacttccatcgccctgaatttaccagtgtgccattatttaaagatgaaatggtgttggtagccagcaaaaatcatccaacaattaaaggcccgttactgaagcatgatgtttataacgaacaacacgctgcggtttcgctcgatcgtttcgcatcatttagtcaaacctggtatgacacggtagataagcaagccagtatcgcgtatcagggcatggcaatgatgagcgtacttagcgtggtgtcgcaaacgcatctggtcgctattgcgccgcgttggttggctgaagagttcgctgaatccttagagttacaggtattaccgctgccgttaaaacaaaacagcagaacctgttatctctcctggcatgaagctgccgggcgcgataaaggccatcagtggatggaagagcaattagtctcaatttgcaaacgctaa

SEQ ID NO: 22066 - DNA, 288 bp, Escherichia coli
atgatcaaacgcggtggcgagaatgtctcctgcgtggagctcgaaaatatcatcgccacccatcccaaaattcaggatatcgtggttgtgggtattaaagattcgattcgcgatgaagccatcaaagcatttgtggtgctgaatgaaggtgaaacattgagcgaagaggaattcttctgcttctgtgaacagaatatggcgaaatttaaagtgccctcttatctggagatcagaaaagatctgccacgtaattgctcggggaaaataattagaaagaatctgaaataa

SEQ ID NO: 22067 - DNA, 273 bp, Escherichia coli
ttggggggggtagtcaaccgcgtggttagccaggcggaactgatggataacgcccgcgaactggcgcagcagctggttaacagcgctccgctggcgattgcggcgctgaaagagatctaccgcaccaccagtgaaatgccggtagaagaagcgtatcgctatattcgcagcggcgtgttgaaacactatccgtcggttctgcattcggaggatgccattgaagggccgctggcgtttgccgagaagcgcgatccagtgtggaaaggacgttaa

SEQ ID NO: 22068 - DNA, 1005 bp, Escherichia coli
atggcgtggccgaataagaaaaaagcaccggaagattatttcattccgctaattcatcctgtaacagggaaggagtgccctgttcctgagcgtgggtggcgaaaccctcctgcaacaatgcaagaactcttgaagtcagggttgattattttcggtccagacgagaagacgcagccaacaagaaaatatcggctgaatgacaatttattcgaaaatatcccttctctactttattacggtggcagtgacgacgctttgcttgctgaccttaaaattccttttgatacaccgaagccggttcaggtagcaaagagactaattcaatcaatttgcaagaatgacgatatattgatcgacttcttcgctggctcgtgcacggcggcgcatgcacttatgcttttgaatgcggaagatggggcaaatcgtcgattcataatggttcaattgcccgaggaatgtgacgagaagtctgaagccaaaaaacttggatactcagtagtttcggagattggaaaaaatcgcattcggagagctgcaaaaaaaattagagaagaattttcagaaatattggctacaagaaatacggaacttgacttaggatttcgcctgcttaaagtcgatacatcgaacatggctgacgtctactacagccccgatgtgctggaaaaagccaatctcgacttgtttgttgacaacatcaagcctgatcgcacgcctgaggatctgctgttccaagtaatgctggattggggcgtcgatctggccctgcctatcgccaagcagtccatccaaggtaaagacgtgttctttgtcgatggcaatgtgcttaccgcctgcttcgacgccagtggcagcattgacgaaaccttcgtgaaggaactggccaaactgcagccgctgcgcgttgtgttccgcgacgcgggctttaagaacagtgcggtcaagatcaatgtcgagcagattttcaagctcatgtcgcctgtcaccgaagtaaaatgtatctga

SEQ ID NO: 22069 - DNA, 1074 bp, Escherichia coli
atggaactgatcgacaatatcaaccgcctgctcggagacgacctaaagcagacgctcaaacctagtgctcgcctgaagatcgctgcctcctgcttttcgatatacgcgttcgaagcactcaaagcagagctggaaaaaatcgacgagctgcaattcatctttacctcgccgacgtttaccgctaacgaggttaccgacaagattcgcaaggaacgcaaagaattccacatactgaaggctgaccgcgaacggagcttgtacgggagtgagttcgaaattcagctgcgtaacaaactgacccagcgcgcaattgcaaaagagtgcgcggactggatgcggcgcaaggcaacattcaagtccaatcgcagcaaggctccgatgcagcagtttgcttgtgttcaggccgccgccacagagactgcctacatgccactgcacggatttaccgccgtcgatcttggctaccagcagggcaatgctgtctcaaacctcgtcaacaaaatggacgagtcgacgtttacggcgacctacctcagtctgtttaaccagatctggcaagaccccgagaagctggaggatgtaacggcacagatctgcgaccacattacgtccgtctaccaagaaaactcgcccgagagcatctacttcctgatgctctacaatatcttcaatgagtttctggacgacattaacgaggatgctctgccgaacgaccgcacgggctatcaagacacactcatctggaacaaactcttcaattaccagaaagatgctgccaccgggatcatcaacaaacttgagagctacaacggttgcatcttggccgacagcgtgggcttgggtaagactttcaccgcgctggccgtgataaagtattacgaactgcgcaacaagtcagttctggtgttatgccccaagaagctggcggacaactggctgaactacagccgtaacctcaagaccaacatatttgctcgcgaccggttcaactacgacgtgctttgtcataccgacctcagccgtacgagcggtgagtcgttcggcacaccgctgaatcgcatcaactgggggtaa

SEQ ID NO: 22070 - DNA, 426 bp, Escherichia coli
atgatttccacaatgagttttgcgaaagcatgtgaatatttccagacgtatttgaaaaaacaaaactgcgatgccgatgcgaaagaaaaaatacttgaatttgttgagttggatgaaactgagcttgttgattttggtaaagatatcagaatcgttttggcttcatcggattttagtaaggaactgactaccactgcgatttggttaagagataagggggtagacattcgatgcgttcgtctgacgccttatagatttaatgatgatgttcttatcaatgcagagcaaatcataccggttcctgaattggaagaatatcaagttaaatttcgtgaaaaacgtgatgagcagctaattagcagtcagaaaaaagagaaggactatacgtggtatatatactcaataaacctcaagatgcgggtgtga

SEQ ID NO: 22071 - DNA, 588 bp, Escherichia coli
atggcgtcgaaatcctgggacgaaattattgctaagctggaaaaagatccgcagcttaaagcgcagttcctcgaagtctatccgcaaggtttcagtggcgaaaatattactgatgccattgctgaatttgagaaaacattaattacgccggattccccatttgatagatggttgcgtggagatgagaatgctctgacggcgcaacagaaaaaaggctatcaattatttaaagataataaatgtgcaacttgtcatggtggtattattctcggcggacgttcctttgaaccgttggggctgaaaaaagactttaactttggtgaaattacggcggcggatattggtcgtatgaatgttactaaagaagagcgtgataaattgcgtcagaaagtacccggtttacgtaacgttgctttaacggcaccgtacttccatcgcggtgacgtgccgacgctggacggggcggtgaaactgatgctgcgctatcaggtaggcaaagagctgccgcaggatgatgtggatgatatcgtcgctttcctgcacagtctgaacggggtttacacgccgtatatgcaggataaacaataa

SEQ ID NO: 22072 - DNA, 141 bp, Escherichia coli
atgcaaatagtcatgtttgacaggcagtcaatatttattcatggaatgaaaatcagtttacagcatcgtattccaggagtgagtattcaggggggccagttaggcagacgagttatggcaaaagctggaaagttaccctga

SEQ ID NO: 22073 - DNA, 561 bp, Escherichia coli
atgggcgttattctcggcctgatcgctggttactttggcggtctggtcgataacatcatcatgcgtgtggtcgatatcatgctggcgctgccaagtctactgctggcactggtgctggtggcgattttcggcccgtcgattggtaacgccgcgctggcgctaaccttcgttgcgctgccgcattatgtgcgcttaacccgcgccgccgtgctggtggaagttaaccgcgattacgtcaccgcgtctcgcgtggcgggtgccggggcaatgcgccagatgtttattaacatcttcccgaactgccttgcgccgctgattgttcaggcgtcgctcggtttctctaacgccattctcgatatggctgctcttggtttcctcggcatgggcgcgcagccgccaacgccggagtggggcaccatgctctctgatgtgttgcagttcgcgcaaagcgcctggtgggtcgtgaccttcccgggtctggcgatcctgctgacggtgctggcatttaacctgatgggtgacggtctgcgtgacgcgctcgatcccaaactgaagcagtaa

SEQ ID NO: 22074 - DNA, 393 bp, Escherichia coli
atgtcacaggttactgaaaataaagtgattagcgcaccggtgccgatgaccccgttacaggagttctggcactattttaaacgcaacaaaggcgcggttgtcgggctggtttacgtcgtcatcgtgctgtttatcgcgatctttgccaactggattgcaccctataacccagcggaacagttccgcgatgcactgctcgccccgccagcctggcaggaaggcggcagcatggcgcacttgctgggcactgatgacgtggggcgtgatgtgctgtcgcggctgatgtacggcgcgcttgtcgctgctggttggctgtctggtagtggtgttatcgctgattatgggcgttattctcggcctgatcgctggttactttggcggtctggtcgataa

SEQ ID NO: 22075 - DNA, 381 bp, Escherichia coli
gtgctggaagttattaccgattatgacatcagcatctgtatcaactgggcgcgctctgccattgaagggcgcaatacaacgctgccgctgacccacacccaaatggcgaaacaagccggaaaactcggcgcgttaatgttctctggtacgacgctaaacggggcatacggcgaatggcaggatttacacgcaccgtttgcaccattctgcgcagaaagcctgatgaccacagatcatgttctcgagttatttaatgtagcagaatcgtcaacattgcattttgctgggatcaagctactggaaataaatgcgacggctgatgtgcaccatcgcatcgaaatattacgcaacggcattcactctctgaatgaatctcgttaa

SEQ ID NO: 22076 - DNA, 480 bp, Escherichia coli
atgctttacaaaggcgacaccctgtaccttgactggctggaagatggcattgccgaactggtatttgatgccccaggttcagttaataaactcgacactgccaccgtcgccagcctcggcgaggccatcggcgtgctggaacagcaatcagatctaaaagggctgctgctgcgttcgaacaaagcagcctttatcgtcggtgctgatatcaccgaatttttgtccctgttcctcgttcctgaagaacagttaagtcagtggctgcactttgccaatagcgtgtttaatcgcctggaagatctcccggtgccgaccattgctgccgtcaacggctatgcgctgggcggtggctgcgaatgcgtgctggcgaccgattatcgtctggcgacgccggatctgcgcatcggtctgccggaaaccaatgggcatcatgccgggctttggcggttctgtacgtatgccacgtatgctcggtgctga

SEQ ID NO: 22077 - DNA, 2595 bp, Escherichia coli
atgaacctaaagctcaaaagatgcgaatattggatggcggcacaaaagcagatgaaacgggttgtgccgcttcttctggttattatgcctgcatgttcaatcgcgggaatgcgctttaaccctgcttttctgtcgggtgatactgaagctgttgctgacttatcccgcttcgagaaagggatgacttatcttcctggtagctatgaagtcgaagtttgggtcaatgattcccctttactctctcgtactgtaacttttaaagcagacgatgagaatcaactgattccctgcctttcacttgctgacttattaagccttggaattaacaaaaatgcgctgccagagcaggctttggcttcatctgaaaatagttgccttgatttgcgtatctggtttcccgatgtgcattacatgccggagctggatgcacagagacttaaactgacctttccacaggcgataataaaacgtgacgctcgcggatatattccaccagaacagtgggataacggtattacagcttttttgctgaattatgacttttctggtaataacgatcgtggtgattactcttcaaataactattatttaaatcttcgcgctgggatcaatattggtgcatggcgttttcgcgattattcaacctggagtcgtgggagtaattcagcaggtaaactggagcatatcagtagtacgttgcagcgcgttattattcctttcagaagtgaattaacgctaggagatacatggccatcatcagatgttttcgacagtgttagtattcgtggcataaaactggaatctgacgaaaatatgttgcccgatagtcaaagtggtttcgctcccacggtgcgcggaattgcgaaaagtcgcgctcaggtaacaatcaaacagaatggttatgtcatttatcaaacctatatgccgccgggaccgtttgagattagcgatcttaacccgacatcatctgcgggagatctggaagttaccatcaaagagtctgataattcagaaactgtctataccgtaccttatgccgctgtccccatcctgcaacgagaaggtcatttaaaatattctactacggttggccaatatcgaagcaatagctataaccagaaaagtccttatgtatttcagggggaattaatttggggtttaccctgggatattacggcttatggtggggcacaattctctgaggattaccgggcgttggcgctcggccttggcctgaatctgggtgtatttggtgcaacatcgtttgatgttactcaggctaacagttcgcttgtggatgggagcaaacatcaagggcaatcttatcgttttctttattccaaatcgttagttcagacaggaacagcattccatattattggctatcgttattcaacccagggcttttacactttaagtgatacgacataccaacaaatgtcagggactgttgttgatccaaaaacgttagatgataaagattacgtttataactggaatgatttttataacttgcgttatagcaaacgtggaaaatttcaggctagtgtatcgcaacctttcggtaactacgggcctatgtatttatcggctagtcagcaaacatactggaatactgataaaaaagattctttataccaagttggttataacaccagtattaagggtatctatctaaatgttgcgtggaattacagtaaatcaccagggacaaatgcggataaaattgtctcgctaaatgtctcattacctataagtaattggttatcttccacgaatgatgggcgctcatcatcgaatgccatgactgcaacgtatggttatagtcaggataaccacggacaggtaaaccaatatacgggggtatctggttctctgttggagcagcataatctcagttataacatacaacatggttttgctaatcaggataatagcagtagtggttctgttggtgttaattatcgtggggcatatggttccttgaattccgcctacagttacgataatgaaggtaatcaacaaataaactatggcatcagtggtgctcttgttgtacatgaaaatggtcttacgttgagtcaaccattaggtgaaactaatgttttgataaaagcgcctggagcgaataatgtggatgttcagcgggggacagggatatccactgactggcgtggatatgcagttgttccttatgcaacagaatatagacgtaataatatttcattagatcctatgtcaatgaatatgcatactgaactggatatcacttccactgaagttattccgggaaaaggtgcgttagttcgtgcagagtttgctgctcatatcggtattcgtggtttgttcacagttcgttatcgtaataaatcagtcccattcggtgctacagccagcgctcagattaaaaacagtagtcaaattaccgggattgtcggcgataatggacaactttatctctcaggattgcctttagaaggtgttattaatatccagtggggagacggtgttcagcaaaaatgtcaggctaattacaagctccctgaaacagaactggataatcctgttagctatgcaactctggagtgccgctaa

SEQ ID NO: 22078 - DNA, 501 bp, Escherichia coli
gtgaaagctacctgtaaggtcgcaaccgattcaaaacagattgaagttgtcctgccggttgtgccttccaaccttttcactggtatcgacgtagaagcacagggggcgagcaaccagaccgatttcaatattaatctgaccgaatgtagcaatacagatgatcagaaaattgagttccgttttaccggtactgcagatagcgctaataaaacgctcgctaacgaagtagaaggatcaacggatgctgacaacagcggcaatgcgggggcgactggtgtagggattcgaatttactccaaaggtacgacgaataatggtctgattaacctgaataccactgcggcagagggtagcgcctccaccgccgcttatacaattccaggaaatgctacgacccatgatttcagcgcggcctttactgcaggttatgctcaaaacggtagcactgttgcaccaggtgtagttaagtcaacagcaagttttgttgtgctgtacgagtaa

SEQ ID NO: 22079 - DNA, 546 bp, Escherichia coli
atgtctctcactaaatcactgctattcgccctgttactgacagccgctgccgtgcagggctccacccgggatgaaatagagcgactctggaatccgcagggtatggccgcacagcctgcacaaccggcagcagacacgccagccaggacagaaacaccgcctccccgttggttccgcctcagcaacggcaggcaggttaacctggccgactggaaggtggtgctgtttatgcagggacattgcccttactgtcaccagtttgacccggtactgaaacagctggcacagcagtacggcttttccgtttttccctacactctggatggtcagggggataccgcctttccggaggcattgccggtgccaccggacgtgatgcagaccttcttcccgaatatcccggtggccacaccgaccaccttcctggtcaacgtcaacacgcttgaggcattaccgcttttacagggggcaacggatgccgccggttttatggcgcggatggataccgttctgcagatgtacggagggaaaaaaggtgcgaaataa

SEQ ID NO: 22080 - DNA, 282 bp, Escherichia coli
atgagtaaatataaattctctttaccccgccttgatattacaggtgtatgggtgttctccctggggctctggtttcatattgttgcccgtctggtttacagaaagccctggatggctttctttctggcagagctgattgcggccattctcgttctgtttggcgcataccagatactggatacatggatagcccgcgtcagccgggaggaaagggaagcgctggaagcccgtcaggccgccattcttgctgcagaaaaggagagcagccatgtctctcactaa

SEQ ID NO: 22081 - DNA, 780 bp, Escherichia coli
atggaaaaggaaacaaatagcaaattcatccatcattttatgaatatattctgtgtgctcattcagttgataaatgacaccctgaaactggttccttttggtctggtaatggggcccgtaatattgttttgtttttctcatggcgatgtccccggtgccattcttcatgaatggcaaaagtcagttgcgtcagagaaggtgttgcttgttctgttatacctgaaaacgacatttgtgtgtgtatttatggctgtttttctccggtatcttttctccgttttacgaaaaggaggtaataaagaaaaagggttttttgtctatgaggagcagtggttctcactgctggaaaaggtgagtgcttttgatgtggtcagacaatgggctgaaaatggtggggcatattatcctctgctggagtgccgtcggcttacagatattgaagaagtcaggaaatcagatgatatactgaaccgactggagtttatcgacagaagatttcgggaattcatcagtattatgtctgaacatattcctgctgataaatataaagacaagtgggagaaagaattgtctgaatatccaccggaaaaaatataccaggtccggagagagggagaccatctgtcattaaaaaattacggtgatgatattactctggacagagataccgccgtggctacggtgcagattactgtcagcaaaaaatgcattactcaggaagaaatggatgagttatatgctttgtctgaaagactgaaagaacagtgcgccggtaattaa

SEQ ID NO: 22082 - DNA, 1449 bp, Escherichia coli
atggccagtatcaacaccattgtgaaacgcaagcagtacctgtggctggggattgtggttgtcggtacggtctccgcaattggtggtgcactgtatctgtctgatgtggacatgtccggtaacggtgaggccgtggctgaacaggagcctgtgccggatatgaccggtgtggtggatacgacttttgatgacaaggtgcgtcagcatgccaccacagagatgcaggttacggcagcgcagatgcagaagcagtatgaggaaatccgtcgcgaactggatgtcctgaacaaacagcgcggtgatgaccagcgtcgtattgaaaagctgggacaggacaatgctgccctggcagagcaggtaaaagccctgggtgcaaatcccgtcaccgcgaccggtgagcctgtaccgcagacgccagcctcaccgcccggcccggaaggcgaaccacagccaggaaacaccccggtctcttttccgccgcagggggctgttccccctccgacgacattttatccggggaacggcacgacaccgcctccgcaggtgacataccagtctgtgccggtaccgaaccgtattcagcgtaaaacgttcagctatgacacgggcgcaaagaaaggtccctccctgccgtatatcccgtccgggagctttgcaaaatccgtcctgattgagggggcggatgccaatgcctcagtcaccggcaatgaatccacggtaccgatgcagctgcgtatcatcggcctggtggaaatgccgaacagcaaaacgtatgacgcaacgggatgttttgtggggctggaagcctggggggatgtgtccagtgagcgtgccatcgtgcgtacccgcaatatcagctgcctgaagggcggcaaaactattgatatgccgattaaggggcatgtcagcttccggggtaaaaacggtatcaagggcgaagtggtgatgcgtaacggcaaaatcctcggctgggcatggggcgcgggatttgttgatggtatcggtcagggcatggagcgcgcctcccagccggctgtcgggctgggggccactgccgcttacggggctggtgatgtccttaaaatgggtatcggtggtggcgcatcgaaagccgcacagacgctcagtgactactacatcaaacgtgctgagcagtatcacccggtgataccgattggtgcgggcaacgaagtgacggtggtgttccaggacggcttccagctgaaaaccgtggaagagatggcgctggagcagtcacagagcagggcagaagacggtaatacggaaagcccggtgctgaatcctccctcggcagaaagccacctgaacggttttaacaccgaccagatgctgaaacagctgggcaacctgaatccgcagcagtttatgtccggagacaagaacccgcagggcggggatgctggcaaggagggcggaaatggcgggtga

SEQ ID NO: 22083 - DNA, 435 bp, Escherichia coli
atgaaaactgaactgaccctgaatgtattacagaccatgagcgcacaggaatatgaagatatccgggctgccggaagtgatgaacgtcgtgaactcacacatgccgtgatgcgggagctggatgcgccggataactggacgatgaacggcgagtatggcagcgagttcggcggctttttccccgtccaggtccgtttcacgcctgcccacgaacgttttcacctggcgttatgttcaccgggtgatgtctctcaggtctgggtgctggttctggtgaatgccggtggtgagccgtttgcggtggttcaggtgcagcggcggtttgcaccggaagccgtcagccattcactggcactggcggcgtcactggatgcgcaggggtacagcgttaacgacatcattcatatcctgatggcggaaggaggtcaggtatga

SEQ ID NO: 22084 - DNA, 915 bp, Escherichia coli
atgaatgttataaaactggctatcggctcaggcatattattgctcagctgcggtgcttactcacaatccatcagtgaaaaaactaattccgacaaaaaaggagcggcagaattcagtccgctcagcgtttctgtcgggaagacgactagtgagcaggaggctctcgagaaaacaggcgcgaccagttcccggacaacggacaaaaacctgcaatcacttgacgcaacagtgcgtagtatgcctggtacttatactcaaatagatcctggtcagggatcaatcagtgtgaatattcgaggcatgagcggatttggtcgtgtaaacactatggtcgatggtattacccagagtttttacggaacctctacctccggaacaacgacgcatggttcaactaacaatatggctggcgtacttatagatcctaacttactggtagcagttgatgttacacgcggtgacagcagtggctctgaagggatcaacgcccttgccggtagtgcaaatatgcgtactattggcgttgacgatgtaatatttaacggtaatacatatggccttcgttcacgtttctctgtcggtagtaatgggctgggacgcagcggaatgatcgcccttggtggaaaaagcgacgcttttacggatacgggaagcattggcgttatggctgctgtgagcggcagttctgtgtactctaatttctcaaatggttctggaattaacagcaaagagtttggttatgataaatatatgaagcagaaccccaaatcccaactgtataaaatggatatcagaccagacgaatttaacagcttcgaactttccgctcgaacctatgaaaataaatttacacgtcgtgatataaccagtgacgactattacattaaatatcattacaccccttttctgaattaa

SEQ ID NO: 22085 - DNA, 285 bp, Escherichia coli
atggctgcgaccgcccaggtcagtttttgtggggtaatcctgtgtgttgtcatcacagaccaccaccagcttaaaaccaagccccatacaggcgtactgcgccagcaggtcagcaccagtgacgagaggaataccggagattaccggctcccccctgtcgttctgcaggtccataatccagtacagatcgcgccatatgatgctaatccgccaggtgacaccacccaggacgatgctgaactgctggttgtccgctgtcagcggaatttcctgaattgtcattag

SEQ ID NO: 22086 - DNA, 969 bp, Escherichia coli
atggctaaagcatggaaagatgttatcgcctctccacagtatcaggcgttagcaccagaacaaaaagcgcaggctcaggagcaatacttcaatgaagtcgtggccccgcaagccggagaaagtgtagagcaggctaagcaggctttttatgctgcctatccactaccatcaacgaatgaaatagaccgatcccaatcagcaactcaaaatattcaacatacatcatctgataattctcttgcgtcagggtatgcaaagttagctactcagcaaagagaggggcttgagcgttcagcagaacagggagccagtcttggggctgcgatgcgggatgctataacaggcgaaagccgaatgactccagagatggagagactgcaaaatgtcgcctctgccccagaattgaactcactaagcatggatgccctaaaggctggatggtctcaacttttcggctctgacgcgtctcaggaaaagattctccagggaatgggggcgacattaaggcaggatgagaaggggaatactatcgtttctctgccatcaggtgattatgccctaaacaagccgggtttatcaccgcaagacctgacttcgtttcttgctaatgcgttggcgtttacaccagcgggcagggctggaacggtgcttggtgccataggaaaatcagcagctacagatttagcactacagggagccaccagccttgctggtggagaagatattgatccgttacaaacggtaatttctgctggcattggtggtattggtaaggggctggaaaatacagcgagtgcggtttcgagggctgttcgtggtgatatgtcgcctgaagcaaaggctgctgtcgactttgcatcggaaagaaatctgccgttaatgaccagtgacatgctgaaagacaaaacctttatgcagagtcaggctcagacattaggcgaaagagttccttttttttggaaccggtaa

SEQ ID NO: 22087 - DNA, 1470 bp, Escherichia coli
atgacctttcgcaattgtgtcgccgtcgatctcggcgcatccagtgggcgcgtgatgctggcgcgttacgagcgtgaatgccgcagcctgacgctgcgcgaaatccatcgttttaacaatggcctgcatagccagaacggttatgtcacctggaatgtggatagcctggaaagtgccattcgccttggattaaacaaggtgtgcgaggaagggattcgtatcgatagcattgggattgatacctggggcgtggactttgtgctgctcgaccaacagggtcagcgtgtgggcctgcccgttgcttatcgcgatagccgcaccaatggcctaatggcgcaggcacaacaacaactcggcaaacgcgatatttatcaacgtagcggcatccagtttctgcccttcaatacgatctatcagctacgtgcactgacagagcagcaaccagaacttattccacacattgctcacgctttgctgataccggattactttagttatcgcctgaccggcaagatgaactgggaatataccaacgccacgaccacgcaactggtcaatatcaatagcgacgactgggacgagtcgctactggcgtggagcggtgccaacaaagcctggtttggtcgcccgacgcatccgggtaatgtcataggtcactggatttgcccacagggtaatgagattccggtggtcgccgttgccagccatgataccgccagcgcggttatcgcctcgccgttaaacggttcacgcgccgcttatctctcttctgacacctggtcattgatggacttcgaaagccagacgccatttaccaatgacacggcgctggcagccaatatcaccaacgaaggcggggcggaaggtcgctatcgggtgctgaaaaatattatgggcttatggctgcttcagcgagtgcttcaggagcggcaaatcaacgatcttccggcgcttatcgccgcaacacaggcacttccggcctgccgcttcatcatcaatcccaatgacgatcgctttattaatcctgacgagatgtgcagcgaaattcaggctgcgtgtcgggaaacggcgcaaccgatcccggaaagtgatgctgaactggcgcgctgtattttcgacagtctggcgctgctgtatgccgatgtgttgcatgagctggcgcagctgcgtggtgaagatttctcgcaactgcatattgtcggcggcggctgccagaacacgctgctcaaccagctgtgtgccgatgcctgcggtattcgggtgatcgccgggcctgttgaagcctcgacgctcggcaatatcggcatccagttaatgacgctggatgaactcaacaatgtggatgatttccgtcaggtcgtcagcactaccgcgaatctgaccacctttacccctaatcctgacagtgaaattgcccactatgtggcgcagattcactctacacgacagacaaaggagctttgcgcatga

SEQ ID NO: 22088 - DNA, 210 bp, Escherichia coli
gtgaaggttaagttactgtggcctggtaaactcgcgatgaccatgacctcttctgcaaacagtctggtggtatttgataaacagcccgatgccacctgtattaacccgctgactcaggcacctaacgcaataaatctaacgccggaatttgtgacaccagataagccgctggtcatcgaaactcgttggcaatttacacctgaatcttaa

SEQ ID NO: 22089 - DNA, 390 bp, Escherichia coli
atggcaaccattgcatttctcgggctggggcagatgggtagcccaatggctaacaatctattgcaaaaagggcattcattacaggtatttgatgtcaatacacaggccgtcgatgcgctagttacgcagggggccactgcggcacaaaccccagcggaagcggcagcaagcgctgaatttatcatcactatgcttcccaatggggacattgttcgacaggtgctgttgggggaaaaaggcgtctgtgaaactgtttcatctgacgcgttagtgattgatatgtcgactattcatcccttacagaccgatgcattaatacgggaattacaagaaaaaggcatcaatatgatggacgccccccgtgggcagaacgtcagtgaatgcgattga

SEQ ID NO: 22090 - DNA, 318 bp, Escherichia coli
atggaaaacgctaaaatgaattcgctcatcgcccagtatccgttggtagaggatctggttgctcttaaagaaaccacctggtttaatcctggcacgacctcattggcagaaggtttaccttatgttggcctgaccgaacaggatgttcaggacgcccatgcgcgcctgtctcgttttgcgccgtatctggcaaaagcatttcctgaaacggctgccgcgggggggggattattgaatcagaactggttgctattcctgctatgcaaaaacggctggaaaaggaatatcaacaaccgatcgccgggcaattgctactaa

SEQ ID NO: 22091 - DNA, 963 bp, Escherichia coli
atgtcattcagccattcttccctctccgcgcaagtgaaatcacatctgacgtttcttcctgaagaaattcgccagaaaatccttgaacatctccgcagcgttattcattacgaacccgtgattggcattatgggtaaatccggcaccggcaaaagcagcctgtgtaatgctatttttcagtcccgtatctgcgccacgcatcccctgaacggctgcacccgtcaggctcatcaccttacccttcagttaggtgaacgcagaatgacgctggtcgatctgcccggcattggtgagacactgcaacatgatcaggaataccgggagctttaccgtcagttactgccggaactggatctgattatctggatcctgcgggctgatgaacgtgcgtatgccgccgacattaccatgcatcagtttttactgaatgaaggcgcagatccctcgcgttttctgtttgttctcagccatgccgatcgcgtgtttcctgccggcgagtggaacgacacagaaaaatgcccgtcccgtcagcaggaactctcactggcaacagtaacagcccgggtggcaaccctgttcccttcatcacttccggtactccccgttgccgcacctgtcggctggaatcttccggcactggtgtcgctgatgatccacgcactgccaccacaggcaaccagcgcagtttattcacatatccggggggaaaccgctctgaacaggcccggaaacacgcacaacaaacttttggtgacgccatcgggaaaagctttgacgctgccgttgcccgattcagctttccggcctggatgttacagcttctgcgtaaggcccgggaccgcattatccacttgctggtcacactgtgggatcgtctgttctgacacactcacgccgacaggatgtgtcgctggattaacaagcattcttctttttatgaaaccctgcttaaaaatcagataa

SEQ ID NO: 22092 - DNA, 681 bp, Escherichia coli
atgtctgataatcgttcccggcatgatcgcctggcggttcgcttatcactcattatcagccgactgatggccggagaatctctgtcactaaaaacactgtcagatgaatttggtgttacagaacgtaccttacagcgcgattttcatcagcgtctggttcacctggacttagagtacagaaatggccggtacagtctcagacggcagagcaacccgggcgcgatccctgaaatgctttcatttatacagaatacggggatcgcacggatacttccgctccggaacggacgactgataacctgtcttaccgacaaccaggagccctctccctgccttatctggctaccggcgccggatatcactgcaacactcccagagtgtttctcgcaactcatcctggcaataagacagtgtaaccacatctctctgatgactgagcgatggtatccgtcactggagccctgccggctcatttattacagcggtagctggtatctgatcgcgttacagaagggaaaactgcaggtctttcctctggcagatatcaaatcagtcagcctgacatcagaacggtttgaacggagaggccacatccacagtctggtcgctgaagagcgttttatctccgccctgccacatttctctttcatccataaacttatcaacacctttaacctgtga

SEQ ID NO: 22093 - DNA, 234 bp, Escherichia coli
atgtcggactgtcaccctgttttattgcccgaaggccctttctcacgcaaacaggcgatggctgtcacaacagcttaccgcaatgtgcttattgaagatgaccagggaacgcatttccggttggttattcgcaatgctgaagggcagctacgctggcggtgctggaattttgaacctgatgccggaaaacagctaaatccatatctcgccagtgagggaattctcaggcaataa

SEQ ID NO: 22094 - DNA, 759 bp, Escherichia coli
gtgattccgacctccagcgcctgcacgtcaggtagtcaggctatcggctacgcgtgggaagccattcgccatggttatcaaacggtgatggttgccggtggtgccgaagagttatgcccttcagaagcagcggtatttgatacgctttttgccaccagccagcacaatgatgcgccgaaaaccacaccttcaccgttcgatgaaaaccgcgacgggctggtgattggtgaaggcgcaggtacgctcatcctcgaagaactggagcacgccaaagcgcgcggcgcgaccatttacggtgaaatcgtcggctttgcgactaactgcgacgcggcacatattacccagccacagcgcgaaaccatgcagtattgtatggagcaatcactgaaaatcgccgggttaagtgcacaagatatcggctatatttcagcgcatggtacggcgaccgatcgcggtgatatggcagaaagtctggcgacagcaaccatttacggtgataatgtgccggtctcctcgctgaaaagttattttggtcatacgcttggtgcctgtggcgcgctcgaagcctggatgagtctgcaaatgatgcgcgaaggttggtttgcgcctacgctaaacctgaataaaccagacccgaactgtggcgcgctggattacatcatgcatgaagcccgaaaggttgattgtgagtttttgcagagtaacaactttgcctttggcggcattaatacatccatcatcattaagcgctggccctga

SEQ ID NO: 22095 - DNA, 543 bp, Escherichia coli
atgaaaccggcaagagtccctcaaactgtcgtggctcctgattgctggggcgatttgccctggggagagctttatcgcaaggcgctggagcgtcagctcaacccgtggttcactaaaatgtatggttttcatctgcttaagattggcaatttaagcgcagaaatcaattgcgaagcgtgcgcggtttctcatcaagtgaatgtttctgcgcaaggaatgcccgtccaggtgcaggcggatccacttcatcttccttttgccgataaatccgttgatgtttgtctactggcacatacattgccgtggtgcactgatccgcatcgtttattgcgtgaagccgatcgggtactgattgatgatggctggctggtgattagtggcttcaatcccatcagtttaatgggattacgcaaacttgtgccggtattgcgcaaaacatcgccctataacagccggatgttcactctgatgcggcagctggactggctctctttgttgaattttgaagtgctacacgccagccgtttccacgttcttccgtag

SEQ ID NO: 22096 - DNA, 675 bp, Escherichia coli; identical to SEQ ID NO: 9044

SEQ ID NO: 22097 - DNA, 843 bp, Escherichia coli
atgtttttcggagatggcggacagctcctgtctgataaatcactgaccggctctgctggcgggggtaataacagaatgaaatttaatatactgccgctggcattttttatcgggataattgtttctccggcccgggctgagctctattttaatccgcgttttctgtctgatgacccggatgcggttgcggacctgtctgcatttacacaggggcaggagcttccgccaggcgtgtaccgggtggatatttatctgaatgatacgtatatctcaacccgtgacgtgcagtttcagatgagtcaggacgggaagcaacttgccccctgcctgagtccggagcatatgagtgcgatgggggtaaaccgttatgccgtgccgggtatggagagactgccggctgacacctgcacatcactgaattccatgattcagggtgccacattccggtttgatgtcgggcagcagcgattgtacctgaccgttcctcagatatatatgagtaatcaggcccgtggttatattgcgccggaatactgggataacggaattacagcggcattgctgaattatgacttcagtggtaatcgggtgcgcgacagctatggtggcaccagcgattatgcctatctgaatctgaaaacaggactgaatatcgggagctggcgtcttcgggacaacaccagctggagttacagtaccggaaaggggtacagccagaataactggcagcacattaacacctggctggagcgggatatagttcccctgcgctcccgtctgacgatgggggacagttatacccggggggatatttttgacggtgtaaatttcaggggtatttaa

SEQ ID NO: 22098 - DNA, 315 bp, Escherichia coli
atgtgtgaaaaagaaccggagctgaaaatagcgcagcaactggcactcgagttctaccgtattctgaaaacccaaaataaatcacagctaagtagcttgttcactcgagtccacgaaagcggttcagcagaatttcggcgcgtggcggcggggatggaagctgatgctgcagctatatgtgaggcaatcagtagccgctggagtaatggtgttgtcgaaggtcatgtaaatcgcctgaagatgctaaaacgccagatgtatggtagagccggatttgaactactcaggcagagggtcatgagtccactggcatga

SEQ ID NO: 22099 - DNA, 222 bp, Escherichia coli
atgaaaatcatcacccgtggtgaagccatgcgtattcaccaacaacatccgacatcccgtctttttccgttctgtaccggcaaataccgctggcacggcagcactgaaacgtataccggtcgtgaagtgcaggatattcccggtgtgctggccgtgtttgctgaacgccgtaaggacagttttggcccgtatgtccggctgatgagcgtcactctgaactga

SEQ ID NO: 22100 - DNA, 336 bp, Escherichia coli
  misc_feature (293)..(302): n is a, c, g, or t
atggggtttattacggataatttttatcagacaaaactcggtcgtcgctttggtcgtcgtcgcttcttcatattaattgccattccatgtatgattatctatccattgctttgggtaaatggtatgagtttttggtattatctttctacttatatcatttttgaagtggtatatactatgattatgataccgtataataccttacctgttgaaatgacaaaggatttcaatcaaaggacctatttgacaggttctaaagctatgtttggtaaagtagctaatttcttagcagnnnnnnnnnnctattcctggtatctatttttacttcttcaataa

SEQ ID NO: 22101 - DNA, 501 bp, Escherichia coli
atgctctatttcaacagttgggaacgtccaactgatgatgtagttgatgaatcaacgcatggttttatggagggctttaataaactttttaccgatcttttctcaacctttaagctaaaaaccttcagaacccatcttggtatgtatctatttggtttcggcgctgaatggctatttacagcgacatttacctatttcattgttttcaaccttgaacaaccgagaacatttgtttctgagatgaactcattaagcagtatttgtcagttcttctctacagcattctttatgatgtggtgtgccaaacgaggatttaaacgcccatttatcattgctatcttaattgttgtatcttcagtgattggttatgttggtgtgtactatcttaatattccccatctgacctggctcattattggcatcactatctggtttggtctggggacgggggggggtatattacattccgtggagtgtatatgtattccttgccgatgttga

SEQ ID NO: 22102 - DNA, 369 bp, Escherichia coli
atggccggtaagttaatgagagccactgtagtattttgtctgggggttgtcctcagtctgtttggttttgagtcaggcattcatcatcaatcagccagtgcagtaaatgcaattaatggcgtcatgatatttggtgtggctggtatggcgttaataggtgtctatttctctgtaaaaatgaaattagataaagcatctcacgccgaaataactaaagaattagagcgtctgaaaaaaggtggcagaaaagaagatgctacaccggaaattcgtaagcttgttaagcaactgactggttatgaatatgaccagtgcttcggtaataacaatgttggctttaaatttgaaaacaaagcaggggcattctag

SEQ ID NO: 22103 - DNA, 981 bp, Escherichia coli
atggatttggtaactcagacagcgaaacaactcactgaaggagctggagataacacctttggtggcttcctgtcccctgatgataattatcttttttatgtgaagaatgaaaaacatttgcagcgtgttgatttgaccacattagaagaagttaccatatacacagtaccggataattgggtggggtacggaacatgggttgctaatactgattgtacggaaatcgtcggaatcgaaatcagtaaaactgactggaccccgcttagcgactggaaaatatttctggaattttatcataagaatccacgatgccgtttaattacgattgatctggaaaccggaaacgctgaagtgatattggatcgtaatacttggttagggcatccaatttttcgtccgaataataacgatactatcgccttttgccacgaagggccccatgacctggtggatgcaagaatgtggatgattaaccgtgatgggacaaatgagcgtaaagtgcatgagcaccaacttggtgaaagttgtacacacgagttctggatccctgatggatctgcactggcttatgtttcctatatgaaaggacagcaacagcgttatattcgcaaatataatcctgatactgatgaagattcattagtgatggaaatgccggcatgttcccatttaatgagtaaccataatggtattctctatgttggtgatggttcaggtagtccggttgatgttaaagatacctgcagttataaaattgaaaatgatccctggatttacattcttagcagtaaaaataaaaaaatacataaattggtgaaacataatagttcctggagggtacagaaaggagaccggcaggtaacgcacccgcatccatcattttctccagataataagtacgttttatattcttgcgatgccgaaggtgaaccagcactatatatggctaaaattcctgaggaaatcttaacccagcaataa

SEQ ID NO: 22104 - DNA, 900 bp, Escherichia coli
atgaatataaaatgccaggttattgccccttcccgcataccaaaatcaccgacagacagaatcaaaaatgatcatcgggacgcaatttctctcgccaggttactgcgggctggagaacttacccctgtctggatccctgacctgactcatgaagctatgcgggatctaatcagagcccgtgcagcagctaaacgagacagcagagttgcccgacagcgaattctgagcatgctattgcgaacagacaaacattatgcaggaaagcactggacaggaaaacatcgaacctggttagctaatcaatcatttagtcagccatctcaacagattgcttttcaacactattgtcaaagtctggagcagattgaagatcgcatacttcaactcgaccaggaaatatctcgcctgttacctgagtggtctctgtgcaatctggtctgccagttgcaggctcttaaaggtgttggtcagctaattgcaataactctggttgctgaactgggtgatttttcgcgattttccaatcccaaacagctcatggcttttctgggactggtgccaggtgaatattccagtggaaacagtattcgtcccagaggaataacaaaagttggaaacagcgaactgagacgtctgctttacgaagccgcctggtcttatcgtacacctgcaaaagttggggcatggcttatatattaccgaccggactctgtaacacaatattccaaagatattgcatggaaagctcaacaacgattgtgttctcgttaccgaagtctgacagcaaaagggaaaaaatcacaagtagccattacggcggtggctcgtgagttgactggatttatgtgggatattgcacttgctgcccaatcatcattcagtcagcagaagcaaaattaa

SEQ ID NO: 22105 - DNA, 300 bp, Escherichia coli
atgacaaaaccagtatcaatcagcaagaagccccgtaaacaacatacgcctgaatttcgtaacgaagccctgaaactcgctgaacgcatcggtgtggccgccgcagcccgtgaactcagcctgtatgaatcccagctttatgcccggcgcagtaaacagcagcaacaaatgagttcgtcagagcgcgaaagcgaactggccgctgaaaatgtccgccttaaacgacaactggcggagcaggctgaggaactggccatcctccaaaaggccgcgacatacttcgcgaagcgcctgaaatga

SEQ ID NO: 22106 - DNA, 375 bp, Escherichia coli
gtggccttcacctccacccgtgcggcacgggaatggctgattctgaacatggcgggactggagcgtgaagaattccgggtgctatatctgaataaccagaatcagctgattgccggtgaaaccctcttcaccggcaccatcaaccgcacggaagtccatccccgggaagtgattaaacgcgccctgtatcacaatgccgcagccgtggtgctggcacacaatcacccgtccggtgaagtcacacccagtaaggcagaccggcttatcacggaacgtctggtacaggcactgggcctggtggatatccgggtgccggaccatctgatagtcggtggcagccaggttttctcctttgcggaacacggcctgctttaa

SEQ ID NO: 22107 - DNA, 324 bp, Escherichia coli; identical to SEQ ID NO: 9030

SEQ ID NO: 22108 - DNA, 141 bp, Escherichia coli; identical to SEQ ID NO: 13992

SEQ ID NO: 22109 - DNA, 528 bp, Escherichia coli
atggactggaaagatcttgcatcaaccgctgtgtatacaggtatgactgatgaaaatgaaagcatatgggaacgtgttgatggggttgacgttgccttcataggtgcctttcttactgcgcacttgagccttgaaaagtatattactgattatcttggattaagatatccttcgttagcttggggtgatgcaaaactcacattttcacaaaaaatagctttaatacaacatgagcctgcaacccccccttatgatgaaatatatttaagaataaaagactttaacagcataagaaataaaatcagtcatcaattgaattatcagattacggataaagaaaaaagtaagtttgtggacttctacatgaagattactaaagccagtaaaactaaaccaaatattgatattgataacatggcagatttgttggattttttcgtatcgatgacaaaatcctattttgctagtgctatttcttgttatcactataataaaaaggttgcaggtaaaagtaataaaattgattaa

SEQ ID NO: 22110 - DNA, 1503 bp, Escherichia coli
atgacgaccgaccaacaccaggaaatcctccgcaccgaaggattaagtaaatttttccccggcgtcaaagcgttagacaacgttgatttcagcctgcgccgcggcgaaattatggtgctgctcggtgaaaacggggcgggaaaatcaacgctaatcaaagcattaaccggtgtctaccacgccgatcgtggcaccatctggctggaaggccagactatctcaccgaaaaataccgcccatgcacaacaactcggcatcggcaccgtctatcaggaagtcaacctgctacccaatatgtcggtcgctgataatctattcataggtcgcgaacccaaacgtttcggccttctacgccgtaaagagatggaaaagcgcgccaccgaactgatggcatcttacggtttctccctcgacgtgcgcgaaccgctcaaccgcttttcagtggcgatgcagcaaatcgtcgccatttgccgggctatcgatctctctgccaaagtgctgatcctcgatgaacccactgccagtctcgacactcaggaagtagagttactgtttggcctgatgcgtcagttgcgcgatcgcggcgtcagcctgatctttgtcactcactttctcgatcaggtctatcaggtcagcgatcggatcaccgtcttacgcaacggcagtttcgtaggctgtcgggaaacccgcgagctaccgcagatcgaactggtaaaaatgatgctggggcgcgagctggacacccacgcgctacagcgtgctggacgaacattgctgagcgacaaacccgttgccgcgttcaaaaattacggcaaaaaaggaacgatcgcaccgtttgatctcgaagtacgccccggcgagatcgttggcctggcaggcttgctgggatcaggacgtaccgaaaccgccgaagtgatcttcgggatcaaacctgctgacagcggcacggcgttgatcaaaggcaaacagcaaaccctgcgatcgccacatcaggcttcggtactgggtatcggcttctgcccggaagacaggaaaaccgatggcatcatcgccgccgcctcggtgcgggaaaatatcatcctcgctctccaggcccagcgcggctggctacgaccgatttcccgcaaagaacagcaagagattgcccaacgctttatccgccagcttggcattcgcacaccttcaactgaacaaccgattgaatttctctccggcggcaatcagcaaaaagtgttgctttcacgttggctactgacccgaccgcaatttctgatcctcgacgagccaacccgcggcattgatgttggtgcgcatgccgagatcatccgcctgattgaaacgctgtgcgctgatggtctggcgctgctggtgatctcctccgaactggaagagctggtgggctatgccgatcgggtgattatcatgcgcgatcgcaaacaggtggcggagatcccgctggcagagctttccgttccggcgatcatgaacgccattgcggcgtaa

SEQ ID NO: 22111 - DNA, 996 bp, Escherichia coli
gtgataaaacgtaatttgccactgatgatcaccatcggcgtctttgtgttgggttatatctactgtctgacccagtttcccggttttgcttccacaagagtgatctgcaatatcctgactgataatgcctttcttgggataatcgccgttggtatgacctttgtgatcctctccggtgggatcgatctctccgtcggttcggtgatcgcctttaccggcgtgtttctggcaaaagtgattggcgatttcggcctctcgccgttgctggcgtttccgctagtgctggtgatgggctgtgccttcggcgcatttatggggcttttgatcgacgccctgaagatcccggcgtttattattactctggcgggaatgttctttttgcgtggcgtcagctatctcgtttcggaagagtcgatcccgataaaccatcctgtttatgacacgctctcaagccttgcgtggaaaatccctggcggcggtcgcttaagtgcgatgggactgctgatgctggcggtggtggttatcggcatattcctcgcgcatcgtacccgttttggtaatcaggtatacgccattggcggcaacgcaacgtcggcaaacctgatggggatttccactcgcagcaccactattcgcatttatatgctttccaccggactggcaacactggcgggaattgtcttctcgatttatacccaggccggatatgcactggcgggcgtaggtgtggaactggacgccatcgcgtcggtggtgattggcggtacgttgttaagtggtggcgtcgggacggtgcttgggacgctttttggcgtggcaattcagggactgatccagacttacatcaactttgacggcacgctgagttcctggtggacgaaaatcgccatcggtattttgttgtttatttttatagcattacagcgtgggttaacggtgctgtgggagaatcgtcagagttcgccagtgacaagagtcaacattgcgcagcgataa

SEQ ID NO: 22112 - DNA, 1182 bp, Escherichia coli
gtgattattggcaacgccatgacccgtggaaatccgtgtgtggaagcggtactggaaaaaaacatcccttatatgtcaggtccacagtggctgcacgattttgtgctgcgcgaccgctgggtgctggccgttgctggtacacacggtaaaacgactacggcgggaatggcgacctggattctggaacagtgcggttacaaaccgggatttgtgatcggcggtgtgccggggaactttgaggtctcggcgcgtctgggcgaaagcgacttctttgttatcgaagcggatgagtatgactgcgccttcttcgacaaacgctctaaatttgtccattactgcccgcgtacgctgatcctcaacaaccttgagttcgatcacgccgatatctttgacgacctgaaagcgatccagaaacagttccaccatctggtgcgtatcgttccggggcagggccgtattatctggccggaaaacgacatcaacctgaaacagaccatggcgatgggctgctggagcgagcaggagctggtgggcgagcagggtcactggcaggcgaaaaagctgaccaccgatgcttccgaatgggaagtcttgctggatggcgaaaaagtgggcgaagtgaaatggtcgctggtaggcgaacataatatgcacaatggcctgatggcgattgcggcggctcgccatgttggtgtagcgccgacagatgccgctaacgcgctgggttcgtttattaatgctcgtcgccgtctggagttgcgtggtgaagccaatggcgtgacggtatatgacgatttcgcccatcacccgactgcgattctggcaacgctggcggcgctgcgtggcaaagttggcggtacggcgcgcattattgccgtgctggaaccgcgctcgaataccatgaaaatggggatctgcaaagacgatctggcaccttcattaggtcgtgccgatgaagtcttcctgctgcaaccggcgcatattccgtggcaggtggcagaagtggcagaagcctgcgttcagcctgctcactggagtggcgatgtggatacgctggcagatatggtggtgaaaaccgctcagcctggcgaccatattctggtgatgagcaacggcggttttggtgggatccatcagaaactgctggatggtctggcgaagaaagcggaagctgcgcagtaa

SEQ ID NO: 22113 - DNA, 189 bp, Escherichia coli
atgaataactatcccgaattgatgagctgcgaagaggtcgcccgcttattctgtgtaaacaagcgcacgattttaaggtggatcgacagcataccaggttttccgatccctgtaagtcccgaaggcacgccagtaaaattcatcaaaaaagaggtttttgcgttcttctggcggggtcacaaccattaa

SEQ ID NO: 22114 - DNA, 381 bp, Escherichia coli
atgaccaatatcgaaagattagaccgcgccgctgatattatgcgccgcaaatggatctacgaagctgaaacgggtttattcttcaaccgtgataacaagaacgtcattaaaggcagcctgaccagcaaaggctatttaatcgttacggtgcaggaagatgattttaaggtagcgctgagttaccagaaagcggcctatgtttactgttacggtgcttatgatgaaaccctgttcgatgttcatcatatcaacctgcaaaaaaacaagataatcgaatcaagaacattcgtttactgcctaaaaaacagcatcgccggattcacagaaatgtacgcaaaatcagacggttgggcttcactcaatggctgcaaccgcaagtaa

SEQ ID NO: 22115 - DNA, 312 bp, Escherichia coli
atgtactacccaaataacacctaccttaaccttgttggcgataattacaaaccatcagcagaggcaatggaaaaaaaagcattcgacaaagcaatgagcgccgaggcagatcgcatcgttgacatgctgcccgacttactcagtggaattattgacgaatccgctgccgcgttattcagccagatgccggaatgtatggccggtgaagatcctgtgactcatgacgtattaaatgaaaccagtattcgccggaggcttgccggaaaggtggcaaataagatcggccacggcatgagttttcttcagaaataa

SEQ ID NO: 22116 - DNA, 447 bp, Escherichia coli
atgacacgcaaagaatatattcaccaactggcacaagaaattattagcatgaaccagccactgattgaccgtattgtcacggctgaagtcgataaaattaaatttcaattagcatcgctcgcgccgaacatggcggcaatacgaagcgaaatgttggctgtaatggggccaaacagcgctctcggtgtgtatttagcaaagactgatgagttagctggctttaaatccgccgccgctacagcgacaaataaagcgcctgatacacgtcaatattttgaaggggaattagacgatttcacacgtcaatacttcgatggggaattggacgatttcacgcgccagtacttcgacggtgatgatctggtaaataaaagtatccgcgaatatttcgatggcagcgacgagtttaatcgccgcttggatgactatttccacatgggggaataa

SEQ ID NO: 22117 - DNA, 348 bp, Escherichia coli
atgagttttttagatgaagcaaaacgccggatcgccctggcagttaaagcgaacgaatcagcaccggaaccggattctaaagaacgggcttttcgcaaaggtatggcggctgtacttgagaatatcgacgcggttgatgaaaaactggtccaggaaatgatggttgtgctgatggacaatctggaacgccgcttcggtggcaaacagccagaacagcaagcagaaccagaacaacccgccgctaacaggcagagcggcccgaaaacgccggttctgaatagttatttttctgagccgacccggaaaactgatacccggacaccggatattgataactattttaattaa

SEQ ID NO: 22118 - DNA, 276 bp, Escherichia coli
atgttagccttgaggatagccaccgggatgggccgcgttattacccgccaggtaaatgaaattcgtcatgccaatagtgatctgccattgaaacggcaacaacttcgcctctttgctgagtatgtttttggcacttttcacgatctgcttaagcatattgatgccaaagatgcgccccgtaatgctgaagagcgggactttatcaaacgtctgcgcatgattgaacgcgatctgcacacacagttatccagtgtcgggtgtgacgtaggcgagtaa

SEQ ID NO: 22119 - DNA, 417 bp, Escherichia coli
atgagcacagaaattacagaaaacaatgatttagataattttgagagcgctacgcaggaaaaaaggcgcgtaggcagaccgtcaaaatatagtaacaagatggcgacgcagatcgcgctactggttggtgaggggtacagcctgagaaaaatagccagcatggagggatacccaccactagcaacgatcctacgctggcaaatcgagtttcccgacttcagggaagcgatcggctggatgaagtggctacatagtcatgacctgggccaacaagcaattgaggcgatcgagagcgtaaaccttaatgatgaagatgccgcgatgcagcttaagaaagcacaagcgaaagcacgggcgctgatagacaccgcgaagttattagacctgaaatcaaatccatttgggggcaatgagtaa

SEQ ID NO: 22120 - DNA, 405 bp, Escherichia coli
atgagtttattcacaagcaaacaaggccaacgcctttttaccaatcgagagcagaacggcggcgctgaccgctacgaaacactgagagttaagcctttccgtgactggtcacacgcagatctccagtgttacaacgccatttggattgagtcgatgaacgagcttatcgaagagtattacatcgagccaagagagccgataacgggacaaatccttgctatctatggaaatgcattggttgaactgaatggcagccataaaagcgttttggcgctcaattcgctggcgtatcgtgacgatcttccggtggctgaacaaggggtgcatttgtgggagatcgcccaggtggaacgggaactaaatcaagggggaagcgatgccgatgaaacacaaagctgtcattga

SEQ ID NO: 22121 - DNA, 447 bp, Escherichia coli
atgccgatgaaacacaaagctgtcattgagaaaatcaagcgacaactacgcgaagaaatcgaagatattaaccgcgatgcagcgacggcagtctatgcaatcgggatggaagtaattgccaatgcagcagcaaaaacgccacgcgatacagggacgctaatcggtggctattacgatccgcaggtaagccaggatgatgaaggggcgcattgcacggtaggaaacacggtccgctatgccttttgggtgcatgaaatgccagggacactgaaaggacaaccgcgcgagcatttcggaaaaacccgtgaaggtatcgcctttggtggcggcactggtcgcggtgaatattgggaaccagacggcgaacctgaatttcttaaaaaggcgcttggggaagagtatcacagcgagtacatggatatagcgaaacgatatttaaaacgatga

SEQ ID NO: 22122 - DNA, 2190 bp, Escherichia coli
atgagtgaacaagtaggaagcctccagatagatattgacctgaagacaaaaaatttactggtgagccagcgccaagctgaggccgcattagacgacattggcaataagattggcggcgcagagcgacaagcagcaaaacttaacacgcagctaacaaaaacatcgcgggctattagcggcaatctgcgtgccggattccagcaggctggataccagatccaggacttcgtggtgcaggtccagtcaggacaaagcgcactgatagcgttgtcacagcaaggcagtcagttattgagtgccttcggtggctggggcattgctcttggtgcggcacttacggttggtgtatcgctgtttaaagccctgacaggtgaaaccgaggagacaacagacaagaccgaagtatttgaaaaggcttgcagtaatttacgccaggtaatggccctgaacgagcaaggcgtaaacgtcctgtcaaacgaatacgccaacctcgcgaaacagtcagccgaggccgctgcgatggtcgaacgccatttaacactgaagctacgcgaagccaaatcagcgatgagtgactatatcaccaacacactggacgcacagaacgcgactgcgggttttggggtgattggatctgacagtttactcgacatgatgcaggcgatgcgtgcgctgggcgttgaaacgtatgattacgccgacgcaatggaccagttgaacggcatgggcctacgtggtgcgcagatccataaagagctaaaccgcgaacttgatgatatggcagataaaactggcgtatcaaaagaagcgctctttgatatgtgccaggaattaatggcggtcgctaaagcgccgacagcggacagcatttcagcactatcaaaccgcattgccagcatgaaccctacgacagcggaaggtgttggcctgtttaatgaactacagcaggcattgattaaagccgctattgagcttcaacagttcggggatattagcgaagataccgccaataaacttgatgtattaaatcacgcggcggattctcaatgggtgaaagactttacagaaaacataaagatgcaaacaaaggcattgggagcttcacgcggcgaaatcatgcggttacagcttgagaataagaaccttacagtagaagaacgcgccaatgctgaacaggcaatcaagaattacgaagataaacaaaatcgacttgaacaagagaaagaagcgaaacgccaggcactggcagcagaacgcgccgccaccgcagaacgcaaacgcctgatgcgtgaagaagagcaggagcggaaacgcattgagcgtgagaaagaacagcgcgagcgccagacaaaacaagcgaaacgcttcactgaccagctcgaaaccaactatctgacaaccgtcaatccggcgacaggtcaggcagaaaatccgctggcagcaattcaggcgcaacagcaacgtgaattcgaaatgctggaaatgtatcgccagcagaatttagtcagtgagcagcaataccgtaacgccctggaaaacattattaacacgtcagccatgcgcgtagcagccatcgagcaacaacaggcgagcgaatacagtaagaacattcagggattgatgagcgcatatagcggcatgtttggcgagcttgctggcgttatttctgatggtgcgggcgagcagagtgcagcatatcgtgcgatgtttgcagtacagaaaggttttgcaatggcatccgcagcattgagccttcaggagtcactagcgaaggctaacgcgctcccattcccggctaatattccggcctatgcgcaagcattaacagcaggtacgcagatcatttcagccattcgcgggatagcttttggtggcggtcgctacaacggagggtccgttaatggtggcaatctttatagggttggcgaaggtggaaagatggagctattcaccactactgacgggaagcagtacatgatcccaggtgaaaacgggcgtatcactcctaatcgcgacctagtcagcggtggtggcgtcacaatcaacagtccgatcaccattaacactacgaatggcttcagtgaggaagactcaagacgtctggaggacaccataaagcgcgtggctatgggtgtggtaagagaacagagcacacgcccagggggaatgcttcaagcccgcagacgttaa

SEQ ID NO: 22123 - DNA, 180 bp, Escherichia coli
atggaacgctttatcaataaactactgattgttgttatcgcaatagcgatcttcgtatgggtgggcgtgctgtttagccagtttcctgatgctatgcggttaattcagatcgagggacaacgcgcttttatccctggctggcgcgtgatttacgaattaatccgctggtttgcagcttga

SEQ ID NO: 22124 - DNA, 618 bp, Escherichia coli
atgaacgagttttacagaacgcttcgcaaagtggctgagcagaaatacccaggtaaacatggtggtatcggataccagattatcgcacagcaattgcatatcggtagcgatgaaatcaaagcgatcttcacgcagcatctgaaaggagctaaacgcccgaacattgtacacctggcaaaagtggtggaattcctcgggcttggtcgatgcgcgatagcccagctttacgccgcagaaccggatgaagtagcagcagaacaagcgcccagcagcaataatgagatgggagctaaagaatgggtaaatcctaatccgaagaaatacagtgtcggcatgttgtgccaggtactggcggcgttaggtggcgaatacctgggcaataacgccggactgcaacagaaaatcacagcactggataacgacggcaaccggaagccgattagtaacggtgctttctaccgactgattgagcaagccgaaaagagaggattgattgaggttaacagggaaatcacatacaagaaagacgagaacggcaaacagattggcaaaggcaagataggtgataagctgataactttgcttcccaactggaaagacaagctgggggatgaataa

SEQ ID NO: 22125 - DNA, 2745 bp, Escherichia coli
atgacggtctcaaccgaagttaaccacaacgaatacacaggtaatggtgttacgaccacattcccttacaactttagggttttcaataaatctgatctggtggtgcaggtgattgaccttgaagaaaatatagctgtgctggctcctgatactgattacacagttaccggggctggaggatataacggcggtaatgtaattctgtcgaaggcgttagctaacggttaccagatttctatatcacgagagctacccgttacgcaggaaactgatctgagaaatcagggcaagtttttcgctgaggtgcatgaagacgcgttagataagctgacgatgctgattcaacacgttcgcagattgttaaaactttcgttaagaaaaccatctggaatagcaggttggtatgatgcgctaaataattatataagaaacttgcgagatccatcacatccacaagacgcagcaacaaaaaattatgttgacacgaatataaataaaacattgcgtgtaccagagccttttatttcatctttaccacctgcatctctgagggcaaataagagccttggttttggtggtggtggtgagcctgtattgagagatgcagagggcagtggtttatgggggtattatctaattgactcttttgaaggcggagcaacaattaccgggcgttttcaggcattgcgtcaagaatctacagatagatattatcgatgggatgggcaattacctaaatatgtaatgccaggatcaacacctgagacggcaggtggaattggcaatggtcgatggttgttgatatctgttcctgatatgtcaatgcatcttgattactatattgcgcgcatggctgctggtgatagtgttcatattgcatgttatggtgactctactgttgatggattttctacaactgggtggtcggccaatcccacagcaggaggggaggcagtaggtaattcagatcataatgttaactctcctaactcatggccagtaaagcttcaggaaatattgcgtgatatatatggcaatgaaaaaatatatgttcataatgctgggtatgctggcaaatcattagctgatggttgggcgtacagaaattatgatgtagcaataactaataacccacattatggaacacctgatattgttcttattgattttggtttaaacgatgttagacctgctgactctcagattgagtcttttaaaaatgaagctgagtctcttgtaaaaaaaataatgttacatggttctttaccagtgtttctttcaagcgatccaatattgcgtaactataatgtcactaatgctatatttaataaggaagtaacaaggcagattgaggaggttaagaaggacgtttgcactcgccttggaataccttatatggataagacaacagatatcattaactggttatcaaacaataaagacggctatcagtggatggttgagcaatcaactaatactaataatgatggtacatatggcagtggagatgatgttgggttgcattttcgtgaccatggtcaatccatgaaggctcaaattatagcatctaaattctgtccagataccatctattttaatggtggttctgaaactatcacttctgcagatgcaaggtccagctcatttggtaattttcttttaacgttaaatggaacaactggcccgaataataagcaggggtttgcatttaagattaattattatgatcctaatgatgtacacaggccttctggtcctcgttcaccaatgtcaacattatggatttttaatcgtcatcctgatgctaccctaatatacaggggattagttggtgaaggatggggggtagactatccagataatcctgataatgttccgactacgcttgaaggagcgccaagagtatatgtaaaaaacattacagataaatctgaacgcttttttattcctgctggttctgggtggagatacagcggtttttacaaaccgtctgatgtcccatatattgttaagagacttcctattgggttgagtaaggttcagtatttatgtggagattttcgccattatgataatggcggaaaaagtatttttttctatggcaactttgagattattgagagaaatgaaacggcaggagcagtaaactgcttgagaaatagcggtgaattgtggaggtcatttgcagaaaccgatcataaattagttgttcttcctgagcagtctgatggaagtaatctttttggagtgatggggttggatgatgacaacccaagaaacaacgtcgattttcttatcgatgcaactattccaatagggtctggtattgtgattggtcatacattatcttttggtggtatgtctgaaaatgataatgatcattatggtgcaagaactgctaccgttttatataggcacaattctgtaagtattcgttttgctcttgttaagcaagacgctaatggtgatattatatatttatttagaacaaatcctagtatggatatattgttttcaaatgacagagttaaattaaaggtaagcataacgcgcgatttctcaatgaatcgtcaaatcgttaatgtttatgactcatataatggaaatttagtttcaaattcattatttaattatgatgacatgccgttgcatttttcaggcgctgccggtggtgtttattgggatggatctgtggctggctcaggtgttgttgcgttgcactatctttctattcatcggacttaa

SEQ ID NO: 22126 - DNA, 720 bp, Escherichia coli
atgcgtaatatagctattgataagttgccgataacaactcattgcaacatccctgtaatgactacagaaatgcttgctgatttgtatgacacagaacccaaactgattcgtcaaaactatcaacgaaatgcagatcgattcattgagggaaaacattgtttcaagctgataggcgaagaattacgagcatttaagaacgagtcctctcaaagaggtttgcttaatattgcaccaaaagtaagtcatcttttcttatggaccgctcgcggtgcagcacgacatgcgaaaattcttgagactgaaaaagcgtgggaggtcttcgaaaaactggaagattgctacttcgacagaaaacccgcaaatgtcagtggagatgttcgtctctcaagtggaactgatttatctaaggccactcaggtaattgaaaaattcatgcccgccattatggaggcgatcaagctggaagacaaaaaagaatacagtgccccactgaagcccggctaccgcagcctgattcactcgccgtctggtgttctcggcctgacggagaactcactgctgatgaatctgctgaaccagttacaggaagacgggcacgacgtatcgggcgcggcggcggaactgaccaccatgttctgctacatcgtcggtgtgagcaaatgcctgcgtgatatccagacccacgcggagtacatcaacgacaaggcagggttcttctga

SEQ ID NO: 22127 - DNA, 636 bp, Escherichia coli
atgccacaacaactgctgaatccggcaaaggtaactgaggttttcgctcatctgaacgaaactccagacaaccgcgccctgtattcagagttagtgaacggcaacgatgtcacatctgatgtcaaaggcgtttctctggctcctggataccgcgttgtccgtgtagacgatcgtaagaaaggcgagattccacaggcgcactttgaactgtcattgataaatgacctcaccgaagaggtagtgtattacaatcgtgtcattatccagcctgacagctatcttaactgccgtcctgtcacgcagatattggtatggagaacccagaagcctaagcatcgtgctgtgcttcatgatttcgccggcatcatcttcatgaactacctcttggaacggtacgatatcatcgtgtcagatcgcaaccagactcatgaaggcatgtcgttctggcaggctcgcatgtatgacgcactggaacttggcctccacctctatggttacgacatgatgacatgcgagctgatagagatgaataacgaggaagagcttgagaaaggtgaaacctggttgtggggtgatgcggaaaacttccaaaacagattggccataatttcaaagcataagctgccaataaaatag

SEQ ID NO: 22128 - DNA, 657 bp, Escherichia coli
atgaacgctcaactcatccccgtattcaacggcactatcgccaacgaaaccactcttctcgttaatgctcgcgatttacatacttttcttggggtaggtaaacgctttgcatcgtggattacagaacgcattgctgaatatggtttcgttgaaaatcaggactatattttggtttccccaaatcgggaaatcaaaggtcgaggaggcgatcgccgtagcaaagactatcacctcaccctcgatacggccaaagaaactgcgatggtcgagcgcaacgaaaaaggccgccagatacgccgatacttcattgaatgcgagaaacgtttaagacaacaagaaacaaaggtggagaaggtcttgtcaggcttcatgcccgccattatggaggcgatcaagctggaagacaaaaaagaatacagtgccccattgaagcccggctaccgcagtctgattcattctccgtctggtgttctcggcctgacggagaactcactgctgatgaatctgctgaaccagttacaggaagacgggcacgacgtatcgggcgcggcggcggaactgaccaccatgttctgctacatcgttggtgtgagcaaatgcctgcgtgatatccagacccacgcggagtacatcaacgacaaggcagggttcttctga

SEQ ID NO: 22129 - DNA, 3024 bp, Escherichia coli
atgccgttctatcctgtatctgaatcaaacaataacggatttatttctgctggtctcgccattcctgaacctgatgaacagagttttgatgtgcatccgccagaaggtaagaaccctgagcctcgcccaaaagagccttcattgcttgccgcagcaatacgacagaacaatattctggctggttttttccgtcctgccagacagtttgaaccggtcgaaggttataacccatatgctgataaaaatgagttgcacggctatgaatactggggggcgaaatttgcaggttcccgctcgccagaagaaacagcgtggattaagcagcagatagatgatgaaaatgaagatcggcgttttatctctgaagcaggcttggctggtggaatagccagtgcaacagcgatgctttttgacccggttactgttgcgtcaatgtttatccccggtgctcaaggaggggcactggcgcgtattggctcacagattgcgattggtgctgccggtactgcattaagcgaggtcgtactgaataatcagcaaataacacgctcatggggtgaaagtgccgctcacgttgcagcgggtgcgatgatgagcggcgtgtttgccagtgctggtgttgcgctttcgccatccgtccgggctgcagccacacgtgaggttgctgatgctcttgataatatgagcattacatcagcgactgacagggctgccgcttcgctttccgatggtggtagtgttggtgctatgaaaattgatacagcgactctggatgatttaacccctgtttctggtggggtggttggaaaggctgcatggaaagcagggagctatcttactcctttgacaaggttaatggagtctccgtccaagacggtgcgaaaaacaacgctggagttagccgaaaataatttcacccttaaaggaaatgaaagggggattgaaacaccggtagctgtagaaacccgtacacgtggatggcagcgtgaagaagctgctgttgttgtcggaaataaacaggcatacgcaaagtataaagctgatggtggtgacatgagttttgattcatttcgtcagcaggttgggaatgctatgcgaagcggtgatgtgcatgctaatcctgttgttcaggaaacggcgcaggcgatgcgaactgtattaaatcgggtgaaagttgaaatgcaaaagcttggtttattgccgccagatgaagaactgaaagcattaggccaggcaagctatttcccacgcatatataaagttggaaaaataatcagtgaacgcgataaatttcgacgtattttggttgactggtggtcgagaggaaataaaacactggatcctgaggatgctgaaattgcagcggatatcgtaattaataaaattactggtgctaaggttccacaggattttgtcagcgtattttctgtaaaagccgcaggtagtacgaaagaaagaacattaaatgttcctgatagtcttatcagggattatcttgaaagtgatgtgaattacgtgctgcaacgtcatatccgtgaagcggcagcagaaattgagttgacgagaacatttggcaaacgaactatgactgagcgtctgcaattaattgaggacgaatatgacagtctgttacgggaagtgcctgaaaaaataaaggcgaaatatgacgaaagtgtggcaaatctgaaagcacgttatgagagcaatggtgaagttgttcctcagggtaaactcgattcattaatgcgaaagtacgaaaaggaattacggaaagaacagtccagactttcaaaatcaagagcaaatgatctcagagacataacagcattacgcgatcgtcttgttggtacatatggtatgcctgatgatccgtcttcgttttttgttcgtgctggcgcttttctgcgggatgtgaacttcacgaccaaactcggtggaatgacagtatcagctattccagatctggccagaggggttatggttaatggtttccgtaacaccatgaaaggctatgcttctcagatatcccaatcaccggcatttaaggccagcaaagaagagatgttgaagatggggattggattggaagctgtactacattcacgttctcgtgcaattggtgatcttgttgacagttcttccaggacaacagcagtcgaagcaggaatggagcgaattactgatgccttcggcaagctgacactcatggatcgatttaatgacataaacaaatccatgaacggaatgctcacgtcagacggtattttgtctggtgcgttttctgcacgtcgcatggcaaaactcggtatcaacgacaatatggctgcgcgtattcgcagtgagttcgagaaacatggtgaggtaattgatggatggcacattggtaactttgataaatgggatgatcagtacgttgccggagtattccagtcagcggttctgaaagacgttaataacactatcatcacccccggtattggtgacacacctttatgggcgagtactccaatggggcgaacgatatttcagtttaaatcattcacaacggcttcatacaaccgtgcgctacttggtgggttacaggaaggaactgcgcaattttattatggcactgcatttcagattgctcttggctcactggtctatgcgctaaaagaagcatcgaaagggaaaaatgttgactggtcaccagagaagctggtgcttgagggtatagatagatccggtattcttgggccattgatggaatataacaacatggctgaaaaggctactggtggtgctgttgggctgggggctttatttggcactggcacacagtctaggtatgccagtcgtggattcgtaggatctctattcggaccgtcatttggtcttgcggatagcatcattgatgtgaccgcaggagtgttgaatggtgatgccggtgatcgtattgtgcataatgtccgaaccctgatacccggcaataacctgttctggattgcgccactaataaaccaggtggatccggtgatgaagtaa

SEQ ID NO: 22130 - DNA, 399 bp, Escherichia coli
atgtttgccggttataagccggaagattcggggctggatatcggcgacagcgccatcaccgaaacctacggcattggcggatttgctatggcgaccgcgcctgcaatcgtcgcgctggtgggcggtacggtggaagaggctatcgatttctcccgtcagatgcgcgaaatcactctcggcgaaaaccccaacgtcaccattccgctgctcggttttatgggcgtgccgtcggcaatcgacatcacccgcgtgggtagcagcggcattctgccggtgatcaacaccgccattgcccataaagatgcgggcgtcggcatgattggcgcgggcattgtgcatccccccttcgcctgcttcgaaaaagccattcttggctggtgcgaacgttacggcgtctga

SEQ ID NO: 22131 - DNA, 192 bp, Escherichia coli
atgatgaataaacgttttgttatcaatatggtgtcttcgctgttattaggcgctgcgctaatttctgcgccgctccaggcagcggaaaaagtcgtggtgaatatctctaaagtcgatggtatgccgtggtttaatcgcatgggcgaaggtgtggttgaggcgggtaaagcctttggtgttaatgcgtcatag

SEQ ID NO: 22132 - DNA, 615 bp, Escherichia coli
atgtactatttaaaaaacacaaacttttggatgttcggtttattctttttcttttacttttttatcatgggagcctacttcccgtttttcccgatttggctacatgacatcaaccatatcagcaaaagtgatacgggtattatttttgccgctatttctctgttctcgctattattccaaccgctgtttggtctgctttctgacaaactcgggctgcgcaaatacctgctgtggattattaccggcatgttagtgatgtttgcgccgttctttatttttatcttcgggccactgttacaatacaacattttagtaggatcgattgttggtggtatttatctaggcttttgttttaacgccggtgcgccagcagtagaggcatttattgagaaagtcagccgtcgcagtaatttcgaatttggtcgcgcgcggatgtttggctgtgttggctgggcgttgtgtgcctcgattgtcggcatcatgttcaccatcaataatcagtttgttttctggctgggttctggctgggttctggctgtgcactcatcctcgccgttttactctttttcgccaaaacggatgcgccctcttccgccacggttgccaatgcggtag

SEQ ID NO: 22133 - DNA, 351 bp, Escherichia coli
ttgcccggaacaagaacgttagcctcccgccccggtggtgactatcaactggcacgagaaccgttaaagctggaagccattctggcacgcgcgcgcaaagaggggtacggacagaactaccgcggctgggatcaagaagataagatcgcctctattgccgtaccgctgcgcagtgaacaacgggtgattggctgtctgaatctggtgtatatggcgagcgcaatgaccatcgaacaggcagcggaaaagcatcttccggcgctgcaacgggtggcaaaacagatcgaagaaggggttgaatcgcaggctattctggtagcgggaaggcgaagcggcgtgcatttacgctga

SEQ ID NO: 22134 - DNA, 672 bp, Escherichia coli
gtggataaggttttagattcagccctcctttcttcggcaaataaaagaaagggtatccttgctattggcgcacatcctgacgatatagaattaggctgtggcgcatcgcttgctcgtcttgcgcaaaaaggaatttatatcgcagccgtggtgatgactaccggcaactctggcacagatggaataatcgatcgccatgaagaatcgcgcaacgccctaaagatattagggtgccaccaaactattcatcttaattttgctgacacccgcgctcatttacagctcaatgatatgatttccgccctggaagacatcattaaaaatcaaattccgtctgatgtagaaatcattcgtgtatacaccatgcatgatgctgaccgccatcaggatcatcttgcagtctatcaagcctcaatggttgcctgccgaactattccacaaattctcggctacgaaaccccgagtacctggctttcatttatgcctcaggtttttgaatccgttaaagaagaatatttcacagtcaaacttgctgcattaaaaaaacataaaagccaggaacgacgcgattatatgcgtcatgatcgcctgcgtgcagttgcacaatttcgcgggcaacaggtcaatagcgatctgggtgaaggctttgtaattcataaaatgattctttga

SEQ ID NO: 22135 - DNA, 198 bp, Escherichia coli
atggataaccctggtcctcttgctgcgcttatgtttggctttgttatgttggtgttactaattttcatgttcgccttttatttcattgggcgctcaattaaaaataaaataatatctacaatatttattgttctctctaccatttcattaatattgataattacatttgctttttttattattcatatattgcaataa

SEQ ID NO: 22136 - DNA, 246 bp, Escherichia coli
atggcaaaaaagagcggaaatcataaaaccaaacaaagtattggtggcgggatgactgccgcagaagcgcaccatcggtatggccgttatggtgacggtagctcatgtgaagaagaggtaaacacataccttagtaacatgagaaatagcaaatatataggcaatgacaaggtggcaatgcccctatccagaaaccagcgtcgtcttgccaaaaaaatggggataaacttggaaaacgaatcctga

SEQ ID NO: 22137 - DNA, 207 bp, Escherichia coli
atgaaaccaacactcctctcattgctgcgaggtggaaaacacagcatccgagatatggcaaagattcttggtatctcaagatcgaaggtttcttggttcatcgttgagcttgaacgtcgcaaatgggtagaggtaaccaggagcgcaatatatttccacgatggaacccgttccaacaagcagaacgaatacaaggttaagttatga

SEQ ID NO: 22138 - DNA, 150 bp, Escherichia coli
gtggtgttggaagacgcaacacaccaggcggggccggaatttgcacagaaagccgcgttattcaatatcgaaaccttttttggctgggtcagcgacgtcgaaacgttctgcgacgcgctttctcccacgtcctttgctcgtatcgcttaa

SEQ ID NO: 22139 - DNA, 387 bp, Escherichia coli
atgccaaaatccgtaattattcccgctggcagcagcgcaccgctggcccccttcgttcccggcacgctggctgatggcgtggtgtatgtctccggtacgctggcttttgatcaacataataacgtgctgtttgccgatgacccaaaggcgcaaacccgccacgttctggaaaccatccgcaaggtgatcgagacggcgggtggcacaatggcggatgtgaccttcaacagcatctttattaccgactggaaaaattacgccgcgattaacgaaatctacgccgagtttttcccgggtgacaaaccggcgcgattctgcattcagtgcggactggtaaaacctgacgcgctggtggaaatcgccacaattgcgcatatcgccaagtga

SEQ ID NO: 22140 - DNA, 450 bp, Escherichia coli
atgaacgaagccgttagcccaggtgcgcttagcaccctgttcaccgatgcccgcactcacaacggctggcgggagacacccgtcagcgatgagacgttacgggagatttataccctgatgaaatgggggccgacatcagctaactgttctccggcacggatcgtgtttatccgcactgcagaaggaaaagaacgtctgcgcccggcgctttccagcggcaatctgcaaaaaaccctgaccgcgcccgtcaccgcgatcgtcgcctgccgtgcgctggggctggataccggcccgatgtcgggctttgaccgtcaatacgttgacgacgccttttttgcgggcagcacgctgaagagcaacctgctgattaatatcggctatggcgatagcagcaagctttatgcgcgcctgccacgtctgtcctttgaggaagcctgcgggctgttgtaa

SEQ ID NO: 22141 - DNA, 1011 bp, Escherichia coli; identical to SEQ ID NO: 6533

SEQ ID NO: 22142 - DNA, 366 bp, Escherichia coli
atggagatgtattttaaaagaatgaaagatgagtggaccgggcttgtcgaacaagcagatccgctcattcgtgctaaagccgcggaaattgccgttgcgcatgctcattatctgagtattgagttttatcgaattgtccgcatcgacccgcatgccgaagaattcttgagtaatgaacaagttgagcggcagttgaaaagtgcgatggaacgctggattattaacgtgctttctgcccaggttgacgatgtcgaaaggctaatacaaatccagcataccgtcgcggaagtgcatgcccgcataggaactccggtagaaattgtcgagatggggtttcgggtgctgaaaaaatcctctatccggtaa

SEQ ID NO: 22143 - DNA, 147 bp, Escherichia coli
atgattactaaaaatttccgactgaatgcgctggcaaataagtatgcgtcggcactgtataaccacattacctccaccagcggcggggactattcatggttgatgcggacggcgaggccgtacgtgtggaaatcgtcaatggagtaa

SEQ ID NO: 22144 - DNA, 687 bp, Escherichia coli
atgcagctaacagcgcacaggcggcagcggcctcgcagactgcatcggcaaactccgcaacagcagctaaaaaatcagaaaccaacgcgaaaaatagcgagacagccgcaacgacaagcgaaaccaacgcaaagtccagccagacggcagcgaagaccagcgaaacgaatgctaaagccagtgaaactgcagcaaaaaacagccaggtttcagcagcccaaagcgagagcgcggcagccggttctgcgacttcagcagctggatcagcaactgctgcggctaacagccagaaagctgcgaagacgagtgaaactaacgcaaagtccagccagacggcagcgaagaccagcgaaacgaatgccaaagccagtgaaactgcggcgaaaagcagtcaggatgcagcggcccaaagcgagagtgccgcagccagttctgcaagcgcggcggctgcttctgccactgcatcagctaacagtcaaaaagcagcaaaaaccagtgaaaccaacgcaaaggcgagcgagactgcggcggcgaactcggcgcaagcatcggcagcaagccagacagcagctaaagcaagtgaagacgcagccagagagtatgcaagccaggcagcggagccgtataaacaagttttgcagccgttgcccgatgtgtggataccgtttaatgattcactggatatga

SEQ ID NO: 22145 - DNA, 204 bp, Escherichia coli
atgcatgtttgtgatgttaagggatttgcctgcgcttatcaggaaggaattcaaacaatgagtgatggcaaaataagacatgctattttcatgactctactggataacactaatttgatacgactggtcgcagctatcgacccagattatttggacgaatatcaagaagaagtaatgaaaatgatactttctgcccatcaataa

SEQ ID NO: 22146 - DNA, 375 bp, Escherichia coli
atgcagttccatcaggttattgaagctcaagcaacggtggctttggaagcattgaaagcttcattgcttatcgaagatcttactcaccttgagaagagtgcaaaagaaatttctttctcaaggaagcttgccaaaattgccaaacactcacctgtactggggaaaattgatgtgccagagattatcgattatgtaagcaagcatacctatctttcaacagttttaattgtaagtgaagacggcacacaattgctcgtaaaaacaaaagaatcccaaaagcattttattaaactacttagtgatgattatttagagtctccgctcacaaaaatactctatgactcattagctaaagatgaactaaaagcacactga

SEQ ID NO: 22147 - DNA, 921 bp, Escherichia coli
ttgattcaagcatacgaagacggctatttttacagagataccccgcaccacgatcactgcccgctttcagcattttccagaccatcccagcaattcaccgttattgataatgttctgtacgttgtcgaagtggaaagtggtgaaattcttcactacgactcgacagagtatttgcttgatggtggcattgttcaggatctgcatttgagttactcgacagcagacaccgccaaatcaaaacaggctcaccgtgaatacgctaataagctgggcgaccttccagggaatgcagcctataacgggatcaaggaatacgcagacgtattaagcaagccagatttcaagaaagtatttgcattgtgtcaggaagtagatagacgcaatgtagtgtttataaaacgtgcggatttgagcataatactgaacaccacgccggatcatctcaatcgtgtattatctgctcttgaacgtaagcactacatcaaagttgataaagctgaacaccagaaaggagtattaaaactgtgggttaatccttcgtttgtctggaagggtgattcagctaaccgctacttatctggatatttgcagggcttcccaatcttggaacgtaaacgctccacaaaacgttctgacgtgctcgacacgctcacggctgctgcaatggttgcctttgatacctggcacattgaacacggttataaggccaatcagcctcattctaatgaatggtatgcagagatcacgatgtacgaaaacgcctacggcgaaggggtgaggcttgcagcagaaaataagacattgaacaagttattgaacccggcaacatctgagggggatttcgtttatgagctattcactacggcacaatacagggaatacctgcaaacattggcaaaacaagtaaggagattacactga

SEQ ID NO: 22148 - DNA, 207 bp, Escherichia coli
atgaaaagagcaatgatggtgatgtgtgggctactgttttcacagttggtagcagcagggcagatcacaatgatcgatccccagcaggatacgacggagaatggcaagacgctttgcacctacgagaacagccagtatgtttttacctacgtcactaaagggcagtgcccctatgcaaagactttcgatactcaggattcagagtag

SEQ ID NO: 22149 - DNA, 351 bp, Escherichia coli
atgaaaaaattgattctcgcggcgctgctcgtcccccccttcgcctcaagtgcaaccacattcacctgtaaggccattcaggaagggcagatagattctggtagccaaaaatcgtctgtcgaaactcgcctcgatgtgcgggacaaaatcatgaaagtgagcatgggtggtaaaacctggcggctgggtttcattggagagaaaagtattgcgaagatgtacgccaccccagacggtggaatagcggttacttacatcgacaacggcagtgatccagttttcgttatgcgcccaactaacaacgatggtgaaacggcactctacacgctgagcctgtgttctgagatctaa

SEQ ID NO: 22150 - DNA, 576 bp, Escherichia coli
atgacaactgtgatcggatatgtgcgagtttccaccagcgatcaaaacgttgaaaaccagaagaagcagatagccgatgctggttatagcgtaactcgctggtttagtgatgaagcggtgagtggtgcaatcaaggcaggagagcgtccagggtttgctgaactactcaattatgtgcgagaaggcgatacgctgatcgtgattgctatagaccgcttgggacgtaacactatcgatgtactatctactgttgaaatgttgcaaatgaagggtgtgaaggttgtcagcttgcgagaggggtttgatctttcaacaccagtgggtaaagccatgctcactatgatggcaggacttgccagcctggaaaaagacctaatcgcagagcgtagagccgcaggaatcaaacgagctcagtcggaaggtaagcattgcggcagaccgatcaaagcaaccgttgaacaagtacgtgagttattagcacgaggattaccaccagcagcggtccaggataggttagagatcagcaaagcaaccttctaccgacttaagtcgttcttgcaactccctgatatttga

SEQ ID NO: 22151 - DNA, 651 bp, Escherichia coli
atgacaggaaaggtcataccatttaatccacttgataaacaaaatttaggtgccagcgttgcggaagccttattgagcaaagatgctcatcctctggaggagttaacctcatttcaaggagcagggatttacgcaatttattacactggcgatcatcctgcttataggcaactggcagaactgaatcgtgacgggcaatttcgattgcctatctacgtgggtaaggccgtcccagcaggggcgagaatggggcttaccaaccctgataaggttggtaacgttctgtttaggcgcttgaaagaacatgcagaaagtattcgcgcagcggaaaatctttcgattgaagatttttattgtcgatttttggttgttgatgacatctggatcccattgggagaatcgctggttatctctcgctttaaaccgatttggaattcgtctattgatggtttcggtaatcatgacccaggtaagcatcgctacactggtttacgtcctcgctgggactttatgcacccggggagaggatgggctcaaaatttacgtgagcgtgatgaaactgtggatgaactcattcgtgattctatacagtatcttcagaatttaccgccttgcttggctcagaaatttatcgaagctgaaggcgattaa

SEQ ID NO: 22152 - DNA, 1209 bp, Escherichia coli
atgaaatctgtagaactatttgccggtgctggtggcttggctatgggttgcgaaattgctggttttgagcatcttgcagtcgttgaatgggataaatgggcctgtgataccgttagagagaacaaaaagaatggctttccgctgttgtctgattgggatctttttgagggtgatgtaagagaatttgattggtcgaaaatccctaaagggattgaccttcttgcgggagggccaccttgccagccattttcaatcggtggtaagcacaaggctaattctgattcgcgggacatgtttccagcgacagcagaagcgatcaggcaaattcgccctaaggctttcatcgtcgagaatgtgaaaggcttaacacgggcaacctttgcgagctatttccagtacatccagttacagcttgagtttccagaagtagccccgcgaaatggcgaagactggagcgagcatttaaaacgcttgcaggaagaaaaaaccagtggaaagaacaaagggagagggctgacgtataacgttctggctacgttagtcaatgcagcagactacggcatcccacaaaaacgtgagcgtgtcttcattgttggcttccgcgatgatcttgaaattgagtggtcgttccctaaaccgacacacagttatgatgcactcgtttatgatcagtgggttactggtgattactggaaacgacatggtttagaaatgccaactgttccaagccagatggttaaccgtatcgcaaaattgcgtaaaaatcctcccgatacacttccgtggaaaactgttcgagatgcaatcgcggatttgccagatcctgaaacaaaggcggcaaagatgatccggaatcatgcgttccaggcgggggcacgaacttatcccggtcataccggaagccccttagatctgccagctaaaacgctcaaagcaggtgctcatggcgttcctgggggcgagaacatgcttgttcgtgatgatggctcagtacgctattttactgtgcgagaaagtgccagaattcaaacatttcccgatagttatcgttttcacgggagttggactgaaactatgaggcagttaggtaacgctgtgccggttcatttggcgtattgcgttgccagcagtgtagcggaaaagctgctgacctctgaaattgggaacatccttaagcagggtggcaattataaaagggcttctgcatga

SEQ ID NO: 22153 - DNA, 216 bp, Escherichia coli
atgaccttcagcacgcaacctgcaggcacgccggataccgactggttagctgataaagacatcgcatttttgccggaaggcgttgatgagaaaacagttatccttaatgaaggtgattttgttgtgttttatccgggggaagtgcataaaccgctgtgcgcagtgggcgcgccagcccaggttcgcaaagcagtagtgaagatgctgatggcgtga

SEQ ID NO: 22154 - DNA, 2544 bp, Escherichia coli
atgaataccgcaattcctgttttagttgcgctgatagggctgatcttgcttggcatgatgctggcttactatcagcgtatggtgaaggaatatcaccttaaaaaatatcgctcaaaggatgaatccttcgccgacatgcttaattacgccgctgttgttgatgatggtgtaatcgtatgtaagaacggttcttttatggcgtctttcttttttaaaggtgcagacaacgcgagtgcgacagaccaggaaagagagcttgtctcatttcgtattaataaggcaattggcagactcggcaacggctggatgatgcacgttgatgcgattcgcaatccggctccgtcatacagtgaccgaaacgcttcacactttcctgatcgagtttccgctgccgtggatgaagaacgtcgccgcctgtttgaaaagctggggcaactgtacgaaggctgctttatcgttacgttcacctggtttccacctgcactggcggaaagtaaattcacggaactgatgtttgatgatgaacgcgaagtttctaccgataaagacactacgctgaatctcattgaaaaatttaagcatgagatcagcataattcaggcaaacctttcgcaggctgtttcgattgaacgactgaacggcgtgaaaatcgaacaggaagacggctccgttgcaacgatggatcagcagctggagtacctgcagtattgcattacggggctgcaacatcctatacgtctgccaaacaatcctatttatctggatagcctcattggtggtcaggagtttattcctggcatcacgccacgtatcgggaaaaacttcattcaggttgtggcgattgaaggctacccctctgaatcttatccaggcattctcagcaagctggccgagcagccatgtgaataccgctggtctacgcgctttattttccttgattctcacgaagccatatcaaaactgacggcattccgcaggaaatggaaacagaaagtacgcggctttatgtcccagctattcaataccaataacggttacgttgatgaagacgccttgtccatggtcaacgatgcatcttccgctattgcagaaactaactctggtttagtcagccaaggttatataaccagtgtcattgtcctgatgaatgaggaccgccagaaggtcgaggatgccgcagagtttatgcgcaaggctgttaacaatactggcttcgctgcgagaattgaaacagtaaatacggtggatgcctactttggttccttaccaggccacggtgttgaaaacgtacggcgaccgctggtaaacactcttaaccttgccgatctgatgccaaccagcactatctggccgggcgaaaataaagccccaagtccgctattcgaagtaggtgcaccgccattaacacactgcgttacttctggaaacactccgttcagacttaacctacatgttcgtgatctcggccacgctttcatgtttgggccaacccgtgcaggtaagtctacccacctggcgttaaccgctatgcagtggcgtcgttactctaattcgcgaattttcactttcgataaaggactgtcgatgtttgcaacctgcaaggctgtaggtggaaaacatttcacgattgccggtgatgataaccaactggcgtttgcacctttatcacgccttgatacccctactcgccgcacatgggcgatggaatggattgaagccattctgatcctaaatggggtcaatgttgacgcacctatgcgcaactctatagctgatgctattaagagtatgtctgagactcattccaaaaccctgtctgaatttacagtcacggtacagaacaatgttattcgtgaggcgctcaaacaatacaccattgatggcaacatggggcatctgcttgatgcagaggaagatggtcttgatatttctgatttcatgacgttcgagattgaacaccttatgaacatggatcagaaatacgcactacctgtgctgctctatctctttcgtcgcattgaagaatctctggatggtaatcctacactcatcattcttgatgaggcttggctcatgctgggtcatccagaattcaggggaaaaatccgcgactggcttaaatccatggcgaagaaaaactgcgctgttcttatggcaactcagcagcttagtgatgcggccaattctggcattcttgatgtcattattgagtcaactgcctccagatttttcttgccaaacggcaatgccctgcaggaagaagctatgtctctgtatatcaatatggggcttaatcgccgccaaattgaaatcatcgcgtcagctgtaccaaaacgcgattactactatgtatccgaacaaggtcgtcgcctgtatcagcttgcactagggccacttgcgttggcatttgtaggagccacagatcccgattcaatcgcaacaattaaacaactgtctgaaacatacggtgatggctgggttgatgaatggctacgcactaagggactggacttaaatgattacgagtatgaggttgctgcatga

SEQ ID NO: 22155 - DNA, 327 bp, Escherichia coli
atggcattacgcacgatccccattcgtagggcggcttcaagaacgaacctcttcatgggcggggaccgtgaattggttatgttttcaatcctactggcagcggtccttatctttatgtcacaagactggatcgctgttggtataggcatagtgatgtgggggggatcacttttcctgttaaggaaaatggctaaatcagatccgatgttacgtcatgtttatctacgtagcctcaaatacaaccagccgtattatgcgccccgtgccacgccgttccgcaaaaatacaggaacccaaggcaaacgttatgaaagggtgaaaaaatga

SEQ ID NO: 22156 - DNA, 384 bp, Escherichia coli
atgaaaacaggtttattccacttcaatctgagcaagcacgcctttattgcatttttaggtgccatgctgttcctcatggcagctgaacctgctctggcgtcaaacacatcaggcggtggcttgccgttcgatgactggatgaccaatatccgtacttctattacaggaccatttgcatttaccgcttccattatcggcattgtcggtgcaggtgcgatgttgatctttggcggtgatatgaacggattccttcgcactctgattttcatcgttcttgttcttagctttctagttgcagcacaaaacactttgtctgcaatcacagggcagggggccgaactggtagcaatgctgactggttctaaaactgggggagcggcataa

SEQ ID NO: 22157 - DNA, 570 bp, Escherichia coli
atgaccagggtgcaggctgattttatttgtcgcgcaattgccgctcataaaaatattttagttattggtggtactggttcaggaaaaacaacgctgttaaacgccatcattgctgaaatagttcgtcagtttccagacgagcgcatctgcattatcgaagatacgggcgaactgcagtgcgccgcgctgaattttgttcaatatcacaccaccattaatgtcactatgactgacattcttcgtctgatcctgcgtatgcggcctgaccgtattttcgtaggcgagactcgcggtccagaagctctcgatatgcttgacgcctggaacaccggtcatgagggcggcgcggcctcacttcacgccaacaacacactttctgctctcacgcgtctgcgttctttaatctcacgtaacccctttgctccgcgagaaattgagccggtaattggcgaagcggtcaacgtgatcgttcagatatctaaaacttctgagggtcgccggattaaagaaattcgcgagattcagggttatgaaaacggggaatatatttcccaactcattgcggcttaa

SEQ ID NO: 22158 - DNA, 369 bp, Escherichia coli
atggacactgtagattccgtcgatttaagagcgatagaaaagctcaaaagggacatgggacgaagcctaatggaagcgttagaagatcctgaaacactagaaataatgctgaatccagatggtaagttatggcgtgaaaaattcggtcaacccatgttctgcatgggaactgtgcctgtacaacgttcaaaaaccattattcaaactatcgcgggctttcacaaaaagattatcgattccaactcgccatttcttgaatgtgaactccctattgacggttcccgttttgctggtcaactgccgccactggttgcaggtccaacctttgctattcgtaagaatagcctcacgtattttccttctggatga

SEQ ID NO: 22159 - DNA, 405 bp, Escherichia coli
gtgtacaacctaattttttttactaacatcctcagacttcttgaagaaagagacatgacaaagcaggaactatcccaaaaagctggggtttcaatctcttttttgtcggacctaacaaatggaaaagcgaacccatctttaagggtgatggaatccattgctaatgccctcgatgtagcccttcccgttctccttgaaacaactgaccttgatgaacacagtcttatgcttatggctgatggaaaacctgtaaaaagtctccctcctggatatgtaagagtgtccgtaattctttctgaacagcaagcctttcgggtacgaatgtggagtgaacatacacgtcagaagttagagcaagaagccaaagcaatgctggagatcatgcaagaaaagaaaaacagttaa

SEQ ID NO: 22160 - DNA, 375 bp, Escherichia coli
atgaaaaatcttaatcgttttcagtttatcggaaatctaacaaaagacacagagttacggtatacagcaaaaagcacaccaatcgcaattttcgatatagcggttaacgggagctataaagatcaggaaaccggtgaaattaaggaatataccgactttttccgcatcaaggtatggggtaaggctgcagaaaacgctgcaaagttcctagggaaaggctcgcaggtctttgtagaaggttctatgcgtaacacccagtatgaatcaaacggccaaaaagtgtatggcatcgattacattgcagagaatattcagtatttaaatataaaatccccggcaagcagttccgcagttgcaggtaagaaaactgattga

SEQ ID NO: 22161 - DNA, 879 bp, Escherichia coli
atgaagaatgacaataataattctgaacttgaaaagctaaaaaaggcagcgcttgatcagcgctccagaatggcgaatgaagggcagacagagaagcaactgacgctatttgacattgcaccatggccggattcgatgcgggcattacctaacgattatgctcgttctgctctgtttactgtcaagaataaacgtcagccccgtgaagcactgcagaagaaagagattttccacattaataaagatgtgcggatcacctataccgggcttgagttacgtgctgatgacgatgaacttgtgtggcagcaggttcttgaatacgccaaaaggaaaccaatgggtgaacctattaccttcacgttttacgaactttgccaggatctaggctggtcttataatggtcgttatatagaaaaggccgaggagtgcctaacacgcctacaggcaacagccatgcaatttatttctgagcgtgtcggtcaactggagtctgtttcattgattggtcgctttcgcgttcttgaccgtgggaaacggtcgtcaagatgtgaagtcatcattgataaagagatggttttgctttttgcaggtgagcactattcaaagtttgtgtgggagaaataccgtaaactttcacctacagctcgccgcctctttgattactttggttctcaccgggagccatatcctatgaaattagatacattcaagatgatgtgtggctcggaatccgaccgcctgaaaaagtggcgagagcaggttaataaagcatgtgctgagcttaaagatagtgggttaattcatagtgcttggatagataaagatcgtattcattgcaaacgaactaacgatgccgcagcgaggaatggtgacacttga

SEQ ID NO: 22162 - DNA, 441 bp, Escherichia coli
atggatgataagacggaagaactcattgcgctcattgctaaaaagcatggtatagccctggatgaaaccgatccgattatggtcgttcctaccctgcttcgttatttgctggatgaaagccaggagaaacagggtgaaattctggatgagtttaaatccgagctacaaagcgccctgatgcaatgggattacagcgcgaaggataaggctgaccgtatccttaacgccgcgctaaaggcgaatacggaagtaatggagcgggttttgacatctgccgccacagaaaccgctgtcataatcagaaaggaagttcaggacgagatcagaaaatcgcgggcgcacatagaaggggcaagaaaacttgccatgatgaatatggcggcggcggtgatcaccttaatggctgctgccgtcgcattcattgcaacgttttacaagtga

SEQ ID NO: 22163 - DNA, 786 bp, Escherichia coli
atgcctactgcagacaaaaataaaaaacagagtgaagctgaatcagtgccggtacgccatgctgttcacagcgcccagcaaggaaaaggtggttgtggtaaatccgttagcaccgctttggtggcaatgtacaagattagcaaaggtgagctaccgctgtgcatcgataccgatccgctcaatcctacattctctaattatgaaaaactgaacgtccgacagctgaacatcatggaaggtgatgaaattaatcagcgcaaactggataccctcatccagtggattgatgaagccggtgatagggacgttattatcgataacggcgctccgtcatttattccgttatcaagttatatgattagccagcaaatccccgccctgctttatgaaatgggtaaacagcttgtcattcatatctcgattgtgggggggcaggcacatgattacaccgtcgaggggttcaaggccatggtggagcagtatccgtcagaaacccgttttgttgtctggcttaacccgtattggggcgcggtggaatccgatcagggagtgccattcgaagaatcagaagcgtacctgatgaataaagacaaggttgatgcgcttatccgtttgcctacactcaaaaaggagttacacggccaggactttgccgacatgctggaaaactacaagaccttcgatgaggccattgaagataaatcattatctattatggttcgccagcgtctgaaacaggttcgcgcccttattttcgaacagcttgatttagcaacggtgatctga

SEQ ID NO: 22164 - DNA, 435 bp, Escherichia coli
atgggaaaagactatttaactgacctacaggagtgggttaagcagaaaaaggggctgaacggcaagagtgcaaacagcgggagggtagtcttcctggcaatccgggaagacgtcagaaatgcgattgaagccggttactctcttactacgatatgggaacacatgcacgaaactggtcgtgttaataccacatacgaaacttttcgtcggcatgtccggcgatacatagatgaacgaaaacgtgcagctgctgttagcgaaagtacacctgctggagctacggtaaagaaagaaagccaacaaaccggtccgtcaccgaagaaagaaacagtgatcccggagagaacgccggtcaaaagagagccgcctacgaataccggcagtcagctgccatctttcaattttaatcctggaaaaaagaaggggactaactaa

SEQ ID NO: 22165 - DNA, 354 bp, Escherichia coli
atgactgacaatcagacgcggaaaaattccacaccgatcaaggtttactgcttcccggaagagaagatgcagattgaagcaaatgccgccgctgcaggtctgagtgttgcggcctatttgcgtaaagtcggtatgggttacgaagtggagtcaattgttgatatagaacaggtcaaagagttgagtcgggttaatggagacttgggccgacttggggggttactgaagttgtggctttccaatgacgaacgtacccggaatttttcgccagcgttaattaatactctgctgggaaaaatcgacgccacgcaaagcgcccttcgtgacgtaatggacaggatactgagtaaatga
